United States Patent Application Publication US 2011/0183924 A1 - sequence listing, part 82

SEQ ID NO: 285443 - DNA, 8016 bp, Homo sapiens
aagagcgcgatttatccccttcgtgtgtcatccgccttcgtgtgtcatccaccttcgagcccaggatttgaagactgcagctccagtgaggccaccacgcctgtcgccgtgcagcacatccgccctgccagagtgaagaggcgcaagcagtcgcccgttcccgctctgccgatcgtggtgcagctcatggagatgggattttccagaaggaacatcgagtttgccctgaagtctctcactggtgcttccgggaatgcatccagcttgcctggtgtggaagccttggtcgggtggctgctggaccactccgacatacaggtcacggagctctcagatgcagacacggtgtccgacgagtattctgacgaggaggtggtggaggacgtggatgatgccgcctactccatgtctactggtgctgttgtgacggagagccagacgtacaaaaaacgagctgatttcttgagtaatgatgattatgctgtatatgtgagagagaatattcaggtgggaatgatggttagatgctgccgagcgtatgaagaagtgtgcgaaggtgatgttggcaaagtcatcaagctggacagagatggattgcatgatctcaatgtgcagtgtgactggcagcagaaagggggcacctactgggttaggtacattcatgtggaacttataggctatcctccaccaagttcttcttctcacatcaagattggtgataaagtgcgggtcaaagcctctgtcaccacaccaaaatacaaatggggatctgtgactcatcagagtgtgggggttgtgaaagctttcagtgccaatggaaaagatatcattgtcgactttccccagcagtctcactggactgggttgctatcagaaatggagttggtacccagtattcatcctggggttacgtgtgatggatgtcagatgtttcctatcaatggatccagattcaaatgcagaaactgtgatgactttgatttttgtgaaacgtgtttcaagaccaaaaaacacaataccaggcatacatttggcagaataaatgaaccaggtcagtctgcggtattttgtggccgttctggaaaacagctgaagcgttgccacagcagccagccaggcatgctgctggacagctggtcccgcatggtgaagagcctgaatgtgtcgtcctccgtgaaccaggcatcccgtctcattgacggcagcgagccctgctggcagtcatcggggtcgcaaggaaagcactggattcgtttggagattttcccagatgttcttgttcatagattaaaaatgatcgtagatcctgctgacagtagctacatgccgtccctggttgtagtgtcaggtggaaattccctgaataaccttattgaactaaagacaatcaatattaacccttctgacaccacagtgccccttctgaatgactacacagagtatcacaggtatattgaaattgctataaagcagtgcaggagctcaggaatcgattgtaaaatccatggtctcatcctgctgggacggatccgtgcagaagaggaagatttggctgcagttcctttcttagcttcggataatgaagaggaggaggatgagaaaggcaacagcggaagcctcattagaaagaaggctgctgggctggaatcagcagctacgataagaaccaaggtgtttgtgtggggcctgaatgacaaggaccagctgggcgggctgaaaggctccaagataaaggttccttcgttctctgagacactgtcagctttgaatgtggtacaggtggctggtggatctaaaagtttgtttgcagtgactgtggaagggaaggtgtatgcctgtggagaagccacgaatggccggctggggctgggcatttccagcgggacggtgcccatcccacggcagatcacagctctcagcagctacgtggtcaagaaggtggctgttcactcaggtggccggcacgcgacggctttaactgtcgatggaaaagtgttttcgtggggcgaaggtgacgatggaaaacttggacacttcagcagaatgaactgtgacaaaccaaggctgatcgaggccctgaaaaccaagcgtatccgggatatcgcctgtgggagctcgcacagcgcagccctcacatccagcggagaactgtacacctggggcctcggcgagtacggccggctgggacatggggataatacgacacagctaaagcccaaaatggtgaaagtccttctcggtcacagagtaatccaggttgcatgtgggagtagagacgcgcagaccctggctctgaccgatgaaggtttggtattttcctggggtgatggtgactttggaaaactgggccggggcggaagtgaaggctgtaacattccccagaacattgagagactaaatggacagggggtgtgccagattgagtgtggagctcagttctccctggcgctcaccaagtctggagtggtgtggacatggggaaagggggattacttcagattgggccacggctctgacgtgcacgtgcggaaaccacaggtggtggaagggctgagagggaagaagatcgtgcatgtggctgtcggggccctgcactgcctggcggtcacggactcggggcaggtgtatgcttggggtgacaacgaccacggccagcagggcaatggcacgaccacggttaacaggaagcccacactcgtgcaaggcttagaaggccagaagatcacacgcgtggcttgtgggtcgtcccacagtgtggcgtggacaactgtggatgtggccacgccctctgtccacgagcccgtcctcttccagactgcaagagacccgttaggtgcttcctacttaggcgtgccctcagatgctgattcttctgctgccagtaataaaataagtggtgcaagtaattctaagccaaatcgcccttctcttgccaagattctcttgtcattggatggaaatctggccaaacagcaggccttatcgcatattcttacagcattgcaaatcatgtatgccagagatgctgttgtcggggccctgatgccggccgccatgatcgccccggtggagtgcccctcgttctcctcggcggccccttccgacgcatctgcgatggctagtcccatgaatggagaagaatgcatgctggctgttgatatcgaagacagactgagtccaaatccatggcaagaaaagagagagattgtttcctctgaggacgcagtgaccccctctgcagtgactccgtcggccccctcagcctccgctcggccttttatcccagtgacggatgacctgggagctgcaagcatcattgcagaaaccatgaccaaaaccaaagaggatgttgaaagccaaaataaagcagcaggtccggagcctcaggccttggatgagttcaccagtctgctgattgcggatgacactcgtgtggtggtagacctgctcaagctgtcagtgtgcagccgggccggggacaggggcagggatgtgctctccgcggtgctttccggcatggggaccgcctacccacaggtggcagatatgctgttggagctctgtgtcaccgagttggaggatgtggccacagactcgcagagcggccgcctctcttctcagcctgtggtggtggagagtagccacccttacaccgacgacacctccaccagtggcacagtgaagataccaggtgcagaaggactcagggtagaatttgaccggcagtgctccacagagaggcgccacgaccctctcacagtcatggacggcgtcaacaggatcgtctccgtgcggtcaggccgagagtggtccgactggtccagcgagctgcgcatcccaggggatgagttaaagtggaagttcatcagcgatgggtctgtgaatggctggggctggcgcttcaccgtctatcccatcatgccagctgctggccctaaagaactcctctctgaccgctgcgtcctctcctgtccatccatggacttggtgacgtgtctgttagacttccgactcaaccttgcctctaacagaagcatcgtccctcgccttgcggcctcgctggcagcttgtgcacagctgagtgccctagctgccagtcacagaatgtgggcccttcagagactgaggaagctgcttacaactgaatttgggcagtcaattaacataaataggctgcttggagaaaatgatggggaaacaagagctttgagttttacaggtagtgctcttgctgctttggtgaaaggtcttccagaagctttgcaaaggcagtttgaatatgaagatcctattgtgaggggtggcaaacagctgctccacagcccattctttaaggtactagtagctcttgcttgtgacctggagctggacactctgccttgctgtgccgagacgcacaagtgggcctggttccggaggtactgcatggcctcccgtgttgctgtggcccttgacaaaagaacaccgttgccccgtctgtttcttgatgaggtggctaagaaaattcgtgaattaatggcagacagcgaaaacatggatgttctgcatgagagccatgacatttttaaaagagagcaagacgaacaacttgtgcagtggatgaacaggcgaccagatgactggactctctctgctggtggcagtggaacaatttatggatggggacataatcacaggggccagctcgggggcattgaaggcgcaaaagtcaaagttcccactccctgtgaagcccttgcaactctcagacccgtgcagttaatcggaggggaacagaccctctttgctgtgacggctgatgggaagctgtatgccactgggtatggtgcaggtggcagactaggcattggagggacagagtcggtgtccaccccaacattgcttgaatccattcagcatgtgtttattaagaaagtagctgtgaactctggaggaaagcactgccttgccctgtcttcagaaggagaagtttactcttggggtgaggcagaagatgggaagttggggcatggcaacagaagtccgtgtgaccgccctcgtgtcatcgagtctctgagaggaattgaagtggtcgatgttgctgctggcggagcccacagcgcctgtgtcacagcagccggggacctctacacatggggcaaaggccgctacggccggctggggcacagcgacagtgaggaccagctgaagccgaagctggtggaggcgctgcagggccaccgtgtggttgacatcgcctgtggcagtggagatgcccagaccctctgcctcacagatgacgacactgtctggtcctggggggacggggactacggcaagctcggccggggaggcagcgatggctgtaaagtgcctatgaagattgattctcttactggtcttggagtagttaaagtggaatgcggatcccagttttctgttgcccttaccaaatctggagctgtttatacctggggcaaaggcgattatcacaggttgggccatggatcagatgaccatgttcgaaggcctcggcaggtccaagggttgcaggggaagaaagtcatcgccatcgccactggctccctgcactgtgtgtgctgcacagaggatggtgaggtttatacatggggcgacaatgatgagggacaactgggagacggaaccaccaatgccatccagaggcctcggttggtagctgcccttcagggtaagaaggtcaaccgtgtggcctgtggctcagcacataccctcgcctggtcgaccagcaagcccgccagtgctggcaaactccctgcacaggtccccatggagtacaatcacctgcaggagatccccatcattgcgctgaggaaccgtctgctgctgctgcaccacctctccgagctcttctgcccctgcatccccatgttcgacctggaaggctcgctcgacgaaactggactcgggccttctgttgggttcgacactctccgaggaattctgatatcccagggaaaggaggcggctttccggaaagtagtacaagcaactatggtacgcgatcgtcagcatggccccgtcgtggagctgaaccgcatccaggtcaaacgatcaaggagcaaaggcgggctggccggccccgacggcaccaagtctgtctttgggcagatgtgtgctaagatgagctcgtttggtcccgacagcctcctccttcctcaccgtgtctggaaagtcaagtttgtgggtgaatctgtggatgactgtgggggcggctacagcgagtccatagctgagatctgtgaggagctgcagaacggactcacgcccctgctgatcgtgacacccaacgggagggatgagtctggggccaaccgagactgctacctgctcagcccggccgccagagcacccgtgcacagcagcatgttccgcttcctgggtgtgttgctgggcattgccatccgaaccgggagtcccctgagcctcaaccttgccgagcctgtctggaagcagctggctgggatgagcctcaccatcgcggacctcagtgaggttgataaggattttattcctggactcatgtacatccgagacaatgaagccacctcagaggagtttgaagccatgagcctgcccttcacagtgccaagtgccagtggccaggacattcagttgagctccaagcacacacacatcaccctggacaaccgcgcggagtacgtgcggctggcgataaactatagactccatgaatttgatgagcaggtggctgctgttcgggaaggaatggcccgcgttgtgcctgttcccctcctctctctgttcaccggctacgaactggagacgatggtgtgtggcagccctgacatcccgctgcaccttctcaagtcggtggccacctataaaggcatcgagccttccgcatcgctgatccagtggttctgggaggtgatggagtccttctccaacacagagcgctctcttttccttcgcttcgtctggggccggacgaggctgcccaggaccatcgccgacttccggggccgagacttcgtcatccaggtgttggataaatacaaccctccagaccacttcctccctgagtcctacacctgtttcttcttgctgaagctgcccaggtattcctgcaagcaggtgctggaggagaagctcaagtacgccatccacttctgcaagtccatagacacagatgactacgctcgcatcgcacttacaggagagccagccgccgacgacagcagcgacgattcagataacgaggatgtcgactcctttgcttcggactctacacaagattatttaacaggacactaagatggggaaacgtcctcgtgagatgagagcctgagccaggcagcagagcactcgctgctgtgtagactgtaggctgcctggtgtgtctgatgagaagcgtccgtcctcgagccaggcgggaggagggagtggagagactgactggccgtgatgggaatgacagtgagaaggtccgcctgtgcgcgtggaacactgtggacgctcgacttccaagggtcttctcacccgtaatgctgcattacatgtaggactgtgtttactaaagtgtgtaaatgtttatataaataccaaattgcagcatccccaaaatgaataaagcctttttacttgtgggtgcaatcgatttttttttctttctcctttctttcaagtgtcgtgagtcgtcttgattgtatattggaaataactgtgtaacaaatcgtattataaatatttcaattaattttactctgaatttgtttattaaaagacttttgaacatgaaatgattagtattacttgaatgcatccagaggatatttaaaccaaaatgaaaaaccagaaggccatttggtgtcccctctcccaggtgtccccttgtagcatatgcattatgtcatctgaattgaggcctttctgtgaacagcatcataacttctatcatggaaagtgtactatatataatgtttgtgtcatgtatatgcctaaattttaatcatctataaataaaacatctgacat

SEQ ID NO: 285444 - DNA, 906 bp, Homo sapiens
ttttcttttctggctttcgggagtgtctttgtaaactattaaaaagcgttaggtcttcagcgtatgtgtttacttgcaggcctgagacctgggaggaagctggagaaaagatgccctctgaatctttctgtttggctgcccaggctcgcctcgactccaaatggttgaaaacagatatacagcttgcattcacaagagatgggctctgtggtctgtggaatgaaatggttaaagatggagaaattgtatacactggaacagaatcaacccagaacggagagctccctcctagaaaagatgatagtgtcgaaccaagtggaacaaagaaagaagatctgaatgacaaagagaaaaaagatgaagaagaaactcctgcacctatatatagggccaagtcaattctggacagctgggtatggggcaagcaaccagatgtgaatgaactgaaggagtgtctttctgtgctggttaaagagcagcaggccctggccgtccagtcagccaccaccaccctctcagccctgcgactcaagcagaggctggtgatcttggagcgctatttcattgccttgaatagaaccgtttttcaggagaatgtcaaagttaagtggaaaagcagcggtatttctctgcctcctgtggacaaaaaaaggtaacaataaagcgaagaaagaatcctgatgccagttaaatataaaattcagactgttttgtttcagaaagtttaaggttttcaatataggctgtcttcaccttctgaaatttattcttgctttccctttttgtatgttttgtataatctggagaatggatttgccaatttgctcatgtagtaatagaccatgctgtgtaatctgtgccattattttattttattcaataaaatttttcttttcttttttttgg

SEQ ID NO: 285445 - DNA, 931 bp, Homo sapiens
ttttcttttctggctttcgggagtgtctttgtaaactattaaaaagcgttaggtcttcagcgtatgtgtttacttgcaggcctgagacctgggaggaagctggagaaaagatgccctctgaatctttctgtttggctgcccaggctcgcctcgactccaaatggttgaaaacagatatacagcttgcattcacaagagatgggctctgtggtctgtggaatgaaatggttaaagatggagaaattgtatacactggaacagaatcaacccagaacggagagctccctcctagaaaagatgatagtgtcgaaccaagtggaacaaagaaagaagatctgaatgacaaagagaaaaaagatgaagaagaaactcctgcacctatatatagggccaagtcaattctggacagctgggtatggggcaagcaaccagatgtgaatgaactgaaggagtgtctttctgtgctggttaaagagcagcaggccctggccgtccagtcagccaccaccaccctctcagccctgcgactcaagcagaggctggtgatcttggagcgctatttcattgccttgaatagaaccgtttttcaggagaatgtcaaagttaagtggaaaagcagcggtatttctctgcctcctgtggacaaaaaaagttcccggcctgcgggcaaaggtgtggaggggctcgccagagtgggatcccgagcggcgctgtcttttgcctttgccttcctgcgcagggcctggcgatcaggtacggtccctggtgtggcgcgttgttctgcttccctaatacatcaacagactgggtttcgaactcggttcagccaccatgtgccctttggctgatcccatgtgctctctgtgcctcagtttccttgcttgtgagatgagaggctgcagaggctgtttggcttttcacatctgtgctt

SEQ ID NO: 285446 - DNA, 185 bp, Homo sapiens
cagatgcagacacggtgtccgacgagtattctgacgaggaggtggtggaggacgtggatgatgccgcctactccatggtcagtgcctcccatgtgaccgcccgcacctgggccgctgtccgtctagcgctctaacagtcttacaccttggctttctctgtcccttgaaagaattaactatatcta

SEQ ID NO: 285447 - DNA, 622 bp, Homo sapiens
ttcccgaggccaacggcacctggacgggaatggtcggggagctgatcgctaggaaagcagatctggctgtggcaggcctcaccattacagctgaacgggagaaggtgattgatttctctaagccattcatgactctgggaattagcattctttaccgcgttcatatgggacgcaaacccggctatttctccttcctggacccattttctccgggcgtctggctcttcatgcttctagcctatctggccgtcagctgtgtcctcttcctggtggctcggtgggcattcacgctgatcatcatctcatcctacacggccaacctggcagccttcctgaccgtgcagcgcatggatgtgcccattgagtcagtggatgacctggctgaccagaccgccattgaatatggcacaattcacggaggctccagcatgaccttcttccaaaattcccgctaccagacctaccaacgcatgtggaattacatgtattccaagcagcccagcgtgttcgtgaagagcacagaggagggaatcgccagggtgttgaattccaactacgccttcctcctggaatccaccatgaacgagtactatcggcagcgaaactgcaacctcactcagat

SEQ ID NO: 285448 - DNA, 906 bp, Homo sapiens
  misc_feature (35)..(36): n is a, c, g, or t
gtgttttgggcctcagtatactttttgagtaatannattcctgaggaggactgccggtcgttcggacgtcttgcctgtcgctggaggagaggtccgggctctccaggaaggtggctgcggcgacaaaatgaagatattcgtgggcaacgtcgacggggcggatacgactccggaggagctggcagccctctttgcgccctacggcacggtcatgagctgcgccgtcatgaaacagttcgccttcgtgcacatgcgcgagaacgcgggcgcgctgcgcgccatcgaagccctgcacggccacgagctgcggccggggcgcgcgctcgtggtggagatgtcgcgcccaaggcctcttaatacttggaagattttcgtgggcaatgtgtcggctgcatgcacgagccaggaactgcgcagcctcttcgagcgccgcggacgcgtcatcgagtgtgacgtggtgaaaggtgggatgtgtgtgggctgaaattccgagctgcggttgtgcatgagaatacacccttcgtggtaccccatctccgggacgttctcggctctgtgcgttcagtccctcaggaaccgtggaccttaatttaccttgctaagttcagaccttctcttcctttcctttcctttcctctcctgcccattttcctgttcttctgtccttcaatacttctgtagcttcccattcatgttctcttctcccagcaggcctcattgtgtgcagaaactgtggtgggggctgtgctgtctcctccctgcctcctgcctcctgcggctgttggatttgggaatgaccttggtgagagtctcactgctccagggtctctttttggtccaaaggctagacctatagagttggatcactttttttctttccggtgaaataaatggtttttcaactta

SEQ ID NO: 285449 - DNA, 480 bp, Homo sapiens
ggcctcattgtgtgcagaagagaacatgaatgggaagctacagaagtattgaaggacagaagaacaggaaaatgggcaggagaggaaaggaaaggaaaggaagagaaggtctgaacttagcaaggtaaattaaggtccacggttcctgagggactgaacgcacagagccgagaacgtcccggagatggggtaccacgaagggtgtatcctctcctgcccattttcctgttcttctgtccttcaatacttctgtagcttcccattcatgttctcttctcccagcaggcctcattgtgtgcagaaactgtggtgggggctgtgctgtctcctccctgcctcctgcctcctgcggctgttggatttgggaatgaccttggtgagagtctcactgctccagggtctctttttggtccaaaggctagacctatagagttggatcactttttttctttccggtgaaataaatggtttttcaactta

SEQ ID NO: 285450 - DNA, 1600 bp, Homo sapiens
gaggcaagaattcggcacgagggccctgctggtttctgtgcgggctcttgtcaggatggtgaagctgttcatcggaaacctgccccgggaggctacagagcaggagattcgctcactcttcgagcagtatgggaaggtgctggaatgtgacatcattaagaattacggctttgtgcacatagaagacaagacggcagctgaggatgccatacgcaacctgcaccattacaagcttcatggggtgaacatcaacgtggaagccagcaagaataagagcaaaacctcaacaaagttgcatgtgggcaacatcagtcccacctgcaccaataaggagcttcgagccaagtttgaggagtatggtccggtcatcgaatgtgacatcgtgaaagattatgccttcgtacacatggagcgggcagaggatgcagtggaggccatcaggggccttgataacacagagtttcaaggcaaacgaatgcacgtgcagttgtccaccagccggcttaggactgcgcccgggatgggagaccagagcggctgctatcggtgcgggaaagaggggcactggtccaaagagtgtccgatagatcgttcaggccgcgtggcagacttgaccgagcaatataatgagcaatacggagcagtgcgtacgccttacaccatgagctatggggattcattgtattacaacaacgcgtacggagcgctcgatgcctactacaagcgctgccgtgctgcccggtcctatgaggcagtggcagctgcagctgcctccgtgtataattacgcagagcagaccctgtcccagctgccacaagtccagaatacagccatggccagtcacctcacctccacctctctcgatccctacgatagacacctgttgccgacctcaggagctgctgccacagctgctgctgcagcagcagccgctgctgctgttactgcagcttccacttcatattacgggcgggatcggagccccctgcgtcgcgctacagccccagtccccactgttggagagggctacggttacgggcatgagagtgagttgtcccaagcttcagcagccgcgcggaattctctgtacgacatggcccggtatgagcgggagcagtatgccgatcgggcgcggtactcagccttttaaagcttgaggtgggatgtgtgtgggctgaaattccgagctgcggttgtgcatgagaatacacccttcgtggtaccccatctccgggacgttctcggctctgtgcgttcagtccctcaggaaccgtggaccttaatttaccttgctaagttcagaccttctcttcctttcctttcctttcctctcctgcccattttcctgttcttctgtccttcaatacttctgtagcttcccattcatgttctcttctcccagcaggcctcattgtgtgcagaaactgtggtgggggctgtgctgtctcctccctgcctcctgcctcctgcggctgttggatttgggaatgaccttggtgagagtctcactgctccagggtctctttttggtccaaaggctagacctatagagttggatcactttttttctttccggtgaaataaatggtttttcaactta

SEQ ID NO: 285451 - DNA, 498 bp, Homo sapiens
cgagctcggtaccccagcagcatagatattatcgactcagccttttaaagcttgaggtgggatgtgtgtgggctgaaattccgagctgcggttgtgcatgagaatacacccttcgtggtaccccatctccgggacgttctcggctctgtgcgttcagtccctcaggaaccgtggaccttaatttaccttgctaagttcagaccttctcttcctttcctttcctttcctctcctgcccattttcctgttcttctgtccttcaatacttctgtagcttcccattcatgttctcttctcccagcaggcctcattgtgtgcagaaactgtggtgggggctgtgctgtctcctccctgcctcctgcctcctgcggctgttggatttgggaatgaccttggtgagagtctcactgctccagggtctctttttggtccaaaggctagacctatagagttggatcactttttttctttccggtgaaataaatggtttttcaactta

SEQ ID NO: 285452 - DNA, 686 bp, Homo sapiens
ttacaatcgagctcggtacctcataggttcgcaggattatgccttcgtacacatggagcgggcagaggatgcagtggaggccatcaggggccttgataacacagagtttcaaggcaaacgaatgcacgtgcagttgtccaccagccggcttaggactgcgcccgggatgggagaccagagcggctgctatcggtgcgggaaagaggggcactggtccaaagagtgtccgatagatcgttcaggccgcgtggcagacttgaccgagcaatataatgagcaatacggagcagtgcgtacgccttacaccatgagctatggggattcattgtattacaacaacgcgtacggagcgctcgatgcctactacaagcgctgccgtgctgcccggtcctatgaggcagtggcagctgcagctgcctccgtgtataattacgcagagcagaccctgtcccagctgccacaagtccagaatacagccatggccagtcacctcacctccacctctctcgatccctacgatagacacctgttgccgacctcaggagctgctgccacagctgctgctgcagcagcagccgctgctgctgttactgcagcttccacttcatattacgggcgggatcggagccccctgcgtcgcgctacactgaagcttgggaacaactcactctcatgttctagatcgc

SEQ ID NO: 285453 - DNA, 928 bp, Homo sapiens
  misc_feature (643)..(643): n is a, c, g, or t
  misc_feature (928)..(928): n is a, c, g, or t
ggccgagtcgcgcggaggcggaggcttgggtgcgttcaagattcaacttcacccgtaacccaccgccatggccgaggaaggcattgctgctggaggtgtaatggacgttaatactgctttacaagaggttctgaagactgccctcattgtgtgcagaaactgtggtgggggctgtgctgtctcctccctgcgccccagtccccactgttggagagggctacggttacgggcatgagagtgagttgtcccaagcttcagcagccgcgcggaattctctgtacgacatggcccggtatgagcgggagcagtatgccgatcgggcgcggtactcagccttttaaagcttgaggtgggatgtgtgtgggctgaaattccgagctgcggttgtgcatgagaatacacccttcgtggtaccccatctccgggacgttctcggctctgtgcgttcagtccctcaggaaccgtggaattcgcgaagctgccaaagccttagacaagcgccaagcccatctttgtgtgcttgcatccaactgtgatgagcctatgtatgtcaagttggtggaggccctttgtgctgaacaccaaatcaactaattaaggttgatgacaacaagaaactaggagaatgggtaggcctttgtanaattgacagagaggggaaacccgtaaagtggttggttgcagtgtgtagtagttaagactatggcagggtctcaggcagtgtcctgagagttttcaatgccagaatgagaataatctggtccaaaataaaacaaaaaaaaaaaaccggcgtctttggggggaaagagataaggcgggcaagtgtctccccgttgcaggaaagggccaggggaataaccgacaaggaggaaggagtaatggccagcaacgggcattttctctttcttcttttctctcctcccacccn

SEQ ID NO: 285454 - DNA, 1462 bp, Homo sapiens
aggccactgcactacagcctgggtgtctcaaaaaagaatttgtctcaaaaactttttgccaggcgcggtggctcacacctgtaatcccagcactttgggaggctgaggcaggtggagcatctgagatcaggagttcgagaccagcctggccaacttggtgaaaccccatctctactgaaaaatataagttagccgggcatggtggcaggcgccttaattgtggctatttgggaggcagaggcaggagaatccttggaacccgggaggtggaggttgcagtaagctgagatggagccattgcactcaagcctgggggacaagggcaagacttctctcaaaaaaaaaattttttttttaatttcttgattctattagagcaagtcatttttgctttctgctttgagatcctgatctccctgtaacagacaatgtaagagtagttttttcatgactcagaatctggcctggtttaatgctatattcatactagatgcttttgcattttctcttttttaaaccatttattgcttttgtttttgtttttgttttttgagacagagtctctctgttgcccagactggagtgcagtggcatgatctggctcaccgcagcctctgcctcccgtgttcaagtgattctcctgcctcagcctcctgcgtagctgggattacaggcgcctgccaccacacctggctaatttttgtatttttagtagagatggagtttcaccatggccaagctggtctcaaactcctggactcaagtgatccgcctgcctcctaaattgctggaattacaggcatgagccatcacacccagccttaagctatttattgacttgttgagaggaaaaactctatcaagaacaatggcagcctaggcaacatagtaggatcccatttctaagacaattttaaagttagctctttgtggtgatacgcagctgaagttccagctactaagaggctgaagcgggaggatagtttgagcccaagagtttcaagctgtggtgagctgattgtgtcactgtactccagcctaggtgacagagcaagacgaattatttttaagaggtgatttgaaaagattgactataactcactgattttcaacatcaatgtattatgaagttgtttttatgcttccaatcaagtgtatctttgagtggaagccacatagttggctctgtgtaattgacaaggttatgctgccactccttaggaataataaagtactttttcttgctttttgttttttagacatccagctctgtcacccaagctgcagtgtggtggcatgattgtagctcactgtaactttgaactcctgagctcaagggatcctcccgccttggcctcccagagtttttgcagggactatatgtgagccactgcgtctggtcaaaatgtagtttttcaagagtaatgctttaataaactgatttttttcccccaaagcattt

SEQ ID NO: 285455 - DNA, 2080 bp, Homo sapiens
ggggtggtgcttgggaggttagagggagacacctagagtgaacggcaaaatggagcgcggaatactgtctggctgtgcacgtggaggtggcgaaatgtggaagcttaacgaagttggcgccatgaagctaaagactgctaccccggggctctagctcgctccgcctaatggcgggccgcaccccgccggcgaagcccacgtttgtaggtccgccctcacgctgatctcttgcccaatcagcgagttcggcttcgcgaggttggtgcccattggctttcgcataaaagctccgaggttacagacgtttccacctcttgccggcctcttaggtaattggcgtccgtggtaaccaatcaggaagaggatctgcgggaacgccggccttttactttcttgagtggccaatccggttgtaggctcacctcccccttctactcagagcactgctgcggccgccgccattttagcgttttgtcagaagcgtccgcgccgcgaggaggaggccctgctggtttctgtgcgggctcttgtcaggatggtgaagctgttcatcggaaacctgccccgggaggctacagagcaggagattcgctcactcttcgagcagtatgggaaggtgctggaatgtgacatcattaagaattacggctttgtgcacatagaagacaagacggcagctgaggatgccatacgcaacctgcaccattacaagcttcatggggtgaacatcaacgtggaagccagcaagaataagagcaaaacctcaacaaagttgcatgtgggcaacatcagtcccacctgcaccaataaggagcttcgagccaagtttgaggagtatggtccggtcatcgaatgtgacatcgtgaaagattatgccttcgtacacatggagcgggcagaggatgcagtggaggccatcaggggccttgataacacagagtttcaaggcaaacgaatgcacgtgcagttgtccaccagccggcttaggactgcgcccgggatgggagaccagagcggctgctatcggtgcgggaaagaggggcactggtccaaagagtgtccgatagatcgttcaggccgcgtggcagacttgaccgagcaatataatgagcaatacggagcagtgcgtacgccttacaccatgagctatggggattcattgtattacaacaacgcgtacggagcgctcgatgcctactacaagcgctgccgtgctgcccggtcctatgaggcagtggcagctgcagctgcctccgtgtataattacgcagagcagaccctgtcccagctgccacaagtccagaatacagccatggccagtcacctcacctccacctctctcgatccctacgatagacacctgttgccgacctcaggagctgctgccacagctgctgctgcagcagcagccgctgctgctgttactgcagcttccacttcatattacgggcgggatcggagccccctgcgtcgcgctacagccccagtccccactgttggagagggctacggttacgggcatgagagtgagttgtcccaagcttcagcagccgcgcggaattctctgtacgacatggcccggtatgagcgggagcagtatgccgatcgggcgcggtactcagccttttaaagcttgaggtgggatgtgtgtgggctgaaattccgagctgcggttgtgcatgagaatacacccttcgtggtaccccatctccgggacgttctcggctctgtgcgttcagtccctcaggaaccgtggaccttaatttaccttgctaagttcagaccttctcttcctttcctttcctttcctctcctgcccattttcctgttcttctgtccttcaatacttctgtagcttcccattcatgttctcttctcccagcaggcctcattgtgtgcagaaactgtggtgggggctgtgctgtctcctccctgcctcctgcctcctgcggctgttggatttgggaatgaccttggtgagagtctcactgctccagggtctctttttggtccaaaggctagacctatagagttggatcactttttttctttccggtgaaataaatggtttttcaactta

SEQ ID NO: 285456 - DNA, 1990 bp, Homo sapiens
tggggtcggggtatactttaaatctccatggtctcagaaaggtttcttcatcgcggaccctgggaggctggttcccagagggaacttgtcctcagcgtctcctggacagtgcagcctcctgccgggcctacttctggaaggccattacagaggtcctttcaccacctgtgagaggtttgattttgggggagctccgggactctcaaggctacagtgtggactgctggcccaaggagaaggtaattggcgtccgtggtaaccaatcaggaagaggatctgcgggaacgccggccttttactttcttgagtggccaatccggttgtaggctcacctcccccttctactcagagcactgctgcggccgccgccattttagcgttttgtcagaagcgtccgcgccgcgaggaggaggccctgctggtttctgtgcgggctcttgtcaggatggtgaagctgttcatcggaaacctgccccgggaggctacagagcaggagattcgctcactcttcgagcagtatgggaaggtgctggaatgtgacatcattaagaattacggctttgtgcacatagaagacaagacggcagctgaggatgccatacgcaacctgcaccattacaagcttcatggggtgaacatcaacgtggaagccagcaagaataagagcaaaacctcaacaaagttgcatgtgggcaacatcagtcccacctgcaccaataaggagcttcgagccaagtttgaggagtatggtccggtcatcgaatgtgacatcgtgaaagattatgccttcgtacacatggagcgggcagaggatgcagtggaggccatcaggggccttgataacacagagtttcaaggcaaacgaatgcacgtgcagttgtccaccagccggcttaggactgcgcccgggatgggagaccagagcggctgctatcggtgcgggaaagaggggcactggtccaaagagtgtccgatagatcgttcaggccgcgtggcagacttgaccgagcaatataatgagcaatacggagcagtgcgtacgccttacaccatgagctatggggattcattgtattacaacaacgcgtacggagcgctcgatgcctactacaagcgctgccgtgctgcccggtcctatgaggcagtggcagctgcagctgcctccgtgtataattacgcagagcagaccctgtcccagctgccacaagtccagaatacagccatggccagtcacctcacctccacctctctcgatccctacgatagacacctgttgccgacctcaggagctgctgccacagctgctgctgcagcagcagccgctgctgctgttactgcagcttccacttcatattacgggcgggatcggagccccctgcgtcgcgctacagccccagtccccactgttggagagggctacggttacgggcatgagagtgagttgtcccaagcttcagcagccgcgcggaattctctgtacgacatggcccggtatgagcgggagcagtatgccgatcgggcgcggtactcagccttttaaagcttgaggtgggatgtgtgtgggctgaaattccgagctgcggttgtgcatgagaatacacccttcgtggtaccccatctccgggacgttctcggctctgtgcgttcagtccctcaggaaccgtggaccttaatttaccttgctaagttcagaccttctcttcctttcctttcctttcctctcctgcccattttcctgttcttctgtccttcaatacttctgtagcttcccattcatgttctcttctcccagcaggcctcattgtgtgcagaaactgtggtgggggctgtgctgtctcctccctgcctcctgcctcctgcggctgttggatttgggaatgaccttggtgagagtctcactgctccagggtctctttttggtccaaaggctagacctatagagttggatcactttttttctttccggtgaaataaatggtttttcaactta

SEQ ID NO: 285457 - DNA, 1633 bp, Homo sapiens
tgtgcctggtacgccccggagttacgggatgaagcgtccgcgccgcgaggaggaggccctgctggtttctgtgcgggctcttgtcaggatggtgaagctgttcatcggaaacctgccccgggaggctacagagcaggagattcgctcactcttcgagcagtatgggaaggtgctggaatgtgacatcattaagaattacggctttgtgcacatagaagacaagacggcagctgaggatgccatacgcaacctgcaccattacaagcttcatggggtgaacatcaacgtggaagccagcaagaataagagcaaaacctcaacaaagttgcatgtgggcaacatcagtcccacctgcaccaataaggagcttcgagccaagtttgaggagtatggtccggtcatcgaatgtgacatcgtgaaagattatgccttcgtacacatggagcgggcagaggatgcagtggaggccatcaggggccttgataacacagagtttcaaggcaaacgaatgcacgtgcagttgtccaccagccggcttaggactgcgcccgggatgggagaccagagcggctgctatcggtgcgggaaagaggggcactggtccaaagagtgtccgatagatcgttcaggccgcgtggcagacttgaccgagcaatataatgagcaatacggagcagtgcgtacgccttacaccatgagctatggggattcattgtattacaacaacgcgtacggagcgctcgatgcctactacaagcgctgccgtgctgcccggtcctatgaggcagtggcagctgcagctgcctccgtgtataattacgcagagcagaccctgtcccagctgccacaagtccagaatacagccatggccagtcacctcacctccacctctctcgatccctacgatagacacctgttgccgacctcaggagctgctgccacagctgctgctgcagcagcagccgctgctgctgttactgcagcttccacttcatattacgggcgggatcggagccccctgcgtcgcgctacagccccagtccccactgttggagagggctacggttacgggcatgagagtgagttgtcccaagcttcagcagccgcgcggaattctctgtacgacatggcccggtatgagcgggagcagtatgccgatcgggcgcggtactcagccttttaaagcttgaggtgggatgtgtgtgggctgaaattccgagctgcggttgtgcatgagaatacacccttcgtggtaccccatctccgggacgttctcggctctgtgcgttcagtccctcaggaaccgtggaccttaatttaccttgctaagttcagaccttctcttcctttcctttcctttcctctcctgcccattttcctgttcttctgtccttcaatacttctgtagcttcccattcatgttctcttctcccagcaggcctcattgtgtgcagaaactgtggtgggggctgtgctgtctcctccctgcctcctgcctcctgcggctgttggatttgggaatgaccttggtgagagtctcactgctccagggtctctttttggtccaaaggctagacctatagagttggatcactttttttctttccggtgaaataaatggtttttcaactta

SEQ ID NO: 285458 - DNA, 2604 bp, Homo sapiens
ggggtggtgcttgggaggttagagggagacacctagagtgaacggcaaaatggagcgcggaatactgtctggctgtgcacgtggaggtggcgaaatgtggaagcttaacgaagttggcgccatgaagctaaagactgctaccccggggctctagctcgctccgcctaatggcgggccgcaccccgccggcgaagcccacgtttgtaggtccgccctcacgctgatctcttgcccaatcagcgagttcggcttcgcgaggttggtgcccattggctttcgcataaaagctccgaggttacagacgtttccacctcttgccggcctcttaggtaattggcgtccgtggtaaccaatcaggaagaggatctgcgggaacgccggccttttactttcttgagtggccaatccggttgtaggctcacctcccccttctactcagagcactgctgcggccgccgccattttagcgttttgtcagaagcgtccgcgccgcgaggaggaggccctgctggtttctgtgcgggctcttgtcaggatggtgaagctgttcatcggaaacctgccccgggaggctacagagcaggagattcgctcactcttcgagcagtatgggaaggtgctggaatgtgacatcattaagaattacggctttgtgcacatagaagacaagacggcagctgaggatgccatacgcaacctgcaccattacaagcttcatggggtgaacatcaacgtggaagccagcaagaataagagcaaaacctcaacaaagttgcatgtgggcaacatcagtcccacctgcaccaataaggagcttcgagccaagtttgaggagtatggtccggtcatcgaatgtgacatcgtgaaagattatgccttcgtacacatggagcgggcagaggatgcagtggaggccatcaggggccttgataacacagagtttcaaggcaaacgaatgcacgtgcagttgtccaccagccggcttaggactgcgcccgggatgggagaccagagcggctgctatcggtgcgggaaagaggggcactggtccaaagagtgtccgatagatcgttcaggccgcgtggcagacttgaccgagcaatataatgagcaatacggagcagtgcgtacgccttacaccatgagctatggggattcattgtattacaacaacgcgtacggagcgctcgatgcctactacaagcgctgccgtgctgcccggtcctatgaggcagtggcagctgcagctgcctccgtgtataattacgcagagcagaccctgtcccagctgccacaagtccagaatacagccatggccagtcacctcacctccacctctctcgatccctacgatagacacctgttgccgacctcaggagctgctgccacagctgctgctgcagcagcagccgctgctgctgttactgcagcttccacttcatattacgggcgggatcggagccccctgcgtcgcgctacagccccagtccccactgttggagagggctacggttacgggcatgagagtgagttgtcccaagcttcagcagccgcgcggaattctctgtacgacatggcccggtatgagcgggagcagtatgccgatcgggcgcggtactcagccttttaaagcttgaggtgggatgtgtgtgggctgaaattccgagctgcggttgtgcatgagaatacacccttcgtggtaccccatctccgggacgttctcggctctgtgcgttcagtccctcaggaaccgtggaccttaatttaccttgctaagttcagaccttctcttcctttcctttcctttcctctcctgcccattttcctgttcttctgtccttcaatacttctgtagcttcccattcatgttctcttctcccagcaggcctcattgtgtgcagaaactgtggtgggggctgtgctgtctcctccctgcctcctgcctcctgcggctgttggatttgggaatgaccttggtgagagtctcactgctccagggtctctttttggtccaaaggctagacctatagagttggatcactttttttctttccggtgaaataaatggtttttcaacttaaaaaaaaaaaaaaaaaaaaaaaaaaaaaaaaaaaaaaaaaaaaaaaaaaagaagggggggcggcgccgggcacaaagataagttctccccctcgggggggcgccgaagacttgccgactaccccgacggttttttgttggaaagcagggggcgccccatataggagagcgagcggcgttattataaaacgaagcagcgagcgcagggccgcggggttttaacaacacgtcggggagagtggaggaaaaacagtcgtactcggggcgacatcctgtggagaagagagaccgcctatctacttgggggggggggggggaaccaactagtgggggaacaaaatcatcctactacaggaggattattaaagggcgccactaaggggagaacaatatattacaacttttaacgagggggttatattagtgggtgttaaaccacgcgcggtgaattttgactgtgagggtattaaaaaaatttgtggcttctaagggaatatttattctatgagagaaaattttttacgg

SEQ ID NO: 285459 - DNA, 2191 bp, Homo sapiens
ggggtggtgcttgggaggttagagggagacacctagagtgaacggcaaaatggagcgcggaatactgtctggctgtgcacgtggaggtggcgaaatgtggaagcttaacgaagttggcgccatgaagctaaagactgctaccccggggctctagctcgctccgcctaatggcgggccgcaccccgccggcgaagcccacgtttgtaggtccgccctcacgctgatctcttgcccaatcagcgagttcggcttcgcgaggttggtgcccattggctttcgcataaaagctccgaggttacagacgtttccacctcttgccggcctcttaggtaattggcgtccgtggtaaccaatcaggaagaggatctgcgggaacgccggccttttactttcttgagtggccaatccggttgtaggctcacctcccccttctactcagagcactgctgcggccgccgccattttagcgttttgtcagaagcgtccgcgccgcgaggaggaggccctgctggtttctgtgcgggctcttgtcaggatggtgaagctgttcatcggaaacctgccccgggaggctacagagcaggagattcgctcactcttcgagcagtatgggaaggtgctggaatgtgacatcattaagaattacggctttgtgcacatagaagacaagacggcagctgaggatgccatacgcaacctgcaccattacaagcttcatggggtgaacatcaacgtggaagccagcaagaataagagcaaaacctcaacaaagttgcatgtgggcaacatcagtcccacctgcaccaataaggagcttcgagccaagtttgaggagtatggtccggtcatcgaatgtgacatcgtgaaagattatgccttcgtacacatggagcgggcagaggatgcagtggaggccatcaggggccttgataacacagagtttcaaggcaaacgaatgcacgtgcagttgtccaccagccggcttaggactgcgcccgggatgggagaccagagcggctgctatcggtgcgggaaagaggggcactggtccaaagagtgtccgatagatcgttcaggccgcgtggcagacttgaccgagcaatataatgagcaatacggagcagtgcgtacgccttacaccatgagctatggggattcattgtattacaacaacgcgtacggagcgctcgatgcctactacaagcgctgccgtgctgcccggtcctatgaggcagtggcagctgcagctgcctccgtgtataattacgcagagcagaccctgtcccagctgccacaagtccagaatacagccatggccagtcacctcacctccacctctctcgatccctacgatagacacctgttgccgacctcaggagctgctgccacagctgctgctgcagcagcagccgctgctgctgttactgcagcttccacttcatattacgggcgggatcggagccccctgcgtcgcgctacagccccagtccccactgttggagagggctacggttacgggcatgagagtgagttgtcccaagcttcagcagccgcgcggaattctctgtacgacatggcccggtatgagcgggagcagtatgccgatcgggcgcggtactcagccttttaaagcttgaggtgggatgtgtgtgggctgaaattccgagctgcggttgtgcatgagaatacacccttcgtggtaccccatctccgggacgttctcggctctgtgcgttcagtccctcaggaaccgtggaccttaatttaccttgctaagttcagaccttctcttcctttcctttcctttcctctcctgcccattttcctgttcttctgtccttcaatacttctgtagcttcccattcatgttctcttctcccagcaggcctcattgtgtgcagaaactgtggtgggggctgtgctgtctcctccctgcctcctgcctcctgcggctgttggatttgggaatgaccttggtgagagtctcactgctccagggtctctttttggtccaaaggctagacctatagagttggatcactttttttctttccggtgaaataaatggtttttcaacttaaaaaaaaagatagaaagatagaatagaaaagatttttggggggaatgggcattggaaaagtgtttaaggcctttggtggggggggggggccagtggtggagtgaaaatggg

SEQ ID NO: 285460 - DNA, 2181 bp, Homo sapiens
ggggtggtgcttgggaggttagagggagacacctagagtgaacggcaaaatggagcgcggaatactgtctggctgtgcacgtggaggtggcgaaatgtggaagcttaacgaagttggcgccatgaagctaaagactgctaccccggggctctagctcgctccgcctaatggcgggccgcaccccgccggcgaagcccacgtttgtaggtccgccctcacgctgatctcttgcccaatcagcgagttcggcttcgcgaggttggtgcccattggctttcgcataaaagctccgaggttacagacgtttccacctcttgccggcctcttaggtaattggcgtccgtggtaaccaatcaggaagaggatctgcgggaacgccggccttttactttcttgagtggccaatccggttgtaggctcacctcccccttctactcagagcactgctgcggccgccgccattttagcgttttgtcagaagcgtccgcgccgcgaggaggaggccctgctggtttctgtgcgggctcttgtcaggatggtgaagctgttcatcggaaacctgccccgggaggctacagagcaggagattcgctcactcttcgagcagtatgggaaggtgctggaatgtgacatcattaagaattacggctttgtgcacatagaagacaagacggcagctgaggatgccatacgcaacctgcaccattacaagcttcatggggtgaacatcaacgtggaagccagcaagaataagagcaaaacctcaacaaagttgcatgtgggcaacatcagtcccacctgcaccaataaggagcttcgagccaagtttgaggagtatggtccggtcatcgaatgtgacatcgtgaaagattatgccttcgtacacatggagcgggcagaggatgcagtggaggccatcaggggccttgataacacagagtttcaaggcaaacgaatgcacgtgcagttgtccaccagccggcttaggactgcgcccgggatgggagaccagagcggctgctatcggtgcgggaaagaggggcactggtccaaagagtgtccgatagatcgttcaggccgcgtggcagacttgaccgagcaatataatgagcaatacggagcagtgcgtacgccttacaccatgagctatggggattcattgtattacaacaacgcgtacggagcgctcgatgcctactacaagcgctgccgtgctgcccggtcctatgaggcagtggcagctgcagctgcctccgtgtataattacgcagagcagaccctgtcccagctgccacaagtccagaatacagccatggccagtcacctcacctccacctctctcgatccctacgatagacacctgttgccgacctcaggagctgctgccacagctgctgctgcagcagcagccgctgctgctgttactgcagcttccacttcatattacgggcgggatcggagccccctgcgtcgcgctacagccccagtccccactgttggagagggctacggttacgggcatgagagtgagttgtcccaagcttcagcagccgcgcggaattctctgtacgacatggcccggtatgagcgggagcagtatgccgatcgggcgcggtactcagccttttaaagcttgaggtgggatgtgtgtgggctgaaattccgagctgcggttgtgcatgagaatacacccttcgtggtaccccatctccgggacgttctcggctctgtgcgttcagtccctcaggaaccgtggaccttaatttaccttgctaagttcagaccttctcttcctttcctttcctttcctctcctgcccattttcctgttcttctgtccttcaatacttctgtagcttcccattcatgttctcttctcccagcaggcctcattgtgtgcagaaactgtggtgggggctgtgctgtctcctccctgcctcctgcctcctgcggctgttggatttgggaatgaccttggtgagagtctcactgctccagggtctctttttggtccaaaggctagacctatagagttggatcactttttttctttccggtgaaataaatggtttttcaacttataccacaacaatagcaccaagagacgacgcgaaacatgcgacaaccccagacgaccacacgtacccacaagaacacggggggcgcggccagaaaaccccgg

SEQ ID NO: 285461 - DNA, 2190 bp, Homo sapiens
ggggtggtgcttgggaggttagagggagacacctagagtgaacggcaaaatggagcgcggaatactgtctggctgtgcacgtggaggtggcgaaatgtggaagcttaacgaagttggcgccatgaagctaaagactgctaccccggggctctagctcgctccgcctaatggcgggccgcaccccgccggcgaagcccacgtttgtaggtccgccctcacgctgatctcttgcccaatcagcgagttcggcttcgcgaggttggtgcccattggctttcgcataaaagctccgaggttacagacgtttccacctcttgccggcctcttaggtaattggcgtccgtggtaaccaatcaggaagaggatctgcgggaacgccggccttttactttcttgagtggccaatccggttgtaggctcacctcccccttctactcagagcactgctgcggccgccgccattttagcgttttgtcagaagcgtccgcgccgcgaggaggaggccctgctggtttctgtgcgggctcttgtcaggatggtgaagctgttcatcggaaacctgccccgggaggctacagagcaggagattcgctcactcttcgagcagtatgggaaggtgctggaatgtgacatcattaagaattacggctttgtgcacatagaagacaagacggcagctgaggatgccatacgcaacctgcaccattacaagcttcatggggtgaacatcaacgtggaagccagcaagaataagagcaaaacctcaacaaagttgcatgtgggcaacatcagtcccacctgcaccaataaggagcttcgagccaagtttgaggagtatggtccggtcatcgaatgtgacatcgtgaaagattatgccttcgtacacatggagcgggcagaggatgcagtggaggccatcaggggccttgataacacagagtttcaaggcaaacgaatgcacgtgcagttgtccaccagccggcttaggactgcgcccgggatgggagaccagagcggctgctatcggtgcgggaaagaggggcactggtccaaagagtgtccgatagatcgttcaggccgcgtggcagacttgaccgagcaatataatgagcaatacggagcagtgcgtacgccttacaccatgagctatggggattcattgtattacaacaacgcgtacggagcgctcgatgcctactacaagcgctgccgtgctgcccggtcctatgaggcagtggcagctgcagctgcctccgtgtataattacgcagagcagaccctgtcccagctgccacaagtccagaatacagccatggccagtcacctcacctccacctctctcgatccctacgatagacacctgttgccgacctcaggagctgctgccacagctgctgctgcagcagcagccgctgctgctgttactgcagcttccacttcatattacgggcgggatcggagccccctgcgtcgcgctacagccccagtccccactgttggagagggctacggttacgggcatgagagtgagttgtcccaagcttcagcagccgcgcggaattctctgtacgacatggcccggtatgagcgggagcagtatgccgatcgggcgcggtactcagccttttaaagcttgaggtcccagttactaagaagactaccaaaatggcatcatcttaatcttgaagcgtatttctgacattcctgaaccgttcaacccttatgagttttatagaacttatttgatggtgggatgtgtgtgggctgaaattccgagctgcggttgtgcatgagaatacacccttcgtggtaccccatctccgggacgttctcggctctgtgcgttcagtccctcaggaaccgtggaccttaatttaccttgctaagttcagaccttctcttcctttcctttcctttcctctcctgcccattttcctgttcttctgtccttcaatacttctgtagcttcccattcatgttctcttctcccagcaggcctcattgtgtgcagaaactgtggtgggggctgtgctgtctcctccctgcctcctgcctcctgcggctgttggatttgggaatgaccttggtgagagtctcactgctccagggtctctttttggtccaaaggctagacctatagagttggatcactttttttctttccggtgaaataaatggtttttcaactta

SEQ ID NO: 285462 - DNA, 1902 bp, Homo sapiens
ggggtggtgcttgggaggttagagggagacacctagagtgaacggcaaaatggagcgcggaatactgtctggctgtgcacgtggaggtggcgaaatgtggaagcttaacgaagttggcgccatgaagctaaagactgctaccccggggctctagctcgctccgcctaatggcgggccgcaccccgccggcgaagcccacgtttgtaggtccgccctcacgctgatctcttgcccaatcagcgagttcggcttcgcgaggttggtgcccattggctttcgcataaaagctccgaggttacagacgtttccacctcttgccggcctcttaggtaattggcgtccgtggtaaccaatcaggaagaggatctgcgggaacgccggccttttactttcttgagtggccaatccggttgtaggctcacctcccccttctactcagagcactgctgcggccgccgccattttagcgttttgtcagaagcgtccgcgccgcgaggaggaggccctgctggtttctgtgcgggctcttgtcaggatggtgaagctgttcatcggaaacctgccccgggaggctacagagcaggagattcgctcactcttcgagcagtatgggaaggtgctggaatgtgacatcattaagaattacggctttgtgcacatagaagacaagacggcagctgaggatgccatacgcaacctgcaccattacaagcttcatggggtgaacatcaacgtggaagccagcaagaataagagcaaaacctcaacaaagttgcatgtgggcaacatcagtcccacctgcaccaataaggagcttcgagccaagtttgaggagtatggtccggtcatcgaatgtgacatcgtgaaagattatgccttcgtacacatggagcgggcagaggatgcagtggaggccatcaggggccttgataacacagagtttcaaggcaaacgaatgcacgtgcagttgtccaccagccggcttaggactgcgcccgggatgggagaccagagcggctgctatcggtgcgggaaagaggggcactggtccaaagagtgtccgatagatcgttcaggccgcgtggcagacttgaccgagcaatataatgagcaatacggagcagtgcgtacgccttacaccatgagctatggggattcattgtattacaacaacgcgtacggagcgctcgatgcctactacaagcgctgccgtgctgcccggtcctatgaggcagtggcagctgcagctgcctccgtgtataattacgcagagcagaccctgtcccagctgccacaagtccagaatacagccatggccagtcacctcacctccacctctctcgatccctacgatagacacctgttgccgacctcaggagctgctgccacagctgctgctgcagcagcagccgctgctgctgttactgcagcttccacttcatattacgggcgggatcggagccccctgcgtcgcgctacagccccagtccccactgttggagagggctacggttacgggcatgagagtgagttgtcccaagcttcagcagccgcgcggaattctctgtacgacatggcccggtatgagcgggagcagtatgccgatcgggcgcggtactcagccttttaaagcttgaggtgggatgtgtgtgggctgaaattccgagctgcggttgtgcatgagaatacacccttcgtggtaccccatctccgggacgttctcggctctgtgcgttcagtccctcaggaaccgtggaccttaatttaccttgctaagttcagaccttctcttcctttcctttcctttcctctcctgcccattttcctgttcttctgtccttcaatacttctgtagctcgcccctgagttgcagctcgcccctgagttgcagctcgcccctga

SEQ ID NO: 285463 - DNA, 2221 bp, Homo sapiens
ggggtggtgcttgggaggttagagggagacacctagagtgaacggcaaaatggagcgcggaatactgtctggctgtgcacgtggaggtggcgaaatgtggaagcttaacgaagttggcgccatgaagctaaagactgctaccccggggctctagctcgctccgcctaatggcgggccgcaccccgccggcgaagcccacgtttgtaggtccgccctcacgctgatctcttgcccaatcagcgagttcggcttcgcgaggttggtgcccattggctttcgcataaaagctccgaggttacagacgtttccacctcttgccggcctcttaggtaattggcgtccgtggtaaccaatcaggaagaggatctgcgggaacgccggccttttactttcttgagtggccaatccggttgtaggctcacctcccccttctactcagagcactgctgcggccgccgccattttagcgttttgtcagaagcgtccgcgccgcgaggaggaggccctgctggtttctgtgcgggtgagactccgagcctttccactgcctttcttgtactgtgttaaatcttctctcactcccttgggcttcgggggtgtcctggtaggtccgcagtctccacacccgtcactgagagccgacctcggtcctcggcattgcgcggctcttgtcaggatggtgaagctgttcatcggaaacctgccccgggaggctacagagcaggagattcgctcactcttcgagcagtatgggaaggtgctggaatgtgacatcattaagaattacggctttgtgcacatagaagacaagacggcagctgaggatgccatacgcaacctgcaccattacaagcttcatggggtgaacatcaacgtggaagccagcaagaataagagcaaaacctcaacaaagttgcatgtgggcaacatcagtcccacctgcaccaataaggagcttcgagccaagtttgaggagtatggtccggtcatcgaatgtgacatcgtgaaagattatgccttcgtacacatggagcgggcagaggatgcagtggaggccatcaggggccttgataacacagagtttcaaggcaaacgaatgcacgtgcagttgtccaccagccggcttaggactgcgcccgggatgggagaccagagcggctgctatcggtgcgggaaagaggggcactggtccaaagagtgtccgatagatcgttcaggccgcgtggcagacttgaccgagcaatataatgagcaatacggagcagtgcgtacgccttacaccatgagctatggggattcattgtattacaacaacgcgtacggagcgctcgatgcctactacaagcgctgccgtgctgcccggtcctatgaggcagtggcagctgcagctgcctccgtgtataattacgcagagcagaccctgtcccagctgccacaagtccagaatacagccatggccagtcacctcacctccacctctctcgatccctacgatagacacctgttgccgacctcaggagctgctgccacagctgctgctgcagcagcagccgctgctgctgttactgcagcttccacttcatattacgggcgggatcggagccccctgcgtcgcgctacagccccagtccccactgttggagagggctacggttacgggcatgagagtgagttgtcccaagcttcagcagccgcgcggaattctctgtacgacatggcccggtatgagcgggagcagtatgccgatcgggcgcggtactcagccttttaaagcttgaggtgggatgtgtgtgggctgaaattccgagctgcggttgtgcatgagaatacacccttcgtggtaccccatctccgggacgttctcggctctgtgcgttcagtccctcaggaaccgtggaccttaatttaccttgctaagttcagaccttctcttcctttcctttcctttcctctcctgcccattttcctgttcttctgtccttcaatacttctgtagcttcccattcatgttctcttctcccagcaggcctcattgtgtgcagaaactgtggtgggggctgtgctgtctcctccctgcctcctgcctcctgcggctgttggatttgggaatgaccttggtgagagtctcactgctccagggtctctttttggtccaaaggctagacctatagagttggatcactttttttctttccggtgaaataaatggtttttcaactta

SEQ ID NO: 285464 - DNA, 1968 bp, Homo sapiens
ggggtggtgcttgggaggttagagggagacacctagagtgaacggcaaaatggagcgcggaatactgtctggctgtgcacgtggaggtggcgaaatgtggaagcttaacgaagttggcgccatgaagctaaagactgctaccccggggctctagctcgctccgcctaatggcgggccgcaccccgccggcgaagcccacgtttgtaggtccgccctcacgctgatctcttgcccaatcagcgagttcggcttcgcgaggttggtgcccattggctttcgcataaaagctccgaggttacagacgtttccacctcttgccggcctcttaggtaattggcgtccgtggtaaccaatcaggaagaggatctgcgggaacgccggccttttactttcttgagtggccaatccggttgtaggctcacctcccccttctactcagagcactgctgcggccgccgccattttagcgttttgtcagaagcgtccgcgccgcgaggaggaggccctgctggtttctgtgcgggctcttgtcaggatggtgaagctgttcatcggaaacctgccccgggaggctacagagcaggagattcgctcactcttcgagcagtatgggaaggtgctggaatgtgacatcattaagaattacggctttgtgcacatagaagacaagacggcagctgaggatgccatacgcaacctgcaccattacaagcttcatggggtgaacatcaacgtggaagccagcaagaataagagcaaaacctcaacaaagttgcatgtgggcaacatcagtcccacctgcaccaataaggagcttcgagccaagtttgaggagtatggtccggtcatcgaatgtgacatcgtgaaagattatgccttcgtacacatggagcgggcagaggatgcagtggaggccatcaggggccttgataacacagagtttcaaggcaaacgaatgcacgtgcagttgtccaccagccggcttaggactgcgcccgggatgggagaccagagcggctgctatcggtgcgggaaagaggggcactggtccaaagagtgtccgatagatcgttcaggccgcgtggcagacttgaccgagcaatataatgagcaatacggagcagtgcgtacgccttacaccatgagctatggggattcattgtattacaacaacgcgtacggagcgctcgatgcctactacaagcgctgccgtgctgcccggtcctatgaggcagtggcagctgcagctgcctccgtgtataattacgcagagcagaccctgtcccagctgccacaagtccagaatacagccatggccagtcacctcacctccacctctctcgatccctacgatagacacctgttgccgacctcaggagctgctgccacagctgctgctgcagcagcagccgctgctgctgttactgcagcttccacttcatattacgggcgggatcggagccccctgcgtcgcgctacagccccagtccccactgttggagagggctacggttacgggcatgagagtgagttgtcccaagcttcagcagccgcgcggaattctctgtacgacatggcccggtatgagcgggagcagtatgccgatcgggcgcggtactcagccttttaaagcttgaggtgggatgtgtgtgggctgaaattccgagctgcggttgtgcatgagaatacacccttcgtggtaccccatctccgggacgttctcggctctgtgcgttcagtccctcaggaaccgtggaccttaatttaccttgctaagttcagaccttctcttcctttcctttccttttggtctttcctcctacctttggtctctgggggtatggggacttttttttttttttttttttttttttttttttttttttttttttttttttttttttttttttttatttttattattttttttttttttttttttgtttttgttatgtttatgtattaaaa

SEQ ID NO: 285465 - DNA, 1960 bp, Homo sapiens
ggggtggtgcttgggaggttagagggagacacctagagtgaacggcaaaatggagcgcggaatactgtctggctgtgcacgtggaggtggcgaaatgtggaagcttaacgaagttggcgccatgaagctaaagactgctaccccggggctctagctcgctccgcctaatggcgggccgcaccccgccggcgaagcccacgtttgtaggtccgccctcacgctgatctcttgcccaatcagcgagttcggcttcgcgaggttggtgcccattggctttcgcataaaagctccgaggttacagacgtttccacctcttgccggcctcttaggtaattggcgtccgtggtaaccaatcaggaagaggatctgcgggaacgccggccttttactttcttgagtggccaatccggttgtaggctcacctcccccttctactcagagcactgctgcggccgccgccattttagcgttttgtcagaagcgtccgcgccgcgaggaggaggccctgctggtttctgtgcgggctcttgtcaggatggtgaagctgttcatcggaaacctgccccgggaggctacagagcaggagattcgctcactcttcgagcagtatgggaaggtgctggaatgtgacatcattaagaattacggctttgtgcacatagaagacaagacggcagctgaggatgccatacgcaacctgcaccattacaagcttcatggggtgaacatcaacgtggaagccagcaagaataagagcaaaacctcaacaaagttgcatgtgggcaacatcagtcccacctgcaccaataaggagcttcgagccaagtttgaggagtatggtccggtcatcgaatgtgacatcgtgaaagattatgccttcgtacacatggagcgggcagaggatgcagtggaggccatcaggggccttgataacacagagtttcaaggcaaacgaatgcacgtgcagttgtccaccagccggcttaggactgcgcccgggatgggagaccagagcggctgctatcggtgcgggaaagaggggcactggtccaaagagtgtccgatagatcgttcaggccgcgtggcagacttgaccgagcaatataatgagcaatacggagcagtgcgtacgccttacaccatgagctatggggattcattgtattacaacaacgcgtacggagcgctcgatgcctactacaagcgctgccgtgctgcccggtcctatgaggcagtggcagctgcagctgcctccgtgtataattacgcagagcagaccctgtcccagctgccacaagtccagaatacagccatggccagtcacctcacctccacctctctcgatccctacgatagacacctgttgccgacctcaggagctgctgccacagctgctgctgcagcagcagccgctgctgctgttactgcagcttccacttcatattacgggcgggatcggagccccctgcgtcgcgctacagccccagtccccactgttggagagggctacggttacgggcatgagagtgagttgtcccaagcttcagcagccgcgcggaattctctgtacgacatggcccggtatgagcgggagcagtatgccgatcgggcgcggtactcagccttttaaagcttgaggtgggatgtgtgtgggctgaaattccgagctgcggttgtgcatgagaatacacccttcgtggtaccccatctccgggacgttctcggctctgtgcgttcagtccctcaggaaccgtggaccttaatttaccttgctaagttcagaccttctcttcctttcctttcctttactcccgggagtggagagagaaggagtgagggcactaagcatccatacccagctctacctgggacagcaggggagactggaggcaggagaggaaaggcaactgaggagagggctctgaagccagagagtgggctgaggactgtgggaccgaga

SEQ ID NO: 285466 - DNA, 2021 bp, Homo sapiens
  misc_feature (35)..(36): n is a, c, g, or t
gtgttttgggcctcagtatactttttgagtaatannattcctgaggaggactgccggtcgttcggacgtcttgcctgtcgctggaggagaggtccgggctctccaggaaggtggctgcggcgacaaaatgaagatattcgtgggcaacgtcgacggggcggatacgactccggaggagctggcagccctctttgcgccctacggcacggtcatgagctgcgccgtcatgaaacagttcgccttcgtgcacatgcgcgagaacgcgggcgcgctgcgcgccatcgaagccctgcacggccacgagctgcggccggggcgcgcgctcgtggtggagatgtcgcgcccaaggcctcttaatacttggaagattttcgtgggcaatgtgtcggctgcatgcacgagccaggaactgcgcagcctcttcgagcgccgcggacgcgtcatcgagtgtgacgtggtgaaaggctcttgtcaggatggtgaagctgttcatcggaaacctgccccgggaggctacagagcaggagattcgctcactcttcgagcagtatgggaaggtgctggaatgtgacatcattaagaattacggctttgtgcacatagaagacaagacggcagctgaggatgccatacgcaacctgcaccattacaagcttcatggggtgaacatcaacgtggaagccagcaagaataagagcaaaacctcaacaaagttgcatgtgggcaacatcagtcccacctgcaccaataaggagcttcgagccaagtttgaggagtatggtccggtcatcgaatgtgacatcgtgaaagattatgccttcgtacacatggagcgggcagaggatgcagtggaggccatcaggggccttgataacacagagtttcaaggcaaacgaatgcacgtgcagttgtccaccagccggcttaggactgcgcccgggatgggagaccagagcggctgctatcggtgcgggaaagaggggcactggtccaaagagtgtccgatagatcgttcaggccgcgtggcagacttgaccgagcaatataatgagcaatacggagcagtgcgtacgccttacaccatgagctatggggattcattgtattacaacaacgcgtacggagcgctcgatgcctactacaagcgctgccgtgctgcccggtcctatgaggcagtggcagctgcagctgcctccgtgtataattacgcagagcagaccctgtcccagctgccacaagtccagaatacagccatggccagtcacctcacctccacctctctcgatccctacgatagacacctgttgccgacctcaggagctgctgccacagctgctgctgcagcagcagccgctgctgctgttactgcagcttccacttcatattacgggcgggatcggagccccctgcgtcgcgctacagccccagtccccactgttggagagggctacggttacgggcatgagagtgagttgtcccaagcttcagcagccgcgcggaattctctgtacgacatggcccggtatgagcgggagcagtatgccgatcgggcgcggtactcagccttttaaagcttgaggtgggatgtgtgtgggctgaaattccgagctgcggttgtgcatgagaatacacccttcgtggtaccccatctccgggacgttctcggctctgtgcgttcagtccctcaggaaccgtggaccttaatttaccttgctaagttcagaccttctcttcctttcctttcctttcctctcctgcccattttcctgttcttctgtccttcaatacttctgtagcttcccattcatgttctcttctcccagcaggcctcattgtgtgcagaaactgtggtgggggctgtgctgtctcctccctgcctcctgcctcctgcggctgttggatttgggaatgaccttggtgagagtctcactgctccagggtctctttttggtccaaaggctagacctatagagttggatcactttttttctttccggtgaaataaatggtttttcaactta

SEQ ID NO: 285467 - DNA, 1916 bp, Homo sapiens
ggggtggtgcttgggaggttagagggagacacctagagtgaacggcaaaatggagcgcggaatactgtctggctgtgcacgtggaggtggcgaaatgtggaagcttaacgaagttggcgccatgaagctaaagactgctaccccggggctctagctcgctccgcctaatggcgggccgcaccccgccggcgaagcccacgtttgtaggtccgccctcacgctgatctcttgcccaatcagcgagttcggcttcgcgaggttggtgcccattggctttcgcataaaagctccgaggttacagacgtttccacctcttgccggcctcttaggtaattggcgtccgtggtaaccaatcaggaagaggatctgcgggaacgccggccttttactttcttgagtggccaatccggttgtaggctcacctcccccttctactcagagcactgctgcggccgccgccattttagcgttttgtcagaagcgtccgcgccgcgaggaggaggccctgctggtttctgtgcgggctcttgtcaggatggtgaagctgttcatcggaaacctgccccgggaggctacagagcaggagattcgctcactcttcgagcagtatgggaaggtgctggaatgtgacatcattaagaattacggctttgtgcacatagaagacaagacggcagctgaggatgccatacgcaacctgcaccattacaagcttcatggggtgaacatcaacgtggaagccagcaagaataagagcaaaacctcaacaaagttgcatgtgggcaacatcagtcccacctgcaccaataaggagcttcgagccaagtttgaggagtatggtccggtcatcgaatgtgacatcgtgaaagattatgccttcgtacacatggagcgggcagaggatgcagtggaggccatcaggggccttgataacacagagtttcaaggcaaacgaatgcacgtgcagttgtccaccagccggcttaggactgcgcccgggatgggagaccagagcggctgctatcggtgcgggaaagaggggcactggtccaaagagtgtccgatagatcgttcaggccgcgtggcagacttgaccgagcaatataatgagcaatacggagcagtgcgtacgccttacaccatgagctatggggattcattgtattacaacaacgcgtacggagcgctcgatgcctactacaagcgctgccgtgctgcccggtcctatgaggcagtggcagctgcagctgcctccgtgtataattacgcagagcagaccctgtcccagctgccacaagtccagaatacagccatggccagtcacctcacctccacctctctcgatccctacgatagacacctgttgccgacctcaggagctgctgccacagctgctgctgcagcagcagccgctgctgctgttactgcagcttccacttcatattacgggcgggatcggagccccctgcgtcgcgctacagccccagtccccactgttggagagggctacggttacgggcatgagagtgagttgtcccaagcttcagcagccgcgcggaattctctgtacgacatggcccggtatgagcgggagcagtatgccgatcgggcgcggtactcagccttttaaagcttgaggtgggatgtgtgtgggctgaaattccgagctgcggttgtgcatgagaatacacccttcgtggtaccccatctccgggacgttcgcctcattgtgtgcagaaactgtggtgggggctgtgctgtctcctccctgcctcctgcctcctgcggctgttggatttgggaatgaccttggtgagagtctcactgctccagggtctctttttggtccaaaggctagacctatagagttggatcactttttttctttccggtgaaataaatggtttttcaactta

SEQ ID NO: 285468 - DNA, 1606 bp, Homo sapiens
ggatgtgggcctgaggttttttgtcagatgtcttgtttttctctcccaggctcttgtcaggatggtgaagctgttcatcggaaacctgccccgggaggctacagagcaggagattcgctcactcttcgagcagtatgggaaggtgctggaatgtgacatcattaagaattacggctttgtgcacatagaagacaagacggcagctgaggatgccatacgcaacctgcaccattacaagcttcatggggtgaacatcaacgtggaagccagcaagaataagagcaaaacctcaacaaagttgcatgtgggcaacatcagtcccacctgcaccaataaggagcttcgagccaagtttgaggagtatggtccggtcatcgaatgtgacatcgtgaaagattatgccttcgtacacatggagcgggcagaggatgcagtggaggccatcaggggccttgataacacagagtttcaaggcaaacgaatgcacgtgcagttgtccaccagccggcttaggactgcgcccgggatgggagaccagagcggctgctatcggtgcgggaaagaggggcactggtccaaagagtgtccgatagatcgttcaggccgcgtggcagacttgaccgagcaatataatgagcaatacggagcagtgcgtacgccttacaccatgagctatggggattcattgtattacaacaacgcgtacggagcgctcgatgcctactacaagcgctgccgtgctgcccggtcctatgaggcagtggcagctgcagctgcctccgtgtataattacgcagagcagaccctgtcccagctgccacaagtccagaatacagccatggccagtcacctcacctccacctctctcgatccctacgatagacacctgttgccgacctcaggagctgctgccacagctgctgctgcagcagcagccgctgctgctgttactgcagcttccacttcatattacgggcgggatcggagccccctgcgtcgcgctacagccccagtccccactgttggagagggctacggttacgggcatgagagtgagttgtcccaagcttcagcagccgcgcggaattctctgtacgacatggcccggtatgagcgggagcagtatgccgatcgggcgcggtactcagccttttaaagcttgaggtgggatgtgtgtgggctgaaattccgagctgcggttgtgcatgagaatacacccttcgtggtaccccatctccgggacgttctcggctctgtgcgttcagtccctcaggaaccgtggaccttaatttaccttgctaagttcagaccttctcttcctttcctttcctttcctctcctgcccattttcctgttcttctgtccttcaatacttctgtagcttcccattcatgttctcttctcccagcaggcctcattgtgtgcagaaactgtggtgggggctgtgctgtctcctccctgcctcctgcctcctgcggctgttggatttgggaatgaccttggtgagagtctcactgctccagggtctctttttggtccaaaggctagacctatagagttggatcactttttttctttccggtgaaataaatggtttttcaactta

SEQ ID NO: 285469 - DNA, 1918 bp, Homo sapiens
ggggtggtgcttgggaggttagagggagacacctagagtgaacggcaaaatggagcgcggaatactgtctggctgtgcacgtggaggtggcgaaatgtggaagcttaacgaagttggcgccatgaagctaaagactgctaccccggggctctagctcgctccgcctaatggcgggccgcaccccgccggcgaagcccacgtttgtaggtccgccctcacgctgatctcttgcccaatcagcgagttcggcttcgcgaggttggtgcccattggctttcgcataaaagctccgaggttacagacgtttccacctcttgccggcctcttaggtaattggcgtccgtggtaaccaatcaggaagaggatctgcgggaacgccggccttttactttcttgagtggccaatccggttgtaggctcacctcccccttctactcagagcactgctgcggccgccgccattttagcgttttgtcagaagcgtccgcgccgcgaggaggaggccctgctggtttctgtgcgggctcttgtcaggatggtgaagctgttcatcggaaacctgccccgggaggctacagagcaggagattcgctcactcttcgagcagtatgggaaggtgctggaatgtgacatcattaagaattacggctttgtgcacatagaagacaagacggcagctgaggatgccatacgcaacctgcaccattacaagcttcatggggtgaacatcaacgtggaagccagcaagaataagagcaaaacctcaacaaagttgcatgtgggcaacatcagtcccacctgcaccaataaggagcttcgagccaagtttgaggagtatggtccggtcatcgaatgtgacatcgtgaaagattatgccttcgtacacatggagcgggcagaggatgcagtggaggccatcaggggccttgataacacagagtttcaaggcaaacgaatgcacgtgcagttgtccaccagccggcttaggactgcgcccgggatgggagaccagagcggctgctatcggtgcgggaaagaggggcactggtccaaagagtgtccgatagatcgttcaggccgcgtggcagacttgaccgagcaatataatgagcaatacggagcagtgcgtacgccttacaccatgagctatggggattcattgtattacaacaacgcgtacggagcgctcgatgcctactacaagcgctgccgtgctgcccggtcctatgaggcagtggcagctgcagctgcctccgtgtataattacgcagagcagaccctgtcccagctgccacaagtccagaatacagccatggccagtcacctcacctccacctctctcgatccctacgatagacacctgttgccgacctcaggagctgctgccacagctgctgctgcagcagcagccgctgctgctgttactgcagcttccacttcatattacgggcgggatcggagccccctgcgtcgcgctacagccccagtccccactgttggagagggctacggttacgggcatgagagtgagttgtcccaagcttcagcagccgcgcggaattctctgtacgacatggcccggtatgagcgggagcagtatgccgatcgggcgcggtactcagccttttaaagcttgaggtcccagttactaagaagactaccaaaatggcatcatcttaatcttgaagcgtatttctgacattcctgaaccgttcaacccttatgagttttatagaacttatttgatggtgggatgtgtgtgggctgaaattccgagctgcggttgtgcatgagaatacacccttcgtggtaccccatctccgggacgttctcggctctgtgcgttcagtccctcaggaaccgtggaccttaatttaccttgctagattccggggataatcctaggtcacctgcagca

SEQ ID NO: 285470 - DNA, 2076 bp, Homo sapiens
ggggtggtgcttgggaggttagagggagacacctagagtgaacggcaaaatggagcgcggaatactgtctggctgtgcacgtggaggtggcgaaatgtggaagcttaacgaagttggcgccatgaagctaaagactgctaccccggggctctagctcgctccgcctaatggcgggccgcaccccgccggcgaagcccacgtttgtaggtccgccctcacgctgatctcttgcccaatcagcgagttcggcttcgcgaggttggtgcccattggctttcgcataaaagctccgaggttacagacgtttccacctcttgccggcctcttaggtaattggcgtccgtggtaaccaatcaggaagaggatctgcgggaacgccggccttttactttcttgagtggccaatccggttgtaggctcacctcccccttctactcagagcactgctgcggccgccgccattttagcgttttgtcagaagcgtccgcgccgcgaggaggaggccctgctggtttctgtgcgggctcttgtcaggatggtgaagctgttcatcggaaacctgccccgggaggctacagagcaggagattcgctcactcttcgagcagtatgggaaggtgctggaatgtgacatcattaagaattacggctttgtgcacatagaagacaagacggcagctgaggatgccatacgcaacctgcaccattacaagcttcatggggtgaacatcaacgtggaagccagcaagaataagagcaaaacctcaacaaagttgcatgtgggcaacatcagtcccacctgcaccaataaggagcttcgagccaagtttgaggagtatggtccggtcatcgaatgtgacatcgtgaaagattatgccttcgtacacatggagcgggcagaggatgcagtggaggccatcaggggccttgataacacagagtttcaaggcaaacgaatgcacgtgcagttgtccaccagccggcttaggactgcgcccgggatgggagaccagagcggctgctatcggtgcgggaaagaggggcactggtccaaagagtgtccgatagatcgttcaggccgcgtggcagacttgaccgagcaatataatgagcaatacggagcagtgcgtacgccttacaccatgagctatggggattcattgtattacaacaacgcgtacggagcgctcgatgcctactacaagcgctgccgtgctgcccggtcctatgaggcagtggcagctgcagctgcctccgtgtataattacgcagagcagaccctgtcccagctgccacaagtccagaatacagccatggccagtcacctcacctccacctctctcgatccctacgatagacacctgttgccgacctcaggagctgctgccacagctgctgctgcagcagcagccgctgctgctgttactgcagcttccacttcatattacgggcgggatcggagccccctgcgtcgcgctacagccccagtccccactgttggagagggctacggttacgggcatgagagtgagttgtcccaagcttcagcagccgcgcggaattctctgtacgacatggcccggtatgagcgggagcagtatgccgatcgggcgcggtactcagccttttaaagcttgaggtgagaggggtggggtgttccctcttctggttttgccatccctcctgcagcctaaagggctccaattaggctgccctgcttgcttgcttgcttttgcagggttaggggaaggttactaggatggctcacaggctagagagaagtcctaactgcttaactttaaaatacatagagttccttggccctcatggctatttttcagggcttctggtagtgggagtcaatttgattctatttgtgcctagaaaaataaagaatgatgtgctggtgaatcttgggtcacctatgtactatactataattgaaccttacctggggacccacacgttcaggctcaggtgttttgtttcttagagcctttgttaagtttcctacgtgtgcgacattcctaaggtcttcaagtttcctattctgttttggactgggtcatgttctgtg

SEQ ID NO: 285471 - DNA, 2026 bp, Homo sapiens
ggggtggtgcttgggaggttagagggagacacctagagtgaacggcaaaatggagcgcggaatactgtctggctgtgcacgtggaggtggcgaaatgtggaagcttaacgaagttggcgccatgaagctaaagactgctaccccggggctctagctcgctccgcctaatggcgggccgcaccccgccggcgaagcccacgtttgtaggtccgccctcacgctgatctcttgcccaatcagcgagttcggcttcgcgaggttggtgcccattggctttcgcataaaagctccgaggttacagacgtttccacctcttgccggcctcttaggtaattggcgtccgtggtaaccaatcaggaagaggatctgcgggaacgccggccttttactttcttgagtggccaatccggttgtaggctcacctcccccttctactcagagcactgctgcggccgccgccattttagcgttttgtcagaagcgtccgcgccgcgaggaggaggccctgctggtttctgtgcgggctcttgtcaggatggtgaagctgttcatcggaaacctgccccgggaggctacagagcaggagattcgctcactcttcgagcagtatgggaaggtgctggaatgtgacatcattaagaattacggctttgtgcacatagaagacaagacggcagctgaggatgccatacgcaacctgcaccattacaagcttcatggggtgaacatcaacgtggaagccagcaagaataagagcgagcttcgagccaagtttgaggagtatggtccggtcatcgaatgtgacatcgtgaaagattatgccttcgtacacatggagcgggcagaggatgcagtggaggccatcaggggccttgataacacagagtttcaaggcaaacgaatgcacgtgcagttgtccaccagccggcttaggactgcgcccgggatgggagaccagagcggctgctatcggtgcgggaaagaggggcactggtccaaagagtgtccgatagatcgttcaggccgcgtggcagacttgaccgagcaatataatgagcaatacggagcagtgcgtacgccttacaccatgagctatggggattcattgtattacaacaacgcgtacggagcgctcgatgcctactacaagcgctgccgtgctgcccggtcctatgaggcagtggcagctgcagctgcctccgtgtataattacgcagagcagaccctgtcccagctgccacaagtccagaatacagccatggccagtcacctcacctccacctctctcgatccctacgatagacacctgttgccgacctcaggagctgctgccacagctgctgctgcagcagcagccgctgctgctgttactgcagcttccacttcatattacgggcgggatcggagccccctgcgtcgcgctacagccccagtccccactgttggagagggctacggttacgggcatgagagtgagttgtcccaagcttcagcagccgcgcggaattctctgtacgacatggcccggtatgagcgggagcagtatgccgatcgggcgcggtactcagccttttaaagcttgaggtgggatgtgtgtgggctgaaattccgagctgcggttgtgcatgagaatacacccttcgtggtaccccatctccgggacgttctcggctctgtgcgttcagtccctcaggaaccgtggaccttaatttaccttgctaagttcagaccttctcttcctttcctttcctttcctctcctgcccattttcctgttcttctgtccttcaatacttctgtagcttcccattcatgttctcttctcccagcaggcctcattgtgtgcagaaactgtggtgggggctgtgctgtctcctccctgcctcctgcctcctgcggctgttggatttgggaatgaccttggtgagagtctcactgctccagggtctctttttggtccaaaggctagacctatagagttggatcactttttttctttccggtgaaataaatggtttttcaactta

SEQ ID NO: 285472 - DNA, 1697 bp, Homo sapiens
ggggtggtgcttgggaggttagagggagacacctagagtgaacggcaaaatggagcgcggaatactgtctggctgtgcacgtggaggtggcgaaatgtggaagcttaacgaagttggcgccatgaagctaaagactgctaccccggggctctagctcgctccgcctaatggcgggccgcaccccgccggcgaagcccacgtttgtaggtccgccctcacgctgatctcttgcccaatcagcgagttcggcttcgcgaggttggtgcccattggctttcgcataaaagctccgaggttacagacgtttccacctcttgccggcctcttaggtaattggcgtccgtggtaaccaatcaggaagaggatctgcgggaacgccggccttttactttcttgagtggccaatccggttgtaggctcacctcccccttctactcagagcactgctgcggccgccgccattttagcgttttgtcagaagcgtccgcgccgcgaggaggaggccctgctggtttctgtgcgggctcttgtcaggatggtgaagctgttcatcggaaacctgccccgggaggctacagagcaggagattcgctcactcttcgagcagtatgggaaggtgctggaatgtgacatcattaagaattacggctttgtgcacatagaagacaagacggcagctgaggatgccatacgcaacctgcaccattacaagcttcatggggtgaacatcaacgtggaagccagcaagaataagagcaaaacctcaacaaagttgcatgtgggcaacatcagtcccacctgcaccaataaggagcttcgagccaagtttgaggagtatggtccggtcatcgaatgtgacatcgtgaaagattatgccttcgtacacatggagcgggcagaggatgcagtggaggccatcaggggccttgataacacagagtttcaaggcaaacgaatgcacgtgcagttgtccaccagccggcttaggactgcgcccgggatgggagaccagagcggctgctatcggtgcgggaaagaggggcactggtccaaagagtgtccgatagatcgttcaggccgcgtggcagacttgaccgagcaatataatgagcaatacggagcagtgcgtacgccttacaccatgagctatggggattcattgtattacaacaacgcgtacggagcgctcgatgcctactacaagcgctgccgtgctgcccggtcctatgaggcagtggcagctgcagctgcctccgtgtataattacgcagagcagaccctgtcccagctgccacaagtccagaatacagccatggccagtcacctcacctccacctctctcgatccctacgatagacacctgttgccgacctcaggagctgctgccacagctgctgctgcagcagcagccgctgctgctgttactgcagcttccacttcatattacgggcgggatcggagccccctgcgtcgcgctacatggtgggtaagccagtccatgtgggaggtacggtacgggtagaatagtgtgcaagtcagaaggggaattctgtaaatgccgttagagggaattgacaagggggaaacttaacgggggagggggggagaccggggggtgaaacgggccccggggtggttccagaggcatatagagtcctcactagaggtccactgggggtagggttgtgatgataacg

SEQ ID NO: 285473 - DNA, 1597 bp, Homo sapiens
  misc_feature (35)..(36): n is a, c, g, or t
gtgttttgggcctcagtatactttttgagtaatannattcctgaggaggactgccggtcgttcggacgtcttgcctgtcgctggaggagaggtccgggctctccaggaaggtggctgcggcgacaaaatgaagatattcgtgggcaacgtcgacggggcggatacgactccggaggagctggcagccctctttgcgccctacggcacggtcatgagctgcgccgtcatgaaacagttcgccttcgtgcacatgcgcgagaacgcgggcgcgctgcgcgccatcgaagccctgcacggccacgagctgcggccggggcgcgcgctcgtggtggagatgtcgcgcccaaggcctcttaatacttggaagattttcgtgggcaatgtgtcggctgcatgcacgagccaggaactgcgcagcctcttcgagcgccgcggacgcgtcatcgagtgtgacgtggtgaaaggcaaacgaatgcacgtgcagttgtccaccagccggcttaggactgcgcccgggatgggagaccagagcggctgctatcggtgcgggaaagaggggcactggtccaaagagtgtccgatagatcgttcaggccgcgtggcagacttgaccgagcaatataatgagcaatacggagcagtgcgtacgccttacaccatgagctatggggattcattgtattacaacaacgcgtacggagcgctcgatgcctactacaagcgctgccgtgctgcccggtcctatgaggcagtggcagctgcagctgcctccgtgtataattacgcagagcagaccctgtcccagctgccacaagtccagaatacagccatggccagtcacctcacctccacctctctcgatccctacgatagacacctgttgccgacctcaggagctgctgccacagctgctgctgcagcagcagccgctgctgctgttactgcagcttccacttcatattacgggcgggatcggagccccctgcgtcgcgctacagccccagtccccactgttggagagggctacggttacgggcatgagagtgagttgtcccaagcttcagcagccgcgcggaattctctgtacgacatggcccggtatgagcgggagcagtatgccgatcgggcgcggtactcagccttttaaagcttgaggtgggatgtgtgtgggctgaaattccgagctgcggttgtgcatgagaatacacccttcgtggtaccccatctccgggacgttctcggctctgtgcgttcagtccctcaggaaccgtggaccttaatttaccttgctaagttcagaccttctcttcctttcctttcctttcctctcctgcccattttcctgttcttctgtccttcaatacttctgtagcttcccattcatgttctcttctcccagcaggcctcattgtgtgcagaaactgtggtgggggctgtgctgtctcctccctgcctcctgcctcctgcggctgttggatttgggaatgaccttggtgagagtctcactgctccagggtctctttttggtccaaaggctagacctatagagttggatcactttttttctttccggtgaaataaatggtttttcaactta

SEQ ID NO: 285474 - DNA, 1246 bp, Homo sapiens
ttacaatcgagctcggtacctcataggttcgcaggattatgccttcgtacacatggagcgggcagaggatgcagtggaggccatcaggggccttgataacacagagtttcaaggcaaacgaatgcacgtgcagttgtccaccagccggcttaggactgcgcccgggatgggagaccagagcggctgctatcggtgcgggaaagaggggcactggtccaaagagtgtccgatagatcgttcaggccgcgtggcagacttgaccgagcaatataatgagcaatacggagcagtgcgtacgccttacaccatgagctatggggattcattgtattacaacaacgcgtacggagcgctcgatgcctactacaagcgctgccgtgctgcccggtcctatgaggcagtggcagctgcagctgcctccgtgtataattacgcagagcagaccctgtcccagctgccacaagtccagaatacagccatggccagtcacctcacctccacctctctcgatccctacgatagacacctgttgccgacctcaggagctgctgccacagctgctgctgcagcagcagccgctgctgctgttactgcagcttccacttcatattacgggcgggatcggagccccctgcgtcgcgctacagccccagtccccactgttggagagggctacggttacgggcatgagagtgagttgtcccaagcttcagcagccgcgcggaattctctgtacgacatggcccggtatgagcgggagcagtatgccgatcgggcgcggtactcagccttttaaagcttgaggtgggatgtgtgtgggctgaaattccgagctgcggttgtgcatgagaatacacccttcgtggtaccccatctccgggacgttctcggctctgtgcgttcagtccctcaggaaccgtggaccttaatttaccttgctaagttcagaccttctcttcctttcctttcctttcctctcctgcccattttcctgttcttctgtccttcaatacttctgtagcttcccattcatgttctcttctcccagcaggcctcattgtgtgcagaaactgtggtgggggctgtgctgtctcctccctgcctcctgcctcctgcggctgttggatttgggaatgaccttggtgagagtctcactgctccagggtctctttttggtccaaaggctagacctatagagttggatcactttttttctttccggtgaaataaatggtttttcaactta

SEQ ID NO: 285475 - DNA, 1449 bp, Homo sapiens
tgactttgagccgctgtttggagatgatttttacctgtttggagatgattggagcaagagtagtttatttcttaagcatttaaactgttgttatagctgaaatatttcttcatctaagtggtcttttcctgaaatcaggtcattatactgaatctatatgttgagtcttttttttttttcctttttatcttttcctaaagatgagtcctgcattagaattgtctagataaagccattgctatgaccagtgtctggggtaggggctggggctatgactaagagtgatagcaacccttcttgcgtctgtttcttcaaggcaaacgaatgcacgtgcagttgtccaccagccggcttaggactgcgcccgggatgggagaccagagcggctgctatcggtgcgggaaagaggggcactggtccaaagagtgtccgatagatcgttcaggccgcgtggcagacttgaccgagcaatataatgagcaatacggagcagtgcgtacgccttacaccatgagctatggggattcattgtattacaacaacgcgtacggagcgctcgatgcctactacaagcgctgccgtgctgcccggtcctatgaggcagtggcagctgcagctgcctccgtgtataattacgcagagcagaccctgtcccagctgccacaagtccagaatacagccatggccagtcacctcacctccacctctctcgatccctacgatagacacctgttgccgacctcaggagctgctgccacagctgctgctgcagcagcagccgctgctgctgttactgcagcttccacttcatattacgggcgggatcggagccccctgcgtcgcgctacagccccagtccccactgttggagagggctacggttacgggcatgagagtgagttgtcccaagcttcagcagccgcgcggaattctctgtacgacatggcccggtatgagcgggagcagtatgccgatcgggcgcggtactcagccttttaaagcttgaggtgggatgtgtgtgggctgaaattccgagctgcggttgtgcatgagaatacacccttcgtggtaccccatctccgggacgttctcggctctgtgcgttcagtccctcaggaaccgtggaccttaatttaccttgctaagttcagaccttctcttcctttcctttcctttcctctcctgcccattttcctgttcttctgtccttcaatacttctgtagcttcccattcatgttctcttctcccagcaggcctcattgtgtgcagaaactgtggtgggggctgtgctgtctcctccctgcctcctgcctcctgcggctgttggatttgggaatgaccttggtgagagtctcactgctccagggtctctttttggtccaaaggctagacctatagagttggatcactttttttctttccggtgaaataaatggtttttcaactta

SEQ ID NO: 285476 - DNA, 1389 bp, Homo sapiens
ggggtggtgcttgggaggttagagggagacacctagagtgaacggcaaaatggagcgcggaatactgtctggctgtgcacgtggaggtggcgaaatgtggaagcttaacgaagttggcgccatgaagctaaagactgctaccccggggctctagctcgctccgcctaatggcgggccgcaccccgccggcgaagcccacgtttgtaggtccgccctcacgctgatctcttgcccaatcagcgagttcggcttcgcgaggttggtgcccattggctttcgcataaaagctccgaggttacagacgtttccacctcttgccggcctcttaggtaattggcgtccgtggtaaccaatcaggaagaggatctgcgggaacgccggccttttactttcttgagtggccaatccggttgtaggctcacctcccccttctactcagagcactgctgcggccgccgccattttagcgttttgtcagaagcgtccgcgccgcgaggaggaggccctgctggtttctgtgcgggctcttgtcaggatggtgaagctgttcatcggaaacctgccccgggaggctacagagcaggagattcgctcactcttcgagcagtatgggaaggtgctggaatgtgacatcattaagaattacggctttgtgcacatagaagacaagacggcagctgaggatgccatacgcaacctgcaccattacaagcttcatggggtgaacatcaacgtggaagccagcaagaataagagcaaaacctcaacaaagttgcatgtgggcaacatcagtcccacctgcaccaataaggagcttcgagccaagtttgaggagtatggtccggtcatcgaatgtgacatcgtgaaagattatgccttcgtacacatggagcgggcagaggatgcagtggaggccatcaggggccttgataacacagagtttcaaggtgggatgtgtgtgggctgaaattccgagctgcggttgtgcatgagaatacacccttcgtggtaccccatctccgggacgttctcggctctgtgcgttcagtccctcaggaaccgtggaccttaatttaccttgctaagttcagaccttctcttcctttcctttcctttcctctcctgcccattttcctgttcttctgtccttcaatacttctgtagcttcccattcatgttctcttctcccagcaggcctcattgtgtgcagaaactgtggtgggggctgtgctgtctcctccctgcctcctgcctcctgcggctgttggatttgggaatgaccttggtgagagtctcactgctccagggtctctttttggtccaaaggctagacctatagagttggatcactttttttctttccggtgaaataaatggtttttcaactta

SEQ ID NO: 285477 - DNA, 1335 bp, Homo sapiens
ggggtggtgcttgggaggttagagggagacacctagagtgaacggcaaaatggagcgcggaatactgtctggctgtgcacgtggaggtggcgaaatgtggaagcttaacgaagttggcgccatgaagctaaagactgctaccccggggctctagctcgctccgcctaatggcgggccgcaccccgccggcgaagcccacgtttgtaggtccgccctcacgctgatctcttgcccaatcagcgagttcggcttcgcgaggttggtgcccattggctttcgcataaaagctccgaggttacagacgtttccacctcttgccggcctcttaggtaattggcgtccgtggtaaccaatcaggaagaggatctgcgggaacgccggccttttactttcttgagtggccaatccggttgtaggctcacctcccccttctactcagagcactgctgcggccgccgccattttagcgttttgtcagaagcgtccgcgccgcgaggaggaggccctgctggtttctgtgcgggctcttgtcaggatggtgaagctgttcatcggaaacctgccccgggaggctacagagcaggagattcgctcactcttcgagcagtatgggaaggtgctggaatgtgacatcattaagaattacggctttgtgcacatagaagacaagacggcagctgaggatgccatacgcaacctgcaccattacaagcttcatggggtgaacatcaacgtggaagccagcaagaataagagcgagcttcgagccaagtttgaggagtatggtccggtcatcgaatgtgacatcgtgaaagattatgccttcgtacacatggagcgggcagaggatgcagtggaggccatcaggggccttgataacacagagtttcaaggtgggatgtgtgtgggctgaaattccgagctgcggttgtgcatgagaatacacccttcgtggtaccccatctccgggacgttctcggctctgtgcgttcagtccctcaggaaccgtggaccttaatttaccttgctaagttcagaccttctcttcctttcctttcctttcctctcctgcccattttcctgttcttctgtccttcaatacttctgtagcttcccattcatgttctcttctcccagcaggcctcattgtgtgcagaaactgtggtgggggctgtgctgtctcctccctgcctcctgcctcctgcggctgttggatttgggaatgaccttggtgagagtctcactgctccagggtctctttttggtccaaaggctagacctatagagttggatcactttttttctttccggtgaaataaatggtttttcaactta

SEQ ID NO: 285478 - DNA, 1913 bp, Homo sapiens
ggggtggtgcttgggaggttagagggagacacctagagtgaacggcaaaatggagcgcggaatactgtctggctgtgcacgtggaggtggcgaaatgtggaagcttaacgaagttggcgccatgaagctaaagactgctaccccggggctctagctcgctccgcctaatggcgggccgcaccccgccggcgaagcccacgtttgtaggtccgccctcacgctgatctcttgcccaatcagcgagttcggcttcgcgaggttggtgcccattggctttcgcataaaagctccgaggttacagacgtttccacctcttgccggcctcttaggtaattggcgtccgtggtaaccaatcaggaagaggatctgcgggaacgccggccttttactttcttgagtggccaatccggttgtaggctcacctcccccttctactcagagcactgctgcggccgccgccattttagcgttttgtcagaagcgtccgcgccgcgaggaggaggccctgctggtttctgtgcgggctcttgtcaggatggtgaagctgttcatcggaaacctgccccgggaggctacagagcaggagattcgctcactcttcgagcagtatgggaaggtgctggaatgtgacatcattaagaattacggctttgtgcacatagaagacaagacggcagctgaggatgccatacgcaacctgcaccattacaagcttcatggggtgaacatcaacgtggaagccagcaagaataagagcaaaacctcaacaaagttgcatgtgggcaacatcagtcccacctgcaccaataaggagcttcgagccaagtttgaggagtatggtccggtcatcgaatgtgacatcgtgaaagattatgccttcgtacacatggagcgggcagaggatgcagtggaggccatcaggggccttgataacacagagtttcaaggtgggatgtgtgtgggctgaaattccgagctgcggttgtgcatgagaatacacccttcgtggtaccccatctccgggacgttctcggctctgtgcgttcagtccctcaggaaccgtggaccttaatttaccttgctaagttcagaccttctcttcctttcctttcctttcctctcctgcccattttcctgttcttctgtccttcaatacttctgtagcttcccattcatgttctcttctcccagcaggcctcattgtgtgcagaaactgtggtgggggctgtgctgtctcctccctgcctcctgcctcctgcggctgttggatttgggaatgaccttggtgagagtctcactgctccagggtctctttttggtccaaaggctagacctatagagttggatcactttttttctttccggtgaaataaatggtttttcaacttaaaaaaaaaaaaaaaaaaaaaaaaaaaaaaaaaaaaaaaaaaaaaaaaaaagaagggggggcggcgccgggcacaaagataagttctccccctcgggggggcgccgaagacttgccgactaccccgacggttttttgttggaaagcagggggcgccccatataggagagcgagcggcgttattataaaacgaagcagcgagcgcagggccgcggggttttaacaacacgtcggggagagtggaggaaaaacagtcgtactcggggcgacatcctgtggagaagagagaccgcctatctacttgggggggggggggggaaccaactagtgggggaacaaaatcatcctactacaggaggattattaaagggcgccactaaggggagaacaatatattacaacttttaacgagggggttatattagtgggtgttaaaccacgcgcggtgaattttgactgtgagggtattaaaaaaatttgtggcttctaagggaatatttattctatgagagaaaattttttacgg

SEQ ID NO: 285479 - DNA, 2021 bp, Homo sapiens
ggggtggtgcttgggaggttagagggagacacctagagtgaacggcaaaatggagcgcggaatactgtctggctgtgcacgtggaggtggcgaaatgtggaagcttaacgaagttggcgccatgaagctaaagactgctaccccggggctctagctcgctccgcctaatggcgggccgcaccccgccggcgaagcccacgtttgtaggtccgccctcacgctgatctcttgcccaatcagcgagttcggcttcgcgaggttggtgcccattggctttcgcataaaagctccgaggttacagacgtttccacctcttgccggcctcttaggtaattggcgtccgtggtaaccaatcaggaagaggatctgcgggaacgccggccttttactttcttgagtggccaatccggttgtaggctcacctcccccttctactcagagcactgctgcggccgccgccattttagcgttttgtcagaagcgtccgcgccgcgaggaggaggccctgctggtttctgtgcgggctcttgtcaggatggtgaagctgttcatcggaaacctgccccgggaggctacagagcaggagattcgctcactcttcgagcagtatgggaaggtgctggaatgtgacatcattaagaattacggctttgtgcacatagaagacaagacggcagctgaggatgccatacgcaacctgcaccattacaagcttcatggggtgaacatcaacgtggaagccagcaagaataagagcaaaacctcaacaaagttgcatgtgggcaacatcagtcccacctgcaccaataaggagcttcgagccaagtttgaggagtatggtccggtcatcgaatgtgacatcgtgaaagattatgccttcgtacacatggagcgggcagaggatgcagtggaggccatcaggggccttgataacacagagtttcaaggtgaaccaccctctttgggtagagggctgaacacaaggctgtgtgcagaaaatggttggataagtaaaaggagaggtttggtaaagataacagctgttggctggctggtgatgaagaaataagtgtgggtgatggacttcttatgatgtagaatgcatgggacttaggggctttaccttaggcaaatgtctcctggagaaaagccactcaccttttatttggagcccctacggcttttgtgcttatcagtgcagaaacccttttctttgaaggctttctgagttactgggccttttttattttttatttttttgtagtagagcacagttcagagttcctcactctgaatttattgccctcagcacaggatcagaattctgcattttacgtgaagaacctctcaaaaacatgtcaagcgacacttataggaccagaatccttgttaagctgtcctaccttacacaaactctttaaagggttacagctcttgttgctttatattatacctgtaccaagggattgtattttgagtttaaggccactctagaattacaaggctgattttaggacttcctggggaggaggcactggggttttaggggcggtaatgactgtcttttcattggtttggggggctggactttataagattttggtgaatagagcacttagatttgtgttatcttggagtcttaaccaaatgaatcttttgtgcctggagggcagcatgggtgatatgtggattgtcacttcatttggaagcatctcaaatccccagcattttgaatgcctacatgttgctcaaaggaaatgcttgttagagcattttggattttgaattttcagatttgggatgctaaaatggtacgtagaacgcaaatattccaaaatctgaggtctgaagcaacagtggcagttcaggggtggtgatcatggtgagttgctatctgaactcttctttcacctcctttgggttcccagtgtcaaaaagagtggtgtccttttttagcttaattaagcaggactgaacaaaaataataaaaaataaaaaaagccttattcaaaaaaaaaata

SEQ ID NO: 285480 - DNA, 1248 bp, Homo sapiens
ggggtggtgcttgggaggttagagggagacacctagagtgaacggcaaaatggagcgcggaatactgtctggctgtgcacgtggaggtggcgaaatgtggaagcttaacgaagttggcgccatgaagctaaagactgctaccccggggctctagctcgctccgcctaatggcgggccgcaccccgccggcgaagcccacgtttgtaggtccgccctcacgctgatctcttgcccaatcagcgagttcggcttcgcgaggttggtgcccattggctttcgcataaaagctccgaggttacagacgtttccacctcttgccggcctcttaggtaattggcgtccgtggtaaccaatcaggaagaggatctgcgggaacgccggccttttactttcttgagtggccaatccggttgtaggctcacctcccccttctactcagagcactgctgcggccgccgccattttagcgttttgtcagaagcgtccgcgccgcgaggaggaggccctgctggtttctgtgcgggctcttgtcaggatggtgaagctgttcatcggaaacctgccccgggaggctacagagcaggagattcgctcactcttcgagcagtatgggaaggtgctggaatgtgacatcattaagaattacggctttgtgcacatagaagacaagacggcagctgaggatgccatacgcaacctgcaccattacaagcttcatggggtgaacatcaactgtacgacatggcccggtatgagcgggagcagtatgccgatcgggcgcggtactcagccttttaaagcttgaggtgggatgtgtgtgggctgaaattccgagctgcggttgtgcatgagaatacacccttcgtggtaccccatctccgggacgttctcggctctgtgcgttcagtccctcaggaaccgtggaccttaatttaccttgctaagttcagaccttctcttcctttcctttcctttcctctcctgcccattttcctgttcttctgtccttcaatacttctgtagcttcccattcatgttctcttctcccagcaggcctcattgtgtgcagaaactgtggtgggggctgtgctgtctcctccctgcctcctgcctcctgcggctgttggatttgggaatgaccttggtgagagtctcactgctccagggtctctttttggtccaaaggctagacctatagagttggatcactttttttctttccggtgaaataaatggtttttcaactta

SEQ ID NO: 285481 - DNA, 552 bp, Homo sapiens
atgtgaccagaagcacgttactaacactggctagagttgtacgacatggcccggtatgagcgggagcagtatgccgatcgggcgcggtactcagccttttaaagcttgaggtgggatgtgtgtgggctgaaattccgagctgcggttgtgcatgagaatacacccttcgtggtaccccatctccgggacgttctcggctctgtgcgttcagtccctcaggaaccgtggaccttaatttaccttgctaagttcagaccttctcttcctttcctttcctttcctctcctgcccattttcctgttcttctgtccttcaatacttctgtagcttcccattcatgttctcttctcccagcaggcctcattgtgtgcagaaactgtggtgggggctgtgctgtctcctccctgcctcctgcctcctgcggctgttggatttgggaatgaccttggtgagagtctcactgctccagggtctctttttggtccaaaggctagacctatagagttggatcactttttttctttccggtgaaataaatggtttttcaactta

SEQ ID NO: 285482 - DNA, 1306 bp, Homo sapiens
ggggtggtgcttgggaggttagagggagacacctagagtgaacggcaaaatggagcgcggaatactgtctggctgtgcacgtggaggtggcgaaatgtggaagcttaacgaagttggcgccatgaagctaaagactgctaccccggggctctagctcgctccgcctaatggcgggccgcaccccgccggcgaagcccacgtttgtaggtccgccctcacgctgatctcttgcccaatcagcgagttcggcttcgcgaggttggtgcccattggctttcgcataaaagctccgaggttacagacgtttccacctcttgccggcctcttaggtaattggcgtccgtggtaaccaatcaggaagaggatctgcgggaacgccggccttttactttcttgagtggccaatccggttgtaggctcacctcccccttctactcagagcactgctgcggccgccgccattttagcgttttgtcagaagcgtccgcgccgcgaggaggaggccctgctggtttctgtgcgggctcttgtcaggatggtgaagctgttcatcggaaacctgccccgggaggctacagagcaggagattcgctcactcttcgagcagtatgggaaggtgctggaatgtgacatcattaagaattacggctttgtgcacatagaagacaagacggcagctgaggatgccatacgcaacctgcaccattacaagcttcatggggtgaacatcaacgtggaagccagcaagaataagagcaaaacctcaacaaagttgcatgtgggcaacatcagtcccacctgcaccaataaggagcttcgagccaagtttgaggagtatggtccggtcatcgaatgtgacatcgtgaaagattatgccttcgtacacatggagcgggcagaggatgcagtggaggccatcaggggccttgataacacagagtttcaagtcggctctgtgcgttcagtccctcaggaaccgtggaccttaatttaccttgctaagttcagaccttctcttcctttcctttcctttcctctcctgcccattttcctgttcttctgtccttcaatacttctgtagcttcccattcatgttctcttctcccagcaggcctcattgtgtgcagaaactgtggtgggggctgtgctgtctcctccctgcctcctgcctcctgcggctgttggatttgggaatgaccttggtgagagtctcactgctccagggtctctttttggtccaaaggctagacctatagagttggatcactttttttctttccggtgaaataaatggtttttcaactta

SEQ ID NO: 285483 - DNA, 1480 bp, Homo sapiens
ggggtggtgcttgggaggttagagggagacacctagagtgaacggcaaaatggagcgcggaatactgtctggctgtgcacgtggaggtggcgaaatgtggaagcttaacgaagttggcgccatgaagctaaagactgctaccccggggctctagctcgctccgcctaatggcgggccgcaccccgccggcgaagcccacgtttgtaggtccgccctcacgctgatctcttgcccaatcagcgagttcggcttcgcgaggttggtgcccattggctttcgcataaaagctccgaggttacagacgtttccacctcttgccggcctcttaggtaattggcgtccgtggtaaccaatcaggaagaggatctgcgggaacgccggccttttactttcttgagtggccaatccggttgtaggctcacctcccccttctactcagagcactgctgcggccgccgccattttagcgttttgtcagaagcgtccgcgccgcgaggaggaggccctgctggtttctgtgcgggctcttgtcaggatggtgaagctgttcatcggaaacctgccccgggaggctacagagcaggagattcgctcactcttcgagcagtatgggaaggtgctggaatgtgacatcattaagaattacggctttgtgcacatagaagacaagacggcagctgaggatgccatacgcaacctgcaccattacaagcttcatggggtgaacatcaacgtggaagccagcaagaataagagcaaaacctcaacaaagttgcatgtgggcaacatcagtcccacctgcaccaataaggagcttcgagccaagtttgaggagtatggtccggtcatcgaatgtgacatcgtgaaagattatgccttcgtacacatggagcgggcagaggatgcagtggaggccatcaggggccttgataacacagagtttcaaggcaaacgaatgcacgtgcagttgtccaccagccggcttaggactgcgcccgggatgggagaccagagcggctgctatcgacacctgttgccgacctcaggagctgctgccacagctgctgctgcagcagcagccgctgctgctgttactgcagcttccacttcatattacgggcgggatcggagccccctgcgtcgcgctacagccccagtccccactgttggagagggctacggttacgggcatgagagtgagttgtcccaagcttcagcagccgcgcggaattctcgtccttcaatacttctgtagcttcccattcatgttctcttctcccagcaggcctcattgtgtgcagaaactgtggtgggggctgtgctgtctcctccctgcctcctgcctcctgcggctgttggatttgggaatgaccttggtgagagtctcactgctccagggtctctttttggtccaaaggctagacctatagagttggatcactttttttctttccggtgaaataaatggtttttcaactta

SEQ ID NO: 285484 - DNA, 1150 bp, Homo sapiens
ggggtggtgcttgggaggttagagggagacacctagagtgaacggcaaaatggagcgcggaatactgtctggctgtgcacgtggaggtggcgaaatgtggaagcttaacgaagttggcgccatgaagctaaagactgctaccccggggctctagctcgctccgcctaatggcgggccgcaccccgccggcgaagcccacgtttgtaggtccgccctcacgctgatctcttgcccaatcagcgagttcggcttcgcgaggttggtgcccattggctttcgcataaaagctccgaggttacagacgtttccacctcttgccggcctcttaggtaattggcgtccgtggtaaccaatcaggaagaggatctgcgggaacgccggccttttactttcttgagtggccaatccggttgtaggctcacctcccccttctactcagagcactgctgcggccgccgccattttagcgttttgtcagaagcgtccgcgccgcgaggaggaggccctgctggtttctgtgcgggctcttgtcaggatggtgaagctgttcatcggaaacctgccccgggaggctacagagcaggagattcgctcactcttcgagcagtatgggaaggtgctggaatgtgacatcattaagaattacggctttgtgcacatagaagacaagacggcagctgaggatgccatacgcaacctgcaccattacaagcttcatggggtgaacatcaacgtggaagccagcaagaataagagcaaaacctcaacaaagttgcatgtgggcaacatcagtcccacctgcaccaataaggagcttcgagccaagtttgaggagtatggtccggtcatcgaatgtgacatcgtgaaagattatgccttcgtacacatggagcgggcagaggatgcagtggaggccatcaggggccttgataacacagagtttcaagacatccagctctgtcacccaagctgcagtgtggtggcatgattgtagctcactgtaactttgaactcctgagctcaagggatcctcccgccttggcctcccagagtttttgcagggactatatgtgagccactgcgtctggtcaaaatgtagtttttcaagagtaatgctttaataaactgatttttttcccccaaagcattt

SEQ ID NO: 285485 - DNA, 1399 bp, Homo sapiens
  misc_feature (1261)..(1261): n is a, c, g, or t
ggggtggtgcttgggaggttagagggagacacctagagtgaacggcaaaatggagcgcggaatactgtctggctgtgcacgtggaggtggcgaaatgtggaagcttaacgaagttggcgccatgaagctaaagactgctaccccggggctctagctcgctccgcctaatggcgggccgcaccccgccggcgaagcccacgtttgtaggtccgccctcacgctgatctcttgcccaatcagcgagttcggcttcgcgaggttggtgcccattggctttcgcataaaagctccgaggttacagacgtttccacctcttgccggcctcttaggtaattggcgtccgtggtaaccaatcaggaagaggatctgcgggaacgccggccttttactttcttgagtggccaatccggttgtaggctcacctcccccttctactcagagcactgctgcggccgccgccattttagcgttttgtcagaagcgtccgcgccgcgaggaggaggccctgctggtttctgtgcgggctcttgtcaggatggtgaagctgttcatcggaaacctgccccgggaggctacagagcaggagattcgctcactcttcgagcagtatgggaaggtgctggaatgtgacatcattaagaattacggctttgtgcacatagaagacaagacggcagctgaggatgccatacgcaacctgcaccattacaagcttcatggggtgaacatcaacgtggaagccagcaagaataagagcaaaacctcaacaaagttgcatgtgggcaacatcagtcccacctgcaccaataaggagcttcgagccaagtttgaggagtatggtccggtcatcgaatgtgacatcgtgaaagattatgccttcgtacacatggagcgggcagaggatgcagtggaggccatcaggggccttgataacacagagtttcaagcaagataacccctgtgacagaaggctactgttgctgtaacaaagggcatacatacattttcaagaactgcaatttaattttggagtccaggaaaagcagaagatgctgagatgtcatatatggcgaattgcactattctaaatgtgttttgttttaatctttcacagtaaacaagctttcagaaatgatggtcacaaggggtaggatatcaaggagcagccagtcattcacccaattccaacacacctacatgtcacactgtcacagagtgagagccacagttccagtagttcccctaattgaccaaatctccnttgccaaatcaaaagaaatcattcctagaattctctaatccttctattgatgatgggaactccagacaccaatggctgggggaaaaaaaaagttaactcacaccaagtttctctacttattacagacaaagggccaat

SEQ ID NO: 285486 - DNA, 1117 bp, Homo sapiens
ggggtggtgcttgggaggttagagggagacacctagagtgaacggcaaaatggagcgcggaatactgtctggctgtgcacgtggaggtggcgaaatgtggaagcttaacgaagttggcgccatgaagctaaagactgctaccccggggctctagctcgctccgcctaatggcgggccgcaccccgccggcgaagcccacgtttgtaggtccgccctcacgctgatctcttgcccaatcagcgagttcggcttcgcgaggttggtgcccattggctttcgcataaaagctccgaggttacagacgtttccacctcttgccggcctcttaggtaattggcgtccgtggtaaccaatcaggaagaggatctgcgggaacgccggccttttactttcttgagtggccaatccggttgtaggctcacctcccccttctactcagagcactgctgcggccgccgccattttagcgttttgtcagaagcgtccgcgccgcgaggaggaggccctgctggtttctgtgcgggctcttgtcaggatggtgaagctgttcatcggaaacctgccccgggaggctacagagcaggagattcgctcactcttcgagcagtatgggaaggtgctggaatgtgacatcattaagaattacggctttgtgcacatagaagacaagacggcagctgaggatgccatacgcaacctgcaccattacaagcttcatggggtgaacatcaacgtggaagccagcaagaataagagcaaaacctcaacaaagttgcatgtgggcaacatcagtcccacctgcaccaataaggagcttcgagccaagtttgaggagtatggtccggtcatcgaatgtgacatcgtgaaagattatgccttcgtacacatggagcgggcagaggatgcagtggaggccatcaggggccttgataacacagagtttcaaggtgcggtcttgctctgttgcctaggctggagtacagtggtatgagtatggctcaatgcagcctcaaccttctgagctgaagcggtcttcccatctcaaccttccaagtagctggaactacagaggtatgcaccattgctacacggtctacttaggggatcctgctagagt

SEQ ID NO: 285487 - DNA, 1155 bp, Homo sapiens
ggggtggtgcttgggaggttagagggagacacctagagtgaacggcaaaatggagcgcggaatactgtctggctgtgcacgtggaggtggcgaaatgtggaagcttaacgaagttggcgccatgaagctaaagactgctaccccggggctctagctcgctccgcctaatggcgggccgcaccccgccggcgaagcccacgtttgtaggtccgccctcacgctgatctcttgcccaatcagcgagttcggcttcgcgaggttggtgcccattggctttcgcataaaagctccgaggttacagacgtttccacctcttgccggcctcttaggtaattggcgtccgtggtaaccaatcaggaagaggatctgcgggaacgccggccttttactttcttgagtggccaatccggttgtaggctcacctcccccttctactcagagcactgctgcggccgccgccattttagcgttttgtcagaagcgtccgcgccgcgaggaggaggccctgctggtttctgtgcgggctcttgtcaggatggtgaagctgttcatcggaaacctgccccgggaggctacagagcaggagattcgctcactcttcgagcagtatgggaaggtgctggaatgtgacatcattaagaattacggctttgtgcacatagaagacaagacggcagctgaggatgccatacgcaacctgcaccattacaagcttcatggggtgaacatcaacgtggaagccagcaagaataagagcaaaacctcaacaaagttgcatgtgggcaacatcagtcccacctgcaccaataaggagcttcgagccaagtttgaggagtatggtccggtcatcgaatgtgacatcgtgaaagattatgccttcgtacacatggagcgggcagaggatgcagtggaggccatcaggggccttgataacacagagtttcaaggctcttgtcaggatggtgaagctgttcatcggaaaccttccccgggaggctacagagcaggagattcgctcactcttcgagcagtatgggaaggtgctggaatgtgacatcattaagaattacggctttgtgcacatagaagacaagacggcagctgaggatgccatacgcaacctgcaccattacaagcttcatggggtgaacatca

SEQ ID NO: 285488 - DNA, 1182 bp, Homo sapiens
ggggtggtgcttgggaggttagagggagacacctagagtgaacggcaaaatggagcgcggaatactgtctggctgtgcacgtggaggtggcgaaatgtggaagcttaacgaagttggcgccatgaagctaaagactgctaccccggggctctagctcgctccgcctaatggcgggccgcaccccgccggcgaagcccacgtttgtaggtccgccctcacgctgatctcttgcccaatcagcgagttcggcttcgcgaggttggtgcccattggctttcgcataaaagctccgaggttacagacgtttccacctcttgccggcctcttaggtaattggcgtccgtggtaaccaatcaggaagaggatctgcgggaacgccggccttttactttcttgagtggccaatccggttgtaggctcacctcccccttctactcagagcactgctgcggccgccgccattttagcgttttgtcagaagcgtccgcgccgcgaggaggaggccctgctggtttctgtgcgggtgagactccgagcctttccactgcctttcttgtactgtgttaaatcttctctcactcccttgggcttcgggggtgtcctggtaggtccgcagtctccacacccgtcactgagagccgacctcggtcctcggcattgcgcggtaagccgggagcagcccttcccccaccgccccctgagaataccttgctttttttcgcccaccctgtcccgcgcccgacatggctgctcttggagcctcgagatttccactgggataaccccctttcccttatatctgacagttacattctcgtttcgggaatttctcgggccgtgagacatcgtctggttaatgaatctgaagctcttttccgcggccgcgcatttcagtgttcggcaggagctaggacggtgccccgagagaggcgttcaccactccagtatttcctttatctcccactcctcgctgtctgatccgagtcgcgcgttcattacttccaaaggaaactcaaatgtagctattacaaggcccattttcccggaaatgatggctgctttggttcctacgtgaggaaaagcctgttgataatttcaggcaggcagtcagcaagcctagtagacttttgttttctgttgtcctcctagtggatagaaaagcctagtacccccatttcttca

SEQ ID NO: 285489 - DNA, 2236 bp, Homo sapiens
cttccctgctccagagccgccgcctgggccggggcagggcgggcccggggctcctccatgctgccagccgcggggctgcggagccgaccaagtggctcctgcgatggcggcggaagaggaggctgcggcgggaggtaaagtgttgagagaggagaaccagtgcattgctcctgtggtttccagccgcgtgagtccagggacaagaccaacagctatggggtctttcagctcacacatgacagagtttccacgaaaacgcaaaggaagtgattcagacccatcccaagaagctcatagccaaactgaaaagcggaggagagataaaatgaataacctgattgaagaactgtctgcaatgatccctcagtgcaaccccatggcgcgtaaactggacaaacttacagttttaagaatggctgttcaacacttgagatctttaaaaggcttgacaaattcttatgtgggaagtaattatagaccatcatttcttcaggataatgagctcagacatttaatccttaagactgcagaaggcttcttatttgtggttggatgtgaaagaggaaaaattctcttcgtttctaagtcagtctccaaaatacttaattatgatcaggctagtttgactggacaaagcttatttgacttcttacatccaaaagatgttgccaaagtaaaggaacaactttcttcttttgatatttcaccaagagaaaagctaatagatgccaaaactggtttgcaagttcacagtaatctccacgctggaaggacacgtgtgtattctggctcaagacgatcttttttctgtcggataaagagttgtaaaatctctgtcaaagaagagcatggatgcttacccaactcaaagaagaaagagcacagaaaattctatactatccattgcactggttacttgagaagctggcctccaaatattgttggaatggaagaagaaaggaacagtaagaaagacaacagtaattttacctgccttgtggccattggaagattacagccatatattgttccacagaacagtggagagattaatgtgaaaccaactgaatttataacccggtttgcagtgaatggaaaatttgtctatgtagatcaaagggcaacagcgattttaggatatctgcctcaggaacttttgggaacttcttgttatgaatattttcatcaagatgaccacaataatttgactgacaagcacaaagcagttctacagagtaaggagaaaatacttacagattcctacaaattcagagcaaaagatggctcttttgtaactttaaaaagccaatggtttagtttcacaaatccttggacaaaagaactggaatatattgtatctgtcaacactttagttttgggacatagtgagcctggagaagcatcatttttaccttgtagctctcaatcatcagaagaatcctctagacagtcctgtatgagtgtacctggaatgtctactggaacagtacttggtgctggtagtattggaacagatattgcaaatgaaattctggatttacagaggttacagtcttcttcataccttgatgattcgagtccaacaggtttaatgaaagatactcatactgtaaactgcaggagtatgtcaaataaggagttgtttccaccaagtccttctgaaatgggggagctagaggctaccaggcaaaaccagagtactgttgctgtccacagccatgagccactcctcagtgatggtgcacagttggatttcgatgccctatgtgacaatgatgacacagccatggctgcatttatgaattacttagaagcagaggggggcctgggagaccctggggacttcagtgacatccagtggaccctctagcctttgatttttaactccaaaaatgagaaacattttaaagcatttcatttacgaaaaactgtctcaactattcttaagtactgtattgatattgtttgtatcttttattaatgttctaccactttttatagatttgcatcttcctgtcacagggatgtggggaaatacgttttcctcccaagagaaccaagtttattatagactcctttattcagtgaaatggcttataatccactagttgccatatttttgctaaaatatttctaaccaagaatactacttacatattgttttggctttgttttatttttgatgcagttttttttagttgaggtaatgtaatatattgatgttttcctttgtgtc

SEQ ID NO: 285490 - DNA, 2338 bp, Homo sapiens
cttccctgctccagagccgccgcctgggccggggcagggcgggcccggggctcctccatgctgccagccgcggggctgcggagccgaccaagtggctcctgcgatggcggcggaagaggaggctgcggcgggaggtaaagtgttgagagaggagaaccagtgcattgctcctgtggtttccagccgcgtgagtccagggacaagaccaacagctatggggtctttcagctcacacatgacagagtttccacgaaaacgcaaaggaagtgattcagacccatcccagtcaggaatcatgacagaaaaagtggtggaaaagctttctcagaatccccttacctatcttctttcaacaaggatagaaatatcagcctccagtggcagcagagaagctcatagccaaactgaaaagcggaggagagataaaatgaataacctgattgaagaactgtctgcaatgatccctcagtgcaaccccatggcgcgtaaactggacaaacttacagttttaagaatggctgttcaacacttgagatctttaaaaggcttgacaaattcttatgtgggaagtaattatagaccatcatttcttcaggataatgagctcagacatttaatccttaagactgcagaaggcttcttatttgtggttggatgtgaaagaggaaaaattctcttcgtttctaagtcagtctccaaaatacttaattatgatcaggctagtttgactggacaaagcttatttgacttcttacatccaaaagatgttgccaaagtaaaggaacaactttcttcttttgatatttcaccaagagaaaagctaatagatgccaaaactggtttgcaagttcacagtaatctccacgctggaaggacacgtgtgtattctggctcaagacgatcttttttctgtcggataaagagttgtaaaatctctgtcaaagaagagcatggatgcttacccaactcaaagaagaaagagcacagaaaattctatactatccattgcactggttacttgagaagctggcctccaaatattgttggaatggaagaagaaaggaacagtaagaaagacaacagtaattttacctgccttgtggccattggaagattacagccatatattgttccacagaacagtggagagattaatgtgaaaccaactgaatttataacccggtttgcagtgaatggaaaatttgtctatgtagatcaaagggcaacagcgattttaggatatctgcctcaggaacttttgggaacttcttgttatgaatattttcatcaagatgaccacaataatttgactgacaagcacaaagcagttctacagagtaaggagaaaatacttacagattcctacaaattcagagcaaaagatggctcttttgtaactttaaaaagccaatggtttagtttcacaaatccttggacaaaagaactggaatatattgtatctgtcaacactttagttttgggacatagtgagcctggagaagcatcatttttaccttgtagctctcaatcatcagaagaatcctctagacagtcctgtatgagtgtacctggaatgtctactggaacagtacttggtgctggtagtattggaacagatattgcaaatgaaattctggatttacagaggttacagtcttcttcataccttgatgattcgagtccaacaggtttaatgaaagatactcatactgtaaactgcaggagtatgtcaaataaggagttgtttccaccaagtccttctgaaatgggggagctagaggctaccaggcaaaaccagagtactgttgctgtccacagccatgagccactcctcagtgatggtgcacagttggatttcgatgccctatgtgacaatgatgacacagccatggctgcatttatgaattacttagaagcagaggggggcctgggagaccctggggacttcagtgacatccagtggaccctctagcctttgatttttaactccaaaaatgagaaacattttaaagcatttcatttacgaaaaactgtctcaactattcttaagtactgtattgatattgtttgtatcttttattaatgttctaccactttttatagatttgcatcttcctgtcacagggatgtggggaaatacgttttcctcccaagagaaccaagtttattatagactcctttattcagtgaaatggcttataatccactagttgccatatttttgctaaaatatttctaaccaagaatactacttacatattgttttggctttgttttatttttgatgcagttttttttagttgaggtaatgtaatatattgatgttttcctttgtgtc

SEQ ID NO: 285491 - DNA, 2299 bp, Homo sapiens
cttccctgctccagagccgccgcctgggccggggcagggcgggcccggggctcctccatgctgccagccgcggggctgcggagccgaccaagtggctcctgcgatggcggcggaagaggaggctgcggcgggaggtaaagtgttgagagaggagaaccagtgcattgctcctgtggtttccagccgcgtgagtccagggacaagaccaacagctatggggtctttcagctcacacatgacagagtttccacgaaaacgcaaaggaagtgattcagacccatcccatcagaatccccttacctatcttctttcaacaaggatagaaatatcagcctccagtggcagcagagaagctcatagccaaactgaaaagcggaggagagataaaatgaataacctgattgaagaactgtctgcaatgatccctcagtgcaaccccatggcgcgtaaactggacaaacttacagttttaagaatggctgttcaacacttgagatctttaaaaggcttgacaaattcttatgtgggaagtaattatagaccatcatttcttcaggataatgagctcagacatttaatccttaagactgcagaaggcttcttatttgtggttggatgtgaaagaggaaaaattctcttcgtttctaagtcagtctccaaaatacttaattatgatcaggctagtttgactggacaaagcttatttgacttcttacatccaaaagatgttgccaaagtaaaggaacaactttcttcttttgatatttcaccaagagaaaagctaatagatgccaaaactggtttgcaagttcacagtaatctccacgctggaaggacacgtgtgtattctggctcaagacgatcttttttctgtcggataaagagttgtaaaatctctgtcaaagaagagcatggatgcttacccaactcaaagaagaaagagcacagaaaattctatactatccattgcactggttacttgagaagctggcctccaaatattgttggaatggaagaagaaaggaacagtaagaaagacaacagtaattttacctgccttgtggccattggaagattacagccatatattgttccacagaacagtggagagattaatgtgaaaccaactgaatttataacccggtttgcagtgaatggaaaatttgtctatgtagatcaaagggcaacagcgattttaggatatctgcctcaggaacttttgggaacttcttgttatgaatattttcatcaagatgaccacaataatttgactgacaagcacaaagcagttctacagagtaaggagaaaatacttacagattcctacaaattcagagcaaaagatggctcttttgtaactttaaaaagccaatggtttagtttcacaaatccttggacaaaagaactggaatatattgtatctgtcaacactttagttttgggacatagtgagcctggagaagcatcatttttaccttgtagctctcaatcatcagaagaatcctctagacagtcctgtatgagtgtacctggaatgtctactggaacagtacttggtgctggtagtattggaacagatattgcaaatgaaattctggatttacagaggttacagtcttcttcataccttgatgattcgagtccaacaggtttaatgaaagatactcatactgtaaactgcaggagtatgtcaaataaggagttgtttccaccaagtccttctgaaatgggggagctagaggctaccaggcaaaaccagagtactgttgctgtccacagccatgagccactcctcagtgatggtgcacagttggatttcgatgccctatgtgacaatgatgacacagccatggctgcatttatgaattacttagaagcagaggggggcctgggagaccctggggacttcagtgacatccagtggaccctctagcctttgatttttaactccaaaaatgagaaacattttaaagcatttcatttacgaaaaactgtctcaactattcttaagtactgtattgatattgtttgtatcttttattaatgttctaccactttttatagatttgcatcttcctgtcacagggatgtggggaaatacgttttcctcccaagagaaccaagtttattatagactcctttattcagtgaaatggcttataatccactagttgccatatttttgctaaaatatttctaaccaagaatactacttacatattgttttggctttgttttatttttgatgcagttttttttagttgaggtaatgtaatatattgatgttttcctttgtgtc

SEQ ID NO: 285492 - DNA, 1589 bp, Homo sapiens
cttccctgctccagagccgccgcctgggccggggcagggcgggcccggggctcctccatgctgccagccgcggggctgcggagccgaccaagtggctcctgcgatggcggcggaagaggaggctgcggcgggaggtaaagtgttgagagaggagaaccagtgcattgctcctgtggtttccagccgcgtgagtccagggacaagaccaacagctatggggtctttcagctcacacatgacagagtttccacgaaaacgcaaaggaagtgattcagacccatcccaagaagctcatagccaaactgaaaagcggaggagagataaaatgaataacctgattgaagaactgtctgcaatgatccctcagtgcaaccccatggcgcgtaaactggacaaacttacagttttaagaatggctgttcaacacttgagatctttaaaaggcttgacaaattcttatgtgggaagtaattatagaccatcatttcttcaggataatgagctcagacatttaatccttaagactgcagaaggcttcttatttgtggttggatgtgaaagaggaaaaattctcttcgtttctaagtcagtctccaaaatacttaattatgatcaggctagtttgactggacaaagcttatttgacttcttacatccaaaagatgttgccaaagtaaaggaacaactttcttcttttgatatttcaccaagagaaaagctaatagatgccaaaactggtttgcaagttcacagtaatctccacgctggaaggacacgtgtgtattctggctcaagacgatcttttttctgtcggataaagagttgtaaaatctctgtcaaagaagagcatggatgcttacccaactcaaagaagaaagagcacagaaaattctatactatccattgcactggttacttgagaagctggcctccaaatattgttggaatggaagaagaaaggaacagtaagaaagacaacagtaattttacctgccttgtggccattggaagattacagccatatattgttccacagaacagtggagagattaatgtgaaaccaactgaatttataacccggtttgcagtgaatggaaaatttgtctatgtagatcaaaggtgacaatgatgacacagccatggctgcatttatgaattacttagaagcagaggggggcctgggagaccctggggacttcagtgacatccagtggaccctctagcctttgatttttaactccaaaaatgagaaacattttaaagcatttcatttacgaaaaactgtctcaactattcttaagtactgtattgatattgtttgtatcttttattaatgttctaccactttttatagatttgcatcttcctgtcacagggatgtggggaaatacgttttcctcccaagagaaccaagtttattatagactcctttattcagtgaaatggcttataatccactagttgccatatttttgctaaaatatttctaaccaagaatactacttacatattgttttggctttgttttatttttgatgcagttttttttagttgaggtaatgtaatatattgatgttttcctttgtgtc

SEQ ID NO: 285493 - DNA, 1660 bp, Homo sapiens
cttccctgctccagagccgccgcctgggccggggcagggcgggcccggggctcctccatgctgccagccgcggggctgcggagccgaccaagtggctcctgcgatggcggcggaagaggaggctgcggcgggaggtaaagtgttgagagaggagaaccagtgcattgctcctgtggtttccagccgcgtgagtccagggacaagaccaacagctatggggtctttcagctcacacatgacagagtttccacgaaaacgcaaaggaagtgattcagacccatcccaagaagctcatagccaaactgaaaagcggaggagagataaaatgaataacctgattgaagaactgtctgcaatgatccctcagtgcaaccccatggcgcgtaaactggacaaacttacagttttaagaatggctgttcaacacttgagatctttaaaaggcttgacaaattcttatgtgggaagtaattatagaccatcatttcttcaggataatgagctcagacatttaatccttaagactgcagaaggcttcttatttgtggttggatgtgaaagaggaaaaattctcttcgtttctaagtcagtctccaaaatacttaattatgatcaggctagtttgactggacaaagcttatttgacttcttacatccaaaagatgttgccaaagtaaaggaacaactttcttcttttgatatttcaccaagagaaaagctaatagatgccaaaactggtttgcaagttcacagtaatctccacgctggaaggacacgtgtgtattctggctcaagacgatcttttttctgtcggataaagagttgtaaaatctctgtcaaagaagagcatggatgcttacccaactcaaagaagaaagagcacagaaaattctatactatccattgcactggttacttgagaagctggcctccaaatattgttggaatggaagaagaaaggaacagtaagaaagacaacagtaattttacctgccttgtggccattggaagattacagccatatattgttccacagaacagtggagagattaatgtgaaaccaactgaatttataacccggtttgcagtgaatggaaaatttgtctatgtagatcaaagggcaacagcgattttaggatatctgcctcaggaacttttgggaacttcttgttatgaatattttcatcaagatgaccacaataatttgactgacaagcacaaagcagttctacagagtaaggagaaaatacttacagattcctacaaattcagagcaaaagatggctcttttgtaactttaaaaagccaatggtttagtttcacaaatccttggacaaaagaactggaatatattgtatctgtcaacactttagttttgggacatagtgagcctggagaagcatcatttttaccttgtagctctcaatcatcagaagaatcctctagacagtcctgtatgagtgtacctggaatgtctactggaacagtacttggtgctggtagtattggaacagatattgcaaatgaaattctggatttacagaggttacagtcttcttcataccttgatgattcgagtccaacaggtttaatgaaagatactctgtatgggggtctcgggggatcctgctagagatcgtaccaacaagcatgacagcgg

SEQ ID NO: 285494 - DNA, 495 bp, Homo sapiens
cttccctgctccagagccgccgcctgggccggggcagggcgggcccggggctcctccatgctgccagccgcggggctgcggagccgaccaagtggctcctgcgatggcggcggaagaggaggctgcggcgggaggtaaagtgttgagagaggagaaccagtgcattgctcctgtggtttccagccgcgtgagtccagggacaagaccaacagctatggggtctttcagctcacacatgacagagtttccacgaaaacgcaaaggaagtgattcagacccatcccagtcaggaatcatgacagaaaaagtggtggaaaagctttctcagaatccccttacctatcttctttcaacaaggatagaaatatcagcctccagtggcagcagagtggaagatggtgaacaccaagttaaaatgaaggccttcagatcctggctcagagagagcaccccttcctctgctgtacatcctggagtcaggagtctctatccatc

SEQ ID NO: 285495 - DNA, 218 bp, Homo sapiens
taagaatggctgttcaacacttgagatctttaaaaggtgagtttgacgatggcttccacacttcggtaagtgaaatctgctctgtcactgaggtctctgattggttcgctttgctgtcagctgttgaggttctatccagatgtgtctttcagctttagaggtattcactggcatttgtctatagtctgtatgtggagagaatactgaattggatgtca

SEQ ID NO: 285496 - DNA, 617 bp, Homo sapiens
tgcgctgccgggcccgcgaggccgagctcgccagccggatgtgtcgcctgttcttccctgttgcgttcggcactgactggggagcttgtatctgggcaaaaatggaaactttttaaaaagactgcccttaccgcgtgagagtgcgtggctttttctccaccaggggttaattaggtgcttgaacttcctcagaaaagccaatccagggtttattttcatagttcatacaagtacttcacgtggttaaagaagcccatcccggctgtgagaatagcgtgcagtagctcgcgcgttaagaacgggcagaacgccactcaaaagcacgtcgggatggtgggtttcggattggggtacagtatatcagaagtatgagccgatctttttccagtccattggaaatccgtttatttttagatgcctggatggggtactcattgatgggaatgacaaagggatatcaaaagttgtgtacagatcttgcaatgggagggatcgactcggccctttagaaatgagtgatagtacatggctaacgtcagaaattcataaccctctggctgtgggacagtatgtcaacaattgttccaatggtaagaaggcatcatggggctgtgaga

SEQ ID NO: 285497 - DNA, 1621 bp, Homo sapiens
aggccagacagccgtgacagagaaactaggcggtccgctcctgggacgcggtctcgggggcgggttcgcccctgaggcccggtgacccttcgcccgcaaccagggctagcgcttgtgtgcgcccacggaagcacccgagcgaccggagaaagaaaaagtggtcaaggggacctccttccagctctacgcgcctctcattcagagaggtgaggtcaggaaaggggaaggacgaagccccagagcaacagaagtcaggcggtgccaggaacactgagggcggagccaggggaaggcggccgagcgcggccccctctcctcccgggccggggcgggcccgaggcctcgatccgccttccccgcgccgtcctggtcacggccccgcggggcagccatgcctggccgtctgctgcggggcctgtggcagcgatggcgccgttacaagtaccgcttcgttccctggatcgcactgaacctaagccacaacccgaggaccctccgatatgttccagaggaatccaaagacaaagttatctcagatgaagatgtcctaggaacattactgaaagttttccaggctctattcttaaatgatttcaataaacaatcagaaatcttgactatgcttccagaatctgttaaatcaaaatatcaagacctactggcagttgaacatcaaggggtgaaactgcttgaaaacagacatcaacagcaaagtacctttaaaccagaagaaattctttacaagactttgggtttcagtgttgcccaagcaactagctcattgatttctgctggaaaaggtgtcttcgttactaaaggattggtaccaaaaggcgcagtcgtatctatgtatcctggtacagtatatcagaagtatgagccgatctttttccagtccattggaaatccgtttatttttagatgcctggatggggtactcattgatgggaatgacaaagggatatcaaaagttgtgtacagatcttgcaatgggagggatcgactcggccctttagaaatgagtgatagtacatggctaacgtcagaaattcataaccctctggctgtgggacagtatgtcaacaattgttccaatgacagagcagctaatgtctgttatcaggaatttgatgtgcctgcagttttccctatagaactgaagcagtatcttccaaacattgcctacagctatgacaaacaaagcccacttcgatgtgttgttcttgtcgcacttagggacatcaatcaaggagaagagcttttttcaaactactacacaattgtcagctaactctgtgaatcagaaattattaggttttctactcagctattaattctaagtgttttttgttaatcacttctctgagttctacctgtaaaacaaatattttgagacttaattggaataggaatttcttatgtttttgttgatattatatttatgttccaatttcatgataaaagctacttgcttcattacaatttcaaatttgtaatgcaattccaagtttaattggttttcacctaaatacacaatagcttattaaattaaaacctactctttgaacttataatttcaatttttcttttgtttattttgtaagctctgtggtggtttata

SEQ ID NO: 285498 - DNA, 1389 bp, Homo sapiens
aatggaataatgtaaggaccccacagcatgtggtatagaatgggcctttcataagtactgactacttgggtgggaagtgttgggagttagctaactagaactccctcaaacaattcttttctgaacttagtttccagccctccacacacatgagaataagcttatagttccttaaggccaggaacccagaagttatgcaggtaagtttggcttttatcagttgaagggtagtgaatagaaacttttcccattttcaggaccctccgatatgttccagaggaatccaaagacaaagttatctcagatgaagatgtcctaggaacattactgaaagttttccaggctctattcttaaatgatttcaataaacaatcagaaatcttgactatgcttccagaatctgttaaatcaaaatatcaagacctactggcagttgaacatcaaggggtgaaactgcttgaaaacagacatcaacagcaaagtacctttaaaccagaagaaattctttacaagactttgggtttcagtgttgcccaagcaactagctcattgatttctgctggaaaaggtgtcttcgttactaaaggattggtaccaaaaggcgcagtcgtatctatgtatcctggtacagtatatcagaagtatgagccgatctttttccagtccattggaaatccgtttatttttagatgcctggatggggtactcattgatgggaatgacaaagggatatcaaaagttgtgtacagatcttgcaatgggagggatcgactcggccctttagaaatgagtgatagtacatggctaacgtcagaaattcataaccctctggctgtgggacagtatgtcaacaattgttccaatgacagagcagctaatgtctgttatcaggaatttgatgtgcctgcagttttccctatagaactgaagcagtatcttccaaacattgcctacagctatgacaaacaaagcccacttcgatgtgttgttcttgtcgcacttagggacatcaatcaaggagaagagcttttttcaaactactacacaattgtcagctaactctgtgaatcagaaattattaggttttctactcagctattaattctaagtgttttttgttaatcacttctctgagttctacctgtaaaacaaatattttgagacttaattggaataggaatttcttatgtttttgttgatattatatttatgttccaatttcatgataaaagctacttgcttcattacaatttcaaatttgtaatgcaattccaagtttaattggttttcacctaaatacacaatagcttattaaattaaaacctactctttgaacttataatttcaatttttcttttgtttattttgtaagctctgtggtggtttata

SEQ ID NO: 285499 - DNA, 1482 bp, Homo sapiens
tgcgctgccgggcccgcgaggccgagctcgccagccggatgtgtcgcctgttcttccctgttgcgttcggcactgactggggagcttgtatctgggcaaaaatggaaactttttaaaaagactgcccttaccgcgtgagagtgcgtggctttttctccaccaggggttaattaggtgcttgaacttcctcagaaaagccaatccagggtttattttcatagttcatacaagtacttcacgtggttaaagaagcccatcccggctgtgagaatagcgtgcagtagctcgcgcgttaagaacgggcagaacgccactcaaaagcacgtcgggatggtgggtttcggattggggaccctccgatatgttccagaggaatccaaagacaaagttatctcagatgaagatgtcctaggaacattactgaaagttttccaggctctattcttaaatgatttcaataaacaatcagaaatcttgactatgcttccagaatctgttaaatcaaaatatcaagacctactggcagttgaacatcaaggggtgaaactgcttgaaaacagacatcaacagcaaagtacctttaaaccagaagaaattctttacaagactttgggtttcagtgttgcccaagcaactagctcattgatttctgctggaaaaggtgtcttcgttactaaaggattggtaccaaaaggcgcagtcgtatctatgtatcctggtacagtatatcagaagtatgagccgatctttttccagtccattggaaatccgtttatttttagatgcctggatggggtactcattgatgggaatgacaaagggatatcaaaagttgtgtacagatcttgcaatgggagggatcgactcggccctttagaaatgagtgatagtacatggctaacgtcagaaattcataaccctctggctgtgggacagtatgtcaacaattgttccaatgacagagcagctaatgtctgttatcaggaatttgatgtgcctgcagttttccctatagaactgaagcagtatcttccaaacattgcctacagctatgacaaacaaagcccacttcgatgtgttgttcttgtcgcacttagggacatcaatcaaggagaagagcttttttcaaactactacacaattgtcagctaactctgtgaatcagaaattattaggttttctactcagctattaattctaagtgttttttgttaatcacttctctgagttctacctgtaaaacaaatattttgagacttaattggaataggaatttcttatgtttttgttgatattatatttatgttccaatttcatgataaaagctacttgcttcattacaatttcaaatttgtaatgcaattccaagtttaattggttttcacctaaatacacaatagcttattaaattaaaacctactctttgaacttataatttcaatttttcttttgtttattttgtaagctctgtggtggtttata

SEQ ID NO: 285500 - DNA, 709 bp, Homo sapiens
ctttggcctgccatctcccaagggcaaacctcacaactcaggcccaagtcacaggaatctgaatggtggggtgaccttctcctctagtttaatttcattgcaatactgagaaacttcaactgttttgtctttagaagggaaattcatgtttgtgccaggccagcctttgtaaaagcctttgattggattcactagaagtctgtcttcccgcagtacatatactgtgaattttctccttcggcatttcaaccacttggaatggccactaaagtggcttttgatctaaagtaaactctgattctgtgttgatggggaaccatttctctctaacatggtggtttctttaagatgtttgatgttgggattacagacatgtgccaccacacctgtgaggccttcttttttttttttcttaagagcaaaagaatatataccaagacattgtttatcatgggaaagaggaaaaggaaacaactacacattcatcaaagatcattgaaaatctatgtaaaactccactgagtgattgtatcacccatacaatttacctctgctttctggcttttgaatgcaaatgtttaatgttatttataatatggtaatgacgattacaacattttggcagtttcatctgtgaatctcttttctctttgtttttgttttttgttttattcatttatttattgagacagagtcttgttctgtcatc

SEQ ID NO: 285501 - DNA, 2842 bp, Homo sapiens
ctttggcctgccatctcccaagggcaaacctcacaactcaggcccaagtcacaggaatctgaatggtggggtgaccttctcctctagtttaatttcattgcaatactgagaaacttcaactgttttgtctttagaagggaaattcatgtttgtgccaggccagcctttgtaaaagcctttgattggattcactagaagtctgtcttcccgcagtacatatactgtgaattttctccttcggcatttcaaccacttggaatggccactaaagtggcttttgatctaaagtaaactctgattctgtgttgatggggaaccatttctctctaacatggtggtttctttaagatgtttgacttgggccacatgagaataacagatctttgggcagtccaagcaagagcctcctgatctagcagccaagactccccctgacctttggccatgtaccccaaccctctcatctactgcacctgctgggacccctggaacttgggaccacggaagctaatcaagacccctcaactaccacgcaagaactccacagggagttccaagctaactcctcttctaccagctccaaaaaatcacaattacctccaaccaacaaaacctgttgtttccccaaaaatgaaaatccattcagcaaggcaagaagagactaataaatcattttatgaagtgatcaacgtgtcacctggctatcaacttgttcggaatcgggaacagatttctgtcaccttaggggatgagatgtttgataggaaaaagcggtgggaatcggagatcccggacaaaggcagattttccaggaccaacatcatttctgacctagaagagcaaatctcagagctgacagcaataattgaacaaatgaacagagaccaccagtctgcccagaaattgctctccagtgaaatggatctccgctgtgctgagatgaaacagaactttgaaaacaagaacagggagctcaaagaggcccatgaagcagaactcagtgagttggagaacaactacaaagcagccttgaaggcagagaagttggctgcccaagagaagctagaggagatgggaaaagaatacaagtatttgaagaatatgtttcgtacgtatcaggacagtatttatgatgaaatggaagagaagtggtcaaaacagaaggcgaaatggaagaaggatgagaagttcgagcgagaaaatatcctgctacagcaaaaaaaaaagatgaccaaaaaattcgaaatggagtcaggagaagaagataagaaaataaatgaatcctgcagtgctgtctttgagaacttcattcaagagaaggaggagctcttgaaacaacatcaaagtgacaccttgcaattagaagagctgagaaaaaccaaagaggtgccctggagaagagaccaaataaatagacattggcatgatgtcctgcaacagcttcttcttatgcaggtcatgcaggaagaattgcatgcacaagcccttatcctagagtcactgaacacaaacctctactatacccagttggaactccagaaagagaaagctatagtgggaaatctggagaaaatgcttcaaaccaagtttgctgaaactgaagaaaagtataagcacaccatacagatcctgacggaagagaacattcatctgaagcaaaagataatttctaagaatgaagaaatttgtgaaggatgttctgggagattggcctctattactgtttctaaggatgattctgacactgtgcaagatggtagcaagaaaggacaagaatcataaacaaaaagttgctctgcattgttgaagatggttggcacaccatttctgtaggcccaggaaactcctgggagggttttcttgagaaaatgcatataatgagtttagttcttgggttgctctgactctctgaatgtctgaaaatgtttgaattctcatctgaatttcacagcttatcacggactcttcactgaaaaatgatgctctccatactgggagctgagctttctctgagttttgtactatttttcttctaccttgacgtatttcgttagaaagaaactgatttgaaggccttcttcatattgaacttttactatatttgggaggtgtacctttgtcccctggggcatttaggtagcaaaaaaagatgatgtgttgattttaactctaaaatatttttctctcacacccatgccccctacttccctacctctcaatcatgttccctaacctatgacttaggaagggtttctgatgattcttaccacctcctctggaccatcaccagaattcagacacccacagtgcaggcaacataaataagtgaagtgggctagacataaggaaaacaattgcccaagcacagtgataagtggcaaccaacagcagcctcagtagaggggcttgggcagggctggggcacagcggatggggaagagtgacccacagagcactgtcccatctgaagaaggtgcttctcagacctttgccatgcaaaagcatgaggtcaatattgtcagatagtatgattttttaaaagaagttattctggtttttatgtgatatctcctaatttttaaacattgacaacaaattttaaaaatacaactgtgtgtgccgatcatgggagactcaagtagaacatgtctgtagtccagatgttttccacctgtgagatgtcattggcagaaaccaaaaccaaacacaaaaaatctccaaggagcaataagatcaaattatattttattctattaaaaaatgtttttgaaaaaagatacttaaattttaaagataacttaattcctaatgatttaaaataatccaagcagagatgaaagag

SEQ ID NO: 285502 - DNA, 2744 bp, Homo sapiens
ctttggcctgccatctcccaagggcaaacctcacaactcaggcccaagtcacaggaatctgaatggtggggtgaccttctcctctagtttaatttcattgcaatactgagaaacttcaactgttttgtctttagaagggaaattcatgtttgtgccaggccagcctttgtaaaagcctttgattggattcactagaagtctgtcttcccgcagtacatatactgtgaattttctccttcggcatttcaaccacttggaatggccactaaagtggcttttgatctaaagtaaactctgattctgtgttgatggggaaccatttctctctaacatggtggtttctttaagatgtttgacttgggccacatgagaataacagatctttgggcagtccaagcaagagcctcctgatctagcagccaagactccccctgacctttggccatgtaccccaaccctctcatctactgcacctgctgggacccctggaacttgggaccacggaagctaatcaagacccctcaactaccacgcaagaactccacagggagttccaagctaactcctcttctaccagctccaaaaaatcacaattacctccaaccaacaaaacctgttgtttccccaaaaatgaaaatccattcagcaaggcaagaagagactaataaatcattttatgaagtgatcaacgtgtcacctggctatcaacttgttcggaatcgggaacagatttctgtcaccttaggggatgagatgtttgataggaaaaagcggtgggaatcggagatcccggacaaaggcagattttccaggaccaacatcatttctgacctagaagagcaaatctcagagctgacagcaataattgaacaaatgaacagagaccaccagtctgcccagaaattgctctccagtgaaatggatctccgctgtgctgagatgaaacagaactttgaaaacaagaacagaggagatgggaaaagaatacaagtatttgaagaatatgtttcgtacgtatcaggacagtatttatgatgaaatggaagagaagtggtcaaaacagaaggcgaaatggaagaaggatgagaagttcgagcgagaaaatatcctgctacagcaaaaaaaaaagatgaccaaaaaattcgaaatggagtcaggagaagaagataagaaaataaatgaatcctgcagtgctgtctttgagaacttcattcaagagaaggaggagctcttgaaacaacatcaaagtgacaccttgcaattagaagagctgagaaaaaccaaagaggtgccctggagaagagaccaaataaatagacattggcatgatgtcctgcaacagcttcttcttatgcaggtcatgcaggaagaattgcatgcacaagcccttatcctagagtcactgaacacaaacctctactatacccagttggaactccagaaagagaaagctatagtgggaaatctggagaaaatgcttcaaaccaagtttgctgaaactgaagaaaagtataagcacaccatacagatcctgacggaagagaacattcatctgaagcaaaagataatttctaagaatgaagaaatttgtgaaggatgttctgggagattggcctctattactgtttctaaggatgattctgacactgtgcaagatggtagcaagaaaggacaagaatcataaacaaaaagttgctctgcattgttgaagatggttggcacaccatttctgtaggcccaggaaactcctgggagggttttcttgagaaaatgcatataatgagtttagttcttgggttgctctgactctctgaatgtctgaaaatgtttgaattctcatctgaatttcacagcttatcacggactcttcactgaaaaatgatgctctccatactgggagctgagctttctctgagttttgtactatttttcttctaccttgacgtatttcgttagaaagaaactgatttgaaggccttcttcatattgaacttttactatatttgggaggtgtacctttgtcccctggggcatttaggtagcaaaaaaagatgatgtgttgattttaactctaaaatatttttctctcacacccatgccccctacttccctacctctcaatcatgttccctaacctatgacttaggaagggtttctgatgattcttaccacctcctctggaccatcaccagaattcagacacccacagtgcaggcaacataaataagtgaagtgggctagacataaggaaaacaattgcccaagcacagtgataagtggcaaccaacagcagcctcagtagaggggcttgggcagggctggggcacagcggatggggaagagtgacccacagagcactgtcccatctgaagaaggtgcttctcagacctttgccatgcaaaagcatgaggtcaatattgtcagatagtatgattttttaaaagaagttattctggtttttatgtgatatctcctaatttttaaacattgacaacaaattttaaaaatacaactgtgtgtgccgatcatgggagactcaagtagaacatgtctgtagtccagatgttttccacctgtgagatgtcattggcagaaaccaaaaccaaacacaaaaaatctccaaggagcaataagatcaaattatattttattctattaaaaaatgtttttgaaaaaagatacttaaattttaaagataacttaattcctaatgatttaaaataatccaagcagagatgaaagag

SEQ ID NO: 285503 - DNA, 2565 bp, Homo sapiens
ctttggcctgccatctcccaagggcaaacctcacaactcaggcccaagtcacaggaatctgaatggtggggtgaccttctcctctagtttaatttcattgcaatactgagaaacttcaactgttttgtctttagaagggaaattcatgtttgtgccaggccagcctttgtaaaagcctttgattggattcactagaagtctgtcttcccgcagtacatatactgtgaattttctccttcggcatttcaaccacttggaatggccactaaagtggcttttgatctaaagtaaactctgattctgtgttgatggggaaccatttctctctaacatggtggtttctttaagatgtttgacttgggccacatgagaataacagatctttgggcagtccaagcaagagcctcctgatctagcagccaagactccccctgacctttggccatgtaccccaaccctctcatctactgcacctgctgggacccctggaacttgggaccacggaagctaatcaagacccctcaactaccacgcaagaactccacagggagttccaagctaactcctcttctaccagctccaaaaaatcacaattacctccaaccaacaaaacctgttgtttccccaaaaatgaaaatccattcagcaaggcaagaagagactaataaatcattttatgaagtgatcaacgtgtcacctggctatcaacttgttcggaatcgggaacagatttctgtcaccttaggggatgagatgtttgataggaaaaagcggtgggaatcggagatcccggacaaaggcagattttccaggaccaacatcatttctgacctagaagagcaaatctcagagctgacagcaataattgaacaaatgaacagagaccaccagtctgcccagaaattgctctccagtgaaatggatctccgctgtgctgagatgaaacagaactttgaaaacaagaacagaggagatgggaaaagaatacaagtatttgaagaatatgtttcgtacgtatcaggacagtatttatgatgaaatggaagagaagtggtcaaaacagaaggcgaaatggaagaaggatgagaagttcgagcgagaaaatatcctgctacagcaaaaaaaaaagatgaccaaaaaattcgaaatggagtcaggagaagaagataagaaaataaatgaatcctgcagtgctgtctttgagaacttcattcaagagaaggaggagctcttgaaacaacatcaaagtgacaccttgcaattagaagagctgagaaaaaccaaagaggtcatgcaggaagaattgcatgcacaagcccttatcctagagtcactgaacacaaacctctactatacccagttggaactccagaaagaggcaaaagataatttctaagaatgaagaaatttgtgaaggatgttctgggagattggcctctattactgtttctaaggatgattctgacactgtgcaagatggtagcaagaaaggacaagaatcataaacaaaaagttgctctgcattgttgaagatggttggcacaccatttctgtaggcccaggaaactcctgggagggttttcttgagaaaatgcatataatgagtttagttcttgggttgctctgactctctgaatgtctgaaaatgtttgaattctcatctgaatttcacagcttatcacggactcttcactgaaaaatgatgctctccatactgggagctgagctttctctgagttttgtactatttttcttctaccttgacgtatttcgttagaaagaaactgatttgaaggccttcttcatattgaacttttactatatttgggaggtgtacctttgtcccctggggcatttaggtagcaaaaaaagatgatgtgttgattttaactctaaaatatttttctctcacacccatgccccctacttccctacctctcaatcatgttccctaacctatgacttaggaagggtttctgatgattcttaccacctcctctggaccatcaccagaattcagacacccacagtgcaggcaacataaataagtgaagtgggctagacataaggaaaacaattgcccaagcacagtgataagtggcaaccaacagcagcctcagtagaggggcttgggcagggctggggcacagcggatggggaagagtgacccacagagcactgtcccatctgaagaaggtgcttctcagacctttgccatgcaaaagcatgaggtcaatattgtcagatagtatgattttttaaaagaagttattctggtttttatgtgatatctcctaatttttaaacattgacaacaaattttaaaaatacaactgtgtgtgccgatcatgggagactcaagtagaacatgtctgtagtccagatgttttccacctgtgagatgtcattggcagaaaccaaaaccaaacacaaaaaatctccaaggagcaataagatcaaattatattttattctattaaaaaatgtttttgaaaaaagatacttaaattttaaagataacttaattcctaatgatttaaaataatccaagcagagatgaaagag

SEQ ID NO: 285504 - DNA, 2686 bp, Homo sapiens
ctttggcctgccatctcccaagggcaaacctcacaactcaggcccaagtcacaggaatctgaatggtggggtgaccttctcctctagtttaatttcattgcaatactgagaaacttcaactgttttgtctttagaagggaaattcatgtttgtgccaggccagcctttgtaaaagcctttgattggattcactagaagtctgtcttcccgcagtacatatactgtgaattttctccttcggcatttcaaccacttggaatggccactaaagtggcttttgatctaaagtaaactctgattctgtgttgatggggaaccatttctctctaacatggtggtttctttaagatgtttgacttgggccacatgagaataacagatctttgggcagtccaagcaagagcctcctgatctagcagccaagactccccctgacctttggccatgtaccccaaccctctcatctactgcacctgctgggacccctggaacttgggaccacggaagctaatcaagacccctcaactaccacgcaagaactccacagggagttccaagctaactcctcttctaccagctccaaaaaatcacaattacctccaaccaacaaaacctgttgtttccccaaaaatgaaaatccattcagcaaggcaagaagagactaataaatcattttatgaagtgatcaacgtgtcacctggctatcaacttgttcggaatcgggaacagatttctgtcaccttaggggatgagatgtttgataggaaaaagcggtgggaatcggagatcccggacaaaggcagattttccagggagctcaaagaggcccatgaagcagaactcagtgagttggagaacaactacaaagcagccttgaaggcagagaagttggctgcccaagagaagctagaggagatgggaaaagaatacaagtatttgaagaatatgtttcgtacgtatcaggacagtatttatgatgaaatggaagagaagtggtcaaaacagaaggcgaaatggaagaaggatgagaagttcgagcgagaaaatatcctgctacagcaaaaaaaaaagatgaccaaaaaattcgaaatggagtcaggagaagaagataagaaaataaatgaatcctgcagtgctgtctttgagaacttcattcaagagaaggaggagctcttgaaacaacatcaaagtgacaccttgcaattagaagagctgagaaaaaccaaagaggtgccctggagaagagaccaaataaatagacattggcatgatgtcctgcaacagcttcttcttatgcaggtcatgcaggaagaattgcatgcacaagcccttatcctagagtcactgaacacaaacctctactatacccagttggaactccagaaagagaaagctatagtgggaaatctggagaaaatgcttcaaaccaagtttgctgaaactgaagaaaagtataagcacaccatacagatcctgacggaagagaacattcatctgaagcaaaagataatttctaagaatgaagaaatttgtgaaggatgttctgggagattggcctctattactgtttctaaggatgattctgacactgtgcaagatggtagcaagaaaggacaagaatcataaacaaaaagttgctctgcattgttgaagatggttggcacaccatttctgtaggcccaggaaactcctgggagggttttcttgagaaaatgcatataatgagtttagttcttgggttgctctgactctctgaatgtctgaaaatgtttgaattctcatctgaatttcacagcttatcacggactcttcactgaaaaatgatgctctccatactgggagctgagctttctctgagttttgtactatttttcttctaccttgacgtatttcgttagaaagaaactgatttgaaggccttcttcatattgaacttttactatatttgggaggtgtacctttgtcccctggggcatttaggtagcaaaaaaagatgatgtgttgattttaactctaaaatatttttctctcacacccatgccccctacttccctacctctcaatcatgttccctaacctatgacttaggaagggtttctgatgattcttaccacctcctctggaccatcaccagaattcagacacccacagtgcaggcaacataaataagtgaagtgggctagacataaggaaaacaattgcccaagcacagtgataagtggcaaccaacagcagcctcagtagaggggcttgggcagggctggggcacagcggatggggaagagtgacccacagagcactgtcccatctgaagaaggtgcttctcagacctttgccatgcaaaagcatgaggtcaatattgtcagatagtatgattttttaaaagaagttattctggtttttatgtgatatctcctaatttttaaacattgacaacaaattttaaaaatacaactgtgtgtgccgatcatgggagactcaagtagaacatgtctgtagtccagatgttttccacctgtgagatgtcattggcagaaaccaaaaccaaacacaaaaaatctccaaggagcaataagatcaaattatattttattctattaaaaaatgtttttgaaaaaagatacttaaattttaaagataacttaattcctaatgatttaaaataatccaagcagagatgaaagag

SEQ ID NO: 285505 - DNA, 392 bp, Homo sapiens
ttgacattgatacatctttcctttctttttacaggcaaaagataatttctaagaatgaagaaatttgtgaaggatgttctgggagattggcctctattactgtttctaaggatgattctgacactgtgcaagatggtagcaagaaaggacaagaatcataaacaaaaagttgctctgcattgttgaagatggttggcacaccatttctgtaggcccaggaaactcctgggagggttttcttgagaaaatgcatataatgagtttagttcttgggttgctctgactctctgaatgtctgaaaatgtttgaattctcatctgaatttcacagcttatcacggactcttcactgaaaaatgatgctctccatactgggagctgagctttctctga

SEQ ID NO: 285506 - DNA, 339 bp, Homo sapiens
tcctggattcaagcgattctcgtgcctctgcttctcgagtagctgggactacagctcaaaaaatgacaagcttgccattaatgcgtgccattctgggaataaacaggaagttaacagagttttcctttatactgaggaaaactaagaaataaggaactacaagaaatcagttttacctcttcagaataaaaattgctgactcatcctgagtaaaaggagatttggcttttaattctaacttactaactgtggtttcaactgtctaaggtttatacttaccaggaagatgacgaatatccttaataaaatgttttcttttcggctgcatcacaacactat

SEQ ID NO: 285507 - DNA, 902 bp, Homo sapiens
ggggcttggttgaacggactcaccaggaaacgtgactttcgtgtccgacctctgctgtatcaggattcgattcttggtgttaaacaagacaacgctgaaggctcggtgcagcagccctgcaaaggagtggagccccaacccacgcagggcgtgtcttcatggcttttcctggccaatctgataccaagatgcagtggccagaagtacctgcacttccactcctgtcaagtctctgcatggctatggtgaggaagagctctgcactgggcaaggaagttggccgtcgagtgaaggaaatggtgatgctggtggcccctttccggcagtcaagttccctatcaaggacattcagttctcggaaagtggtgaaggcacacgcttccctgcatggtgcccgcctctctccactctctagaaatattagaggctaggctgctgctgtatgtcagggctagtccctcttctatgaatccagaataactctgaagaagccgagtaacaggcatgaagtgaagagaaatcgctgtaacaggaagacagcaaagcagatgctaatgaccacactatttaacgaactggaaccaacgagaaaatacggtattactgaagactgcacttccttgaacagagtgctcttctcagcaaatcggaaatgcctacacaaatcgctttacaagaaagactgtttcaaagcagcacctttctcaatgttctcgttcaggtgacaattcttcttggtctcagctccaattttattgtcattttcatcaataaggatacacatctctgccaggagttgaacctgttgcttgtcgaggtggttagtgtttatttcaggcatcattacaaaatgtctgatctgttctagaaccctaatattaaaggaaaagagaaagaaaggc

SEQ ID NO: 285508 - DNA, 1339 bp, Homo sapiens
ggggcttggttgaacggactcaccaggaaacgtgactttcgtgtccgacctctgctgtatcaggattcgattcttggtgttaaacaagacaacgctgaaggctcggtgcagcagccctgcaaaggtttttccagcgctcttgggaggtgggctgtgccactgcctggcccacctggcccacctggcccaccattacctgaagggaagcatgaacagcctttgacgtgggagtggcgactgctgagagggaactgtctgtacacaagcaatgtagccttatgggacctgagtggagccccaacccacgcagggcgtgtcttcatggcttttcctggccaatctgataccaagatgcagtggccagaagtacctgcacttccactcctgtcaagtctctgcatggctatggtgaggaagagctctgcactgggcaaggaagttggccgtcgagtgaaggaaatggtgatgctggtggcccctttccggcagtcaagttccctatcaaggacattcagttctcggaaagtggtgaaggcacacgcttccctgcatggtgcccgcctctctccactctctagaaatattagaggctaggctgctgctgtatgtcagggctagtccctcttctatgaatccagaataactctgaagaagccgagtaacaggcatgaagtgaagagaaatcgctgtaacaggaagacagcaaagcagatgctaatgaccacactatttaacgaactggaaccaacgagaaaatacggtattactgaagactgcacttccttgaacagagtgctcttctcagcaaatcggaaatgcctacacaaatcgctttacaagaaagactgtttcaaagcagcacctttctcaatgttctcgttcaggtgacaattcttcttggtctcagctccaattttattgtcattttcatcaataaggatacacatctctgccaggagttgaacctgttgcttgtcgaggtggttagtgtttatttcaggcatcattacaaaatgtctgatctgttctagaaccctaatattaaaggaaaagagaaagaaaggcaaaaaaaaaaaaacaaaaaaaaaaaaacaaaaacaaaacaaaacaacaacaaacacaaataaaaaataattaaacaaatcacacaaacaaataactacccaatcattaaatcaaacaaatacaatacacatcaccctatgcattgtcacatacatacaaatggtagcggtcacgactttccttacttcctgacacatacagcaccacacatccaccacacatcatcttctcttcctacggaatccactatcattttattatgttatacattgcc

SEQ ID NO: 285509 - DNA, 1122 bp, Homo sapiens
ggggcttggttgaacggactcaccaggaaacgtgactttcgtgtccgacctctgctgtatcaggattcgattcttggtgttaaacaagacaacgctgaaggctcggtgcagcagccctgcaaaggagtggagccccaacccacgcagggcgtgtcttcatggcttttcctggccaatctgataccaagatgcagtggccagaagtacctgcacttccactcctgtcaagtctctgcatggctatggtgaggaagagctctgcactgggcaaggaagttggccgtcgagtgaaggaaatggtgatgctggtggcccctttccggcagtcaagttccctatcaaggacattcagttctcggaaagtggtgaaggcacacgcttccctgcatggtgcccgcctctctccactctctagaaatattagaggctaggctgctgctgtatgtcagggctagtccctcttctatgaatccagaataactctgaagaagccgagtaacaggcatgaagtgaagagaaatcgctgtaacaggaagacagcaaagcagatgctaatgaccacactatttaacgaactggaaccaacgagaaatcggaaatgcctacacaaatcgctttacaagaaagactgtttcaaagcagcacctttctcaatgttctcgttcaggtgacaattcttcttggtctcagctccaattttattgtcattttcatcaataaggatacacatctctgccaggagttgaacctgttgcttgtcgaggtggttagtgtttatttcaggcatcattacaaaatgtctgatctgttctagaaccctaatattaaaggaaaagagaaagaaaggcaaaaaaaaaaaaacaaaaaaaaaaaaacaaaaacaaaacaaaacaacaacaaacacaaataaaaaataattaaacaaatcacacaaacaaataactacccaatcattaaatcaaacaaatacaatacacatcaccctatgcattgtcacatacatacaaatggtagcggtcacgactttccttacttcctgacacatacagcaccacacatccaccacacatcatcttctcttcctacggaatccactatcattttattatgttatacattgcc

SEQ ID NO: 285510 - DNA, 1472 bp, Homo sapiens
ggggcttggttgaacggactcaccaggaaacgtgactttcgtgtccgacctctgctgtatcaggattcgattcttggtgttaaacaagacaacgctgaaggctcggtgcagcagccctgcaaagctttgtgtcttaggtttcagcgtgctgacgttctctgggccctgaagtcactgctgctggctggtgtgctggccacttggtcgtgctggcctgtctcccaccgggtggatgcccagcgagctctggatgctgtgtttttccagcgctcttgggaggtgggctgtgccactgcctggcccacctggcccacctggcccaccattacctgaagggaagcatgaacagcctttgacgtgggagtggcgactgctgagagggaactgtctgtacacaagcaatgtagccttatgggacctgagtggagccccaacccacgcagggcgtgtcttcatggcttttcctggccaatctgataccaagatgcagtggccagaagtacctgcacttccactcctgtcaagtctctgcatggctatggtgaggaagagctctgcactgggcaaggaagttggccgtcgagtgaaggaaatggtgatgctggtggcccctttccggcagtcaagttccctatcaaggacattcagttctcggaaagtggtgaaggcacacgcttccctgcatggtgcccgcctctctccactctctagaaatattagaggctaggctgctgctgtatgtcagggctagtccctcttctatgaatccagaataactctgaagaagccgagtaacaggcatgaagtgaagagaaatcgctgtaacaggaagacagcaaagcagatgctaatgaccacactatttaacgaactggaaccaacgagaaaatacggtattactgaagactgcacttccttgaacagagtgctcttctcagcaaatcggaaatgcctacacaaatcgctttacaagaaagactgtttcaaagcagcacctttctcaatgttctcgttcaggtgacaattcttcttggtctcagctccaattttattgtcattttcatcaataaggatacacatctctgccaggagttgaacctgttgcttgtcgaggtggttagtgtttatttcaggcatcattacaaaatgtctgatctgttctagaaccctaatattaaaggaaaagagaaagaaaggcaaaaaaaaaaaaacaaaaaaaaaaaaacaaaaacaaaacaaaacaacaacaaacacaaataaaaaataattaaacaaatcacacaaacaaataactacccaatcattaaatcaaacaaatacaatacacatcaccctatgcattgtcacatacatacaaatggtagcggtcacgactttccttacttcctgacacatacagcaccacacatccaccacacatcatcttctcttcctacggaatccactatcattttattatgttatacattgcc

SEQ ID NO: 285511 - DNA, 1556 bp, Homo sapiens
ggggcttggttgaacggactcaccaggaaacgtgactttcgtgtccgacctctgctgtatcaggattcgattcttggtgttaaacaagacaacgctgaaggctcggtgcagcagccctgcaaagctttgtgtcttaggtttcagcgtgctgacgttctctgggccctgaagtcactgctgctggctggtgtgctggccacttggtcgtgctggcctgtctcccaccgggtggatgcccagcgagctctggatgctgtgtatgacaaagacatgggggttgtttggagtctgtgatgtgctattgtcctccacataatggttttctgcaagaaactagagaagtttttccagcgctcttgggaggtgggctgtgccactgcctggcccacctggcccacctggcccaccattacctgaagggaagcatgaacagcctttgacgtgggagtggcgactgctgagagggaactgtctgtacacaagcaatgtagccttatgggacctgagtggagccccaacccacgcagggcgtgtcttcatggcttttcctggccaatctgataccaagatgcagtggccagaagtacctgcacttccactcctgtcaagtctctgcatggctatggtgaggaagagctctgcactgggcaaggaagttggccgtcgagtgaaggaaatggtgatgctggtggcccctttccggcagtcaagttccctatcaaggacattcagttctcggaaagtggtgaaggcacacgcttccctgcatggtgcccgcctctctccactctctagaaatattagaggctaggctgctgctgtatgtcagggctagtccctcttctatgaatccagaataactctgaagaagccgagtaacaggcatgaagtgaagagaaatcgctgtaacaggaagacagcaaagcagatgctaatgaccacactatttaacgaactggaaccaacgagaaaatacggtattactgaagactgcacttccttgaacagagtgctcttctcagcaaatcggaaatgcctacacaaatcgctttacaagaaagactgtttcaaagcagcacctttctcaatgttctcgttcaggtgacaattcttcttggtctcagctccaattttattgtcattttcatcaataaggatacacatctctgccaggagttgaacctgttgcttgtcgaggtggttagtgtttatttcaggcatcattacaaaatgtctgatctgttctagaaccctaatattaaaggaaaagagaaagaaaggcaaaaaaaaaaaaacaaaaaaaaaaaaacaaaaacaaaacaaaacaacaacaaacacaaataaaaaataattaaacaaatcacacaaacaaataactacccaatcattaaatcaaacaaatacaatacacatcaccctatgcattgtcacatacatacaaatggtagcggtcacgactttccttacttcctgacacatacagcaccacacatccaccacacatcatcttctcttcctacggaatccactatcattttattatgttatacattgcc

SEQ ID NO: 285512 - DNA, 891 bp, Homo sapiens
  misc_feature (246)..(246): n is a, c, g, or t
  misc_feature (352)..(352): n is a, c, g, or t
gtcatactctttagtcggtccaggacgtgcgtgggccttgcttggtgttttttggggccgcgatgcgttcggcgcggtgcctccagatagatgcgtgtcttgtgtcccggagagttgttgggtgcgttcgggtgagggtttggtgttcatgccgcttgcgtgagggttagccaggtattcgacgttggtttctgtagaagttgccagggatgttgatgccttcacagcgtacgaccagcaccttcncggcccagcagtacctgttagccacggatggccgccgacgacttctgcaaagtgcatctcgttccagtacccgtcggccaccgccaccacgcgctcgttgtgggancggcacagggagttgatgtcggtggccgacgacttctgcaaagtgcatctcttccagtacccgtgcgctcgtgccaaggcgccgagccgcatgtacgggggccacggcagccacgtgaccagcgtccgattcacgcacgacgactcgcacctcgtctcgctgggcggcaaggacgccagcatcttccagtggcgagtgctgggcgctgggggcgcggggccggcgcccgccacgccctctcgaaccccctccctgtcccccgcctcctccctcgacgtttgatcgctgcctggcgggaccgactggcccggcggcgtggccccgccccgccctgcccttccctggcccaatcccccacgactaggggccgactctttcctggactgacttcgagacattcccgatcgcgcattttcctggagggcgcgaacggcgcccctgcacacactgtttagacccgctggctgagccgggcagccccagcctaggccttgactcccgctgcctgctgaggggcaataaaccagaaccaaagtcgc

SEQ ID NO: 285513 - DNA, 1050 bp, Homo sapiens
ggacgcgtgggtcgacccacgcgtcaaatacaagaaacccaagtttatcccttgctttgtgttccttccggatggagacattctcactggagactcagaggggaacattctcacctgggggcggagcccttcagattccaagaccccaggcaggggtggcgccaaagagacctatgggattgtggcccaggctcacgctcatgaaggttctatcttcgccttgtgtctccggagggacgggacagtgctgagtggtggcgggcgggaccgccggctggtacagtgggggcccgggttggtggccctccaggaggctgagattcccgagcacttcggggccgtgcgagccattgctgaagggcttggctctgagctgctggtgggaaccacgaagaatgcattgctgaggggagacctggcccagggcttctcccctgtaatccagggccacactgatgagctctgggggctctgcacacacccctcccagaaccgcttcctcacctgcggccacgaccggcagctctgcctgtgggatggggagagccatgcactggcctggagcatcgacctcaaggagactggtctctgtgctgacttccacccgagtggggcagttgtggccgtaggactgaacacggggaggtgagagagagccaggactcccaggagggaaagcagggaggactgggaagggttcctggtactgggggagtgggcgagagtgaccacctctacccaggagccacctgcgccttggcactcctctgtgcctctccctgcagcccctgccacccgggctcccctcctcttctgtggtaactgtttctccccctcccccaacccagtgtctcctccaagcctgggagtggaggaggcagcagcccaggatagagaaacagtgggaatgggaggggcatagacaaacacagggaagtgacaggcttccagcttgcacagtgcctttgtagtcggcccctggtctgtagtttcagattactttttcagacgacatcagaagcccctcagcctttatccacacttagctcc

SEQ ID NO: 285514 - DNA, 830 bp, Homo sapiens
  misc_feature (11)..(12): n is a, c, g, or t
  misc_feature (14)..(14): n is a, c, g, or t
ggaagaaaagnngnaaactatactggctaggtacgaggctgggtgttacaagggggtcctggaggtggcggccagagacattaccgggggcacacagactgcgttcgatgccttgctgttcaccctgatggtgttcgggtagcctcgggacagacagctggagtggataaggatggaaagcccctgcagcctgtggttcacatctgggactcagagacgctgttgaaactgcaggagattggactgggggccttcgagcggggtgttggggccctggccttttcagctgcggaatccaagggttggcctttccttttggtgtgggtggatgattccaaatgagcacattgctgtcggttggtggggaactgccaggcccgggggggaaattgaaaagcttgggccttgaagaattccaaagaaggttacaaaaatttgagcttcaagttccttgggcccgttttggggctttccaaaccccctcgttggacagcaagtcttgcatccggttctacccaagttgtgggacaaattcttcaactgttcacaactttcttgggacattttggggaagcttggggttggaaggttaggggggggttcctccttggggggacaccttgtggggaacccccttttaacgccactggtggaaagaccaaggtggggcttggtccttttttgggcgaacacacttaccaaatggaaagaccccgccaaaagtttttaatcccctttggcgcttttggttgggttcccgttttccctgtgacttgggactgcaaccaatttccttcaaccttggcaggaagctcaagacggggggcgaa

SEQ ID NO: 285515 - DNA, 3045 bp, Homo sapiens
cgccccggggtgcttccccttcccctctccccggccgtggcccccgcggcttagacgcctcctccgccgccgccgctcggagcaacccgggggccggatggacggggccgcggggcccggtgacggccctgctcgggaggccctccagtctctgagccagcggcttcgggtgcaggagcaggagatggaactggtaaaggcagccctggcagaagcccttcgcctgctgcggctgcaggtgcccccttcctccctgcagggctctggcacaccagctcctccgggggacagtcttgcagcccccccgggactgccacccacgtgcaccccttccttggtgagccgaggcacccagacggagacagaggtggagctcaagtcatcccctggaccccctggcctgagcaatggacccccagcccctcagggggccagcgaagagcctagtgggacccaatctgaaggagggggcagcagcagcagtggtgctggctcccctggccccccggggatcctcaggcccttgcagcccccacagcgtgctgacacgccgcgaagaaattcttcctcctcctcatccccctcagagcggcctcggcagaagctctccaggaaggcaatctcctccgccaacctgttagtgcggtccgggagcacagagagccgtgggggaaaagaccccctctccagccctgggggccctggatctcggaggagcaattacaatttggaaggcatctcagtgaagatgttccttcgagggcgccccattaccatgtacatcccgtctggcatccgcagccttgaggagctgccgagtggcccaccgccagagaccctcagccttgactgggtttatgggtacaggggtcgtgactcccgctctaatctgtttgtgttgcgctctggggaggtggtctactttatcgcctgtgtggtggtgctgtaccggcctggaggaggcccagggggtcctggaggtggcggccagagacattaccgggggcacacagactgcgttcgatgccttgctgttcaccctgatggtgttcgggtagcctcgggacagacagctggagtggataaggatggaaagcccctgcagcctgtggttcacatctgggactcagagacgctgttgaaactgcaggagattggactgggggccttcgagcggggtgttggggccctggccttttcagctgcggatcagggtgcctttctttgtgtggtggatgattccaatgagcacatgctgtcggtgtgggactgcagccggggaatgaagctggctgagatcaagagtacaaatgactcagtcctggccgttggcttcaaccctcgtgacagcagctgcatcgtcaccagtgggaaatctcacgtccacttctggaattggagtggtggagtaggggttcctgggaatgggacccttacccggaaacagggtgtctttgggaaatacaagaaacccaagtttatcccttgctttgtgttccttccggatggagacattctcactggagactcagaggggaacattctcacctgggggcggagcccttcagattccaagaccccaggcaggggtggcgccaaagagacctatgggattgtggcccaggctcacgctcatgaaggttctatcttcgccttgtgtctccggagggacgggacagtgctgagtggtggcgggcgggaccgccggctggtacagtgggggcccgggttggtggccctccaggaggctgagattcccgagcacttcggggccgtgcgagccattgctgaagggcttggctctgagctgctggtgggaaccacgaagaatgcattgctgaggggagacctggcccagggcttctcccctgtaatccagggccacactgatgagctctgggggctctgcacacacccctcccagaaccgcttcctcacctgcggccacgaccggcagctctgcctgtgggatggggagagccatgcactggcctggagcatcgacctcaaggagactggtctctgtgctgacttccacccgagtggggcagttgtggccgtaggactgaacacggggaggtggttggttttggacacagagaccagagagatcgtgtctgatgtcattgatggcaatgagcagctctcagtggtccggtacagcccagatgggttgtacctggccattggttcccatgacaacgtgatctacatctatagtgtttccagtgatggtgccaaatccagccgctttggccgctgtatgggtcactccagcttcatcactcatcttgactggtccaaggatgggaatttcatcatgtccaattctggggactatgagattctttactgggacgtggctggaggctgcaagcagctgaagaatcgctatgagagccgagaccgggaatgggctacctacacctgtgtgctgggctttcacgtctacggcgtctggccggacggctccgatgggaccgacatcaactccctgtgccgctcccacaacgagcgcgtggtggcggtggccgacgacttctgcaaagtgcatctcttccagtacccgtgcgctcgtgccaaggcgccgagccgcatgtacgggggccacggcagccacgtgaccagcgtccgattcacgcacgacgactcgcacctcgtctcgctgggcggcaaggacgccagcatcttccagtggcgagtgctgggcgctgggggcgcggggccggcgcccgccacgccctctcgaaccccctccctgtcccccgcctcctccctcgacgtttgatcgctgcctggcgggaccgactggcccggcggcgtggccccgccccgccctgcccttccctggcccaatcccccacgactaggggccgactctttcctggactgacttcgagacattcccgatcgcgcattttcctggagggcgcgaacggcgcccctgcacacactgtttagacccgctggctgagccgggcagccccagcctaggccttgactcccgctgcctgctgaggggcaataaaccagaaccaaagtcgc

SEQ ID NO: 285516 - DNA, 2120 bp, Homo sapiens
agcggcagtatctggcggtttaaggtacgaggctgggtggcagggggtcctggaggtggcggccagagacattaccgggggcacacagactgcgttcgatgccttgctgttcaccctgatggtgttcgggtagcctcgggacagacagctggagtggataaggatggaaagcccctgcagcctgtggttcacatctgggactcagagacgctgttgaaactgcaggagattggactgggggccttcgagcggggtgttggggccctggccttttcagctgcggatcagggtgcctttctttgtgtggtggatgattccaatgagcacatgctgtcggtgtgggactgcagccggggaatgaagctggctgagatcaagagtacaaatgactcagtcctggccgttggcttcaaccctcgtgacagcagctgcatcgtcaccagtgggaaatctcacgtccacttctggaattggagtggtggagtaggggttcctgggaatgggacccttacccggaaacagggtgtctttgggaaatacaagaaacccaagtttatcccttgctttgtgttccttccggatggagacattctcactggagactcagaggggaacattctcacctgggggcggagcccttcagattccaagaccccaggcaggggtggcgccaaagagacctatgggattgtggcccaggctcacgctcatgaaggttctatcttcgccttgtgtctccggagggacgggacagtgctgagtggtggcgggcgggaccgccggctggtacagtgggggcccgggttggtggccctccaggaggctgagattcccgagcacttcggggccgtgcgagccattgctgaagggcttggctctgagctgctggtgggaaccacgaagaatgcattgctgaggggagacctggcccagggcttctcccctgtaatccagggccacactgatgagctctgggggctctgcacacacccctcccagaaccgcttcctcacctgcggccacgaccggcagctctgcctgtgggatggggagagccatgcactggcctggagcatcgacctcaaggagactggtctctgtgctgacttccacccgagtggggcagttgtggccgtaggactgaacacggggaggtggttggttttggacacagagaccagagagatcgtgtctgatgtcattgatggcaatgagcagctctcagtggtccggtacagcccagatgggttgtacctggccattggttcccatgacaacgtgatctacatctatagtgtttccagtgatggtgccaaatccagccgctttggccgctgtatgggtcactccagcttcatcactcatcttgactggtccaaggatgggaatttcatcatgtccaattctggggactatgagattctttactgggacgtggctggaggctgcaagcagctgaagaatcgctatgagagccgagaccgggaatgggctacctacacctgtgtgctgggctttcacgtctacggcgtctggccggacggctccgatgggaccgacatcaactccctgtgccgctcccacaacgagcgcgtggtggcggtggccgacgacttctgcaaagtgcatctcttccagtacccgtgcgctcgtgccaaggcgccgagccgcatgtacgggggccacggcagccacgtgaccagcgtccgattcacgcacgacgactcgcacctcgtctcgctgggcggcaaggacgccagcatcttccagtggcgagtgctgggcgctgggggcgcggggccggcgcccgccacgccctctcgaaccccctccctgtcccccgcctcctccctcgacgtttgatcgctgcctggcgggaccgactggcccggcggcgtggccccgccccgccctgcccttccctggcccaatcccccacgactaggggccgactctttcctggactgacttcgagacattcccgatcgcgcattttcctggagggcgcgaacggcgcccctgcacacactgtttagacccgctggctgagccgggcagccccagcctaggccttgactcccgctgcctgctgaggggcaataaaccagaaccaaagtcgc

SEQ ID NO: 285517 - DNA, 2615 bp, Homo sapiens
ctcggcaccgttgaagcgtagtaccaatctgaaggagggggcagcagcagcagtggtgctggctcccctggccccccggggatcctcaggcccttgcagcccccacagcgtgctgacacgccgcgaagaaattcttcctcctcctcatccccctcagagcggcctcggcagaagctctccaggaaggcaatctcctccgccaacctgttagtgcggtccgggagcacagagagccgtgggggaaaagaccccctctccagccctgggggccctggatctcggaggagcaattacaatttggaaggcatctcagtgaagatgttccttcgagggcgccccattaccatgtacatcccgtctggcatccgcagccttgaggagctgccgagtggcccaccgccagagaccctcagccttgactgggtttatgggtacaggggtcgtgactcccgctctaatctgtttgtgttgcgctctggggaggtggtctactttatcgcctgtgtggtggtgctgtaccggcctggaggaggcccagggggtcctggaggtggcggccagagacattaccgggggcacacagactgcgttcgatgccttgctgttcaccctgatggtgttcgggtagcctcgggacagacagctggagtggataaggatggaaagcccctgcagcctgtggttcacatctgggactcagagacgctgttgaaactgcaggagattggactgggggccttcgagcggggtgttggggccctggccttttcagctgcggatcagggtgcctttctttgtgtggtggatgattccaatgagcacatgctgtcggtgtgggactgcagccggggaatgaagctggctgagatcaagagtacaaatgactcagtcctggccgttggcttcaaccctcgtgacagcagctgcatcgtcaccagtgggaaatctcacgtccacttctggaattggagtggtggagtaggggttcctgggaatgggacccttacccggaaacagggtgtctttgggaaatacaagaaacccaagtttatcccttgctttgtgttccttccggatggagacattctcactggagactcagaggggaacattctcacctgggggcggagcccttcagattccaagaccccaggcaggggtggcgccaaagagacctatgggattgtggcccaggctcacgctcatgaaggttctatcttcgccttgtgtctccggagggacgggacagtgctgagtggtggcgggcgggaccgccggctggtacagtgggggcccgggttggtggccctccaggaggctgagattcccgagcacttcggggccgtgcgagccattgctgaagggcttggctctgagctgctggtgggaaccacgaagaatgcattgctgaggggagacctggcccagggcttctcccctgtaatccagggccacactgatgagctctgggggctctgcacacacccctcccagaaccgcttcctcacctgcggccacgaccggcagctctgcctgtgggatggggagagccatgcactggcctggagcatcgacctcaaggagactggtctctgtgctgacttccacccgagtggggcagttgtggccgtaggactgaacacggggaggtggttggttttggacacagagaccagagagatcgtgtctgatgtcattgatggcaatgagcagctctcagtggtccggtacagcccagatgggttgtacctggccattggttcccatgacaacgtgatctacatctatagtgtttccagtgatggtgccaaatccagccgctttggccgctgtatgggtcactccagcttcatcactcatcttgactggtccaaggatgggaatttcatcatgtccaattctggggactatgagattctttactgggacgtggctggaggctgcaagcagctgaagaatcgctatgagagccgagaccgggaatgggctacctacacctgtgtgctgggctttcacgtctacggcgtctggccggacggctccgatgggaccgacatcaactccctgtgccgctcccacaacgagcgcgtggtggcggtggccgacgacttctgcaaagtgcatctcttccagtacccgtgcgctcgtgccaaggcgccgagccgcatgtacgggggccacggcagccacgtgaccagcgtccgattcacgcacgacgactcgcacctcgtctcgctgggcggcaaggacgccagcatcttccagtggcgagtgctgggcgctgggggcgcggggccggcgcccgccacgccctctcgaaccccctccctgtcccccgcctcctccctcgacgtttgatcgctgcctggcgggaccgactggcccggcggcgtggccccgccccgccctgcccttccctggcccaatcccccacgactaggggccgactctttcctggactgacttcgagacattcccgatcgcgcattttcctggagggcgcgaacggcgcccctgcacacactgtttagacccgctggctgagccgggcagccccagcctaggccttgactcccgctgcctgctgaggggcaataaaccagaaccaaagtcgc

SEQ ID NO: 285518 - DNA, 2403 bp, Homo sapiens
tgctttctctcttcccaacagccgtgggggaaaagaccccctctccagccctgggggccctggatctcggaggagcaattacaatttggaaggcatctcagtgaagatgttccttcgagggcgccccattaccatgtacatcccgtctggcatccgcagccttgaggagctgccgagtggcccaccgccagagaccctcagccttgactgggtttatgggtacaggggtcgtgactcccgctctaatctgtttgtgttgcgctctggggaggtggtctactttatcgcctgtgtggtggtgctgtaccggcctggaggaggcccagggggtcctggaggtggcggccagagacattaccgggggcacacagactgcgttcgatgccttgctgttcaccctgatggtgttcgggtagcctcgggacagacagctggagtggataaggatggaaagcccctgcagcctgtggttcacatctgggactcagagacgctgttgaaactgcaggagattggactgggggccttcgagcggggtgttggggccctggccttttcagctgcggatcagggtgcctttctttgtgtggtggatgattccaatgagcacatgctgtcggtgtgggactgcagccggggaatgaagctggctgagatcaagagtacaaatgactcagtcctggccgttggcttcaaccctcgtgacagcagctgcatcgtcaccagtgggaaatctcacgtccacttctggaattggagtggtggagtaggggttcctgggaatgggacccttacccggaaacagggtgtctttgggaaatacaagaaacccaagtttatcccttgctttgtgttccttccggatggagacattctcactggagactcagaggggaacattctcacctgggggcggagcccttcagattccaagaccccaggcaggggtggcgccaaagagacctatgggattgtggcccaggctcacgctcatgaaggttctatcttcgccttgtgtctccggagggacgggacagtgctgagtggtggcgggcgggaccgccggctggtacagtgggggcccgggttggtggccctccaggaggctgagattcccgagcacttcggggccgtgcgagccattgctgaagggcttggctctgagctgctggtgggaaccacgaagaatgcattgctgaggggagacctggcccagggcttctcccctgtaatccagggccacactgatgagctctgggggctctgcacacacccctcccagaaccgcttcctcacctgcggccacgaccggcagctctgcctgtgggatggggagagccatgcactggcctggagcatcgacctcaaggagactggtctctgtgctgacttccacccgagtggggcagttgtggccgtaggactgaacacggggaggtggttggttttggacacagagaccagagagatcgtgtctgatgtcattgatggcaatgagcagctctcagtggtccggtacagcccagatgggttgtacctggccattggttcccatgacaacgtgatctacatctatagtgtttccagtgatggtgccaaatccagccgctttggccgctgtatgggtcactccagcttcatcactcatcttgactggtccaaggatgggaatttcatcatgtccaattctggggactatgagattctttactgggacgtggctggaggctgcaagcagctgaagaatcgctatgagagccgagaccgggaatgggctacctacacctgtgtgctgggctttcacgtctacggcgtctggccggacggctccgatgggaccgacatcaactccctgtgccgctcccacaacgagcgcgtggtggcggtggccgacgacttctgcaaagtgcatctcttccagtacccgtgcgctcgtgccaaggcgccgagccgcatgtacgggggccacggcagccacgtgaccagcgtccgattcacgcacgacgactcgcacctcgtctcgctgggcggcaaggacgccagcatcttccagtggcgagtgctgggcgctgggggcgcggggccggcgcccgccacgccctctcgaaccccctccctgtcccccgcctcctccctcgacgtttgatcgctgcctggcgggaccgactggcccggcggcgtggccccgccccgccctgcccttccctggcccaatcccccacgactaggggccgactctttcctggactgacttcgagacattcccgatcgcgcattttcctggagggcgcgaacggcgcccctgcacacactgtttagacccgctggctgagccgggcagccccagcctaggccttgactcccgctgcctgctgaggggcaataaaccagaaccaaagtcgc

SEQ ID NO: 285519 - DNA, 2125 bp, Homo sapiens
gtggagaagcaaactaggctaggtagcgaggctgggttgtgccagtagggggtcctggaggtggcggccagagacattaccgggggcacacagactgcgttcgatgccttgctgttcaccctgatggtgttcgggtagcctcgggacagacagctggagtggataaggatggaaagcccctgcagcctgtggttcacatctgggactcagagacgctgttgaaactgcaggagattggactgggggccttcgagcggggtgttggggccctggccttttcagctgcggatcagggtgcctttctttgtgtggtggatgattccaatgagcacatgctgtcggtgtgggactgcagccggggaatgaagctggctgagatcaagagtacaaatgactcagtcctggccgttggcttcaaccctcgtgacagcagctgcatcgtcaccagtgggaaatctcacgtccacttctggaattggagtggtggagtaggggttcctgggaatgggacccttacccggaaacagggtgtctttgggaaatacaagaaacccaagtttatcccttgctttgtgttccttccggatggagacattctcactggagactcagaggggaacattctcacctgggggcggagcccttcagattccaagaccccaggcaggggtggcgccaaagagacctatgggattgtggcccaggctcacgctcatgaaggttctatcttcgccttgtgtctccggagggacgggacagtgctgagtggtggcgggcgggaccgccggctggtacagtgggggcccgggttggtggccctccaggaggctgagattcccgagcacttcggggccgtgcgagccattgctgaagggcttggctctgagctgctggtgggaaccacgaagaatgcattgctgaggggagacctggcccagggcttctcccctgtaatccagggccacactgatgagctctgggggctctgcacacacccctcccagaaccgcttcctcacctgcggccacgaccggcagctctgcctgtgggatggggagagccatgcactggcctggagcatcgacctcaaggagactggtctctgtgctgacttccacccgagtggggcagttgtggccgtaggactgaacacggggaggtggttggttttggacacagagaccagagagatcgtgtctgatgtcattgatggcaatgagcagctctcagtggtccggtacagcccagatgggttgtacctggccattggttcccatgacaacgtgatctacatctatagtgtttccagtgatggtgccaaatccagccgctttggccgctgtatgggtcactccagcttcatcactcatcttgactggtccaaggatgggaatttcatcatgtccaattctggggactatgagattctttactgggacgtggctggaggctgcaagcagctgaagaatcgctatgagagccgagaccgggaatgggctacctacacctgtgtgctgggctttcacgtctacggcgtctggccggacggctccgatgggaccgacatcaactccctgtgccgctcccacaacgagcgcgtggtggcggtggccgacgacttctgcaaagtgcatctcttccagtacccgtgcgctcgtgccaaggcgccgagccgcatgtacgggggccacggcagccacgtgaccagcgtccgattcacgcacgacgactcgcacctcgtctcgctgggcggcaaggacgccagcatcttccagtggcgagtgctgggcgctgggggcgcggggccggcgcccgccacgccctctcgaaccccctccctgtcccccgcctcctccctcgacgtttgatcgctgcctggcgggaccgactggcccggcggcgtggccccgccccgccctgcccttccctggcccaatcccccacgactaggggccgactctttcctggactgacttcgagacattcccgatcgcgcattttcctggagggcgcgaacggcgcccctgcacacactgtttagacccgctggctgagccgggcagccccagcctaggccttgactcccgctgcctgctgaggggcaataaaccagaaccaaagtcgc

SEQ ID NO: 285520 - DNA, 3304 bp, Homo sapiens
cgccccggggtgcttccccttcccctctccccggccgtggcccccgcggcttagacgcctcctccgccgccgccgctcggagcaacccgggggccggatggacggggccgcggggcccggtgacggccctgctcgggaggccctccagtctctgagccagcggcttcgggtgcaggagcaggagatggaactggtaaaggcagccctggcagaagcccttcgcctgctgcggctgcaggtgcccccttcctccctgcagggctctggcacaccagctcctccgggggacagtcttgcagcccccccgggactgccacccacgtgcaccccttccttggtgagccgaggcacccagacggagacagaggtggagctcaagtcatcccctggaccccctggcctgagcaatggacccccagcccctcagggggccagcgaagagcctagtgggacccaatctgaaggagggggcagcagcagcagtggtgctggctcccctggccccccggggatcctcaggcccttgcagcccccacagcgtgctgacacgccgcgaagaaattcttcctcctcctcatccccctcagagcggcctcggcagaagctctccaggaaggcaatctcctccgccaacctgttagtgcggtccgggagcacagagagccgtgggggaaaagaccccctctccagccctgggggccctggatctcggaggagcaattacaatttggaaggcatctcagtgaagatgttccttcgagggcgccccattaccatgtacatcccgtctggcatccgcagccttgaggagctgccgagtggcccaccgccagagaccctcagccttgactgggtttatgggtacaggggtcgtgactcccgctctaatctgtttgtgttgcgctctggggaggtggtctactttatcgcctgtgtggtggtgctgtaccggcctggaggaggcccagggggtcctggaggtggcggccagagacattaccgggggcacacagactgcgttcgatgccttgctgttcaccctgatggtgttcgggtagcctcgggacagacagctggagtggataaggatggaaagcccctgcagcctgtggttcacatctgggactcagagacgctgttgaaactgcaggagattggactgggggccttcgagcggggtgttggggccctggccttttcagctgcggatcagggtgcctttctttgtgtggtggatgattccaatgagcacatgctgtcggtgtgggactgcagccggggaatgaagctggctgagatcaagagtacaaatgactcagtcctggccgttggcttcaaccctcgtgacagcagctgcatcgtcaccagtgggaaatctcacgtccacttctggaattggagtggtggagtaggggttcctgggaatgggacccttacccggaaacagggtgtctttgggaaatacaagaaacccaagtttatcccttgctttgtgttccttccggatggagacattctcactggagactcagaggggaacattctcacctgggggcggagcccttcagattccaagaccccaggcaggggtggcgccaaagagacctatgggattgtggcccaggctcacgctcatgaaggttctatcttcgccttgtgtctccggagggacgggacagtgctgagtggtggcgggcgggaccgccggctggtacagtgggggcccgggttggtggccctccaggaggctgagattcccgagcacttcggggccgtgcgagccattgctgaagggcttggctctgagctgctggtgggaaccacgaagaatgcattgctgaggggagacctggcccagggcttctcccctgtaatccagggccacactgatgagctctgggggctctgcacacacccctcccagaaccgcttcctcacctgcggccacgaccggcagctctgcctgtgggatggggagagccatgcactggcctggagcatcgacctcaaggagactggtctctgtgctgacttccacccgagtggggcagttgtggccgtaggactgaacacggggaggtggttggttttggacacagagaccagagagatcgtgtctgatgtcattgatggcaatgagcagctctcagtggtccggtacagcccagatgggttgtacctggccattggttcccatgacaacgtgatctacatctatagtgtttccagtgatggtgccaaatccagccgctttggccgctgtatgggtcactccagcttcatcactcatcttgactggtccaaggatgggaatttcatcatgtccaattctggggactatgagattctttactgggacgtggctggaggctgcaagcagctgaagaatcgctatgagagccgagaccgggaatgggctacctacacctgtgtgctgggctttcacgtctacggtgagcaggggcgtggaaacctgctggaagggtgggggacaaggtggagcccagtttgggcttggaacgctgggcgtgtgtcgttgggtgagagtccagaaacctgaagatccagcccaggaggcccctcgggaccgggaaggcttgcctggaacgcggcagtgggtggccgcggctgccggagcgcctgaaatggtgtagctctgggccgtgggtggcggtgggtaggaggtcgggctgaggccggccgctgtgctaggcgtctggccggacggctccgatgggaccgacatcaactccctgtgccgctcccacaacgagcgcgtggtggcggtggccgacgacttctgcaaagtgcatctcttccagtacccgtgcgctcgtgccaaggcgccgagccgcatgtacgggggccacggcagccacgtgaccagcgtccgattcacgcacgacgactcgcacctcgtctcgctgggcggcaaggacgccagcatcttccagtggcgagtgctgggcgctgggggcgcggggccggcgcccgccacgccctctcgaaccccctccctgtcccccgcctcctccctcgacgtttgatcgctgcctggcgggaccgactggcccggcggcgtggccccgccccgccctgcccttccctggcccaatcccccacgactaggggccgactctttcctggactgacttcgagacattcccgatcgcgcattttcctggagggcgcgaacggcgcccctgcacacactgtttagacccgctggctgagccgggcagccccagcctaggccttgactcccgctgcctgctgaggggcaataaaccagaaccaaagtcgc

SEQ ID NO: 285521 - DNA, 3384 bp, Homo sapiens
cgccccggggtgcttccccttcccctctccccggccgtggcccccgcggcttagacgcctcctccgccgccgccgctcggagcaacccgggggccggatggacggggccgcggggcccggtgacggccctgctcgggaggccctccagtctctgagccagcggcttcgggtgcaggagcaggagatggaactggtaaaggcagccctggcagaagcccttcgcctgctgcggctgcaggtgcccccttcctccctgcagggctctggcacaccagctcctccgggggacagtcttgcagcccccccgggactgccacccacgtgcaccccttccttggtgagccgaggcacccagacggagacagaggtggagctcaagtcatcccctggaccccctggcctgagcaatggacccccagcccctcagggggccagcgaagagcctagtgggacccaatctgaaggagggggcagcagcagcagtggtgctggctcccctggccccccggggatcctcaggcccttgcagcccccacagcgtgctgacacgccgcgaagaaattcttcctcctcctcatccccctcagagcggcctcggcagaagctctccaggaaggcaatctcctccgccaacctgttagtgcggtccgggagcacagagagccgtgggggaaaagaccccctctccagccctgggggccctggatctcggaggagcaattacaatttggaaggcatctcagtgaagatgttccttcgagggcgccccattaccatgtacatcccgtctggcatccgcagccttgaggagctgccgagtggcccaccgccagagaccctcagccttgactgggtttatgggtacaggggtcgtgactcccgctctaatctgtttgtgttgcgctctggggaggtggtctactttatcgcctgtgtggtggtgctgtaccggcctggaggaggcccagggggtcctggaggtggcggccagagacattaccgggggcacacagactgcgttcgatgccttgctgttcaccctgatggtgttcgggtagcctcgggacagacagctggagtggataaggatggaaagcccctgcagcctgtggttcacatctgggactcagagacgctgttgaaactgcaggagattggactgggggccttcgagcggggtgttggggccctggccttttcagctgcggatcagggtgcctttctttgtgtggtggatgattccaatgagcacatgctgtcggtgtgggactgcagccggggaatgaagctggctgagatcaagagtacaaatgactcagtcctggccgttggcttcaaccctcgtgacagcagctgcatcgtcaccagtgggaaatctcacgtccacttctggaattggagtggtggagtaggggttcctgggaatgggacccttacccggaaacagggtgtctttgggaaatacaagaaacccaagtttatcccttgctttgtgttccttccggatggagacattctcactggagactcagaggggaacattctcacctgggggcggagcccttcagattccaagaccccaggcaggggtggcgccaaagagacctatgggattgtggcccaggctcacgctcatgaaggttctatcttcgccttgtgtctccggagggacgggacagtgctgagtggtggcgggcgggaccgccggctggtacagtgggggcccgggttggtggccctccaggaggctgagattcccgagcacttcggggccgtgcgagccattgctgaagggcttggctctgagctgctggtgggaaccacgaagaatgcattgctgaggggagacctggcccagggcttctcccctgtaatccagggccacactgatgagctctgggggctctgcacacacccctcccagaaccgcttcctcacctgcggccacgaccggcagctctgcctgtgggatggggagagccatgcactggcctggagcatcgacctcaaggagactggtctctgtgctgacttccacccgagtggggcagttgtggccgtaggactgaacacggggaggtggttggttttggacacagagaccagagagatcgtgtctgatgtcattgatggcaatgagcagctctcagtggtccggtacagcccagatgggttgtacctggccattggttcccatgacaacgtgatctacatctatagtgtttccagtgatggtgccaaatccagccgctttggccgctgtatgggtcactccagcttcatcactcatcttgactggtccaaggatgggaatttcatcatgtccaattctggggactatgagattctttactgggacgtggctggaggctgcaagcagctgaagaatcgctatgagagccgagaccgggaatgggctacctacacctgtgtgctgggctttcacgtctacggtgagcaggggcgtggaaacctgctggaagggtgggggacaaggtggagcccagtttgggcttggaacgctgggcgtgtgtcgttgggtgagagtccagaaacctgaagatccagcccaggaggcccctcgggaccgggaaggcttgcctggaacgcggcagtgggtggccgcggctgccggagcgcctgaaatggtgtagctctgggccgtgggtggcggtgggtaggaggtcgggctgaggccggccgctgtgctaggcgtctggccggacggctccgatgggaccgacatcaactccctgtgccgctcccacaacgagcgcgtggtggcggtggccgacgacttctgcaaagtgcatctcttccagtacccgtgcgctcgtgccaaggtgaggccgcggggatcgccggggtgggaccggtgggcccgagggctcagccgccaccgcaactcttccctccggcccaggcgccgagccgcatgtacgggggccacggcagccacgtgaccagcgtccgattcacgcacgacgactcgcacctcgtctcgctgggcggcaaggacgccagcatcttccagtggcgagtgctgggcgctgggggcgcggggccggcgcccgccacgccctctcgaaccccctccctgtcccccgcctcctccctcgacgtttgatcgctgcctggcgggaccgactggcccggcggcgtggccccgccccgccctgcccttccctggcccaatcccccacgactaggggccgactctttcctggactgacttcgagacattcccgatcgcgcattttcctggagggcgcgaacggcgcccctgcacacactgtttagacccgctggctgagccgggcagccccagcctaggccttgactcccgctgcctgctgaggggcaataaaccagaaccaaagtcgc

SEQ ID NO: 285522 - DNA, 1806 bp, Homo sapiens
tgagacagtgccttgctctatcacccaggctggagtgcagtgcgggatttcaccatattggccaggctggtcacaaactcctggcctcaggtgacccgcccgccttggcctcccaaagtgctgggattacaggcatgagccactgcacctggcctgccctgcgacttttaatctttgcccttccctttgacctctactgtctgctctcccctcccactagaaatacaagaaacccaagtttatcccttgctttgtgttccttccggatggagacattctcactggagactcagaggggaacattctcacctgggggcggagcccttcagattccaagaccccaggcaggggtggcgccaaagagacctatgggattgtggcccaggctcacgctcatgaaggttctatcttcgccttgtgtctccggagggacgggacagtgctgagtggtggcgggcgggaccgccggctggtacagtgggggcccgggttggtggccctccaggaggctgagattcccgagcacttcggggccgtgcgagccattgctgaagggcttggctctgagctgctggtgggaaccacgaagaatgcattgctgaggggagacctggcccagggcttctcccctgtaatccagggccacactgatgagctctgggggctctgcacacacccctcccagaaccgcttcctcacctgcggccacgaccggcagctctgcctgtgggatggggagagccatgcactggcctggagcatcgacctcaaggagactggtctctgtgctgacttccacccgagtggggcagttgtggccgtaggactgaacacggggaggtggttggttttggacacagagaccagagagatcgtgtctgatgtcattgatggcaatgagcagctctcagtggtccggtacagcccagatgggttgtacctggccattggttcccatgacaacgtgatctacatctatagtgtttccagtgatggtgccaaatccagccgctttggccgctgtatgggtcactccagcttcatcactcatcttgactggtccaaggatgggaatttcatcatgtccaattctggggactatgagattctttactgggacgtggctggaggctgcaagcagctgaagaatcgctatgagagccgagaccgggaatgggctacctacacctgtgtgctgggctttcacgtctacggcgtctggccggacggctccgatgggaccgacatcaactccctgtgccgctcccacaacgagcgcgtggtggcggtggccgacgacttctgcaaagtgcatctcttccagtacccgtgcgctcgtgccaaggcgccgagccgcatgtacgggggccacggcagccacgtgaccagcgtccgattcacgcacgacgactcgcacctcgtctcgctgggcggcaaggacgccagcatcttccagtggcgagtgctgggcgctgggggcgcggggccggcgcccgccacgccctctcgaaccccctccctgtcccccgcctcctccctcgacgtttgatcgctgcctggcgggaccgactggcccggcggcgtggccccgccccgccctgcccttccctggcccaatcccccacgactaggggccgactctttcctggactgacttcgagacattcccgatcgcgcattttcctggagggcgcgaacggcgcccctgcacacactgtttagacccgctggctgagccgggcagccccagcctaggccttgactcccgctgcctgctgaggggcaataaaccagaaccaaagtcgc

SEQ ID NO: 285523 - DNA, 3105 bp, Homo sapiens
cgccccggggtgcttccccttcccctctccccggccgtggcccccgcggcttagacgcctcctccgccgccgccgctcggagcaacccgggggccggatggacggggccgcggggcccggtgacggccctgctcgggaggccctccagtctctgagccagcggcttcgggtgcaggagcaggagatggaactggtaaaggcagccctggcagaagcccttcgcctgctgcggctgcaggtgcccccttcctccctgcagggctctggcacaccagctcctccgggggacagtcttgcagcccccccgggactgccacccacgtgcaccccttccttggtgagccgaggcacccagacggagacagaggtggagctcaagtcatcccctggaccccctggcctgagcaatggacccccagcccctcagggggccagcgaagagcctagtgggacccaatctgaaggagggggcagcagcagcagtggtgctggctcccctggccccccggggatcctcaggcccttgcagcccccacagcgtgctgacacgccgcgaagaaattcttcctcctcctcatccccctcagagcggcctcggcagaagctctccaggaaggcaatctcctccgccaacctgttagtgcggtccgggagcacagagagccgtgggggaaaagaccccctctccagccctgggggccctggatctcggaggagcaattacaatttggaaggcatctcagtgaagatgttccttcgagggcgccccattaccatgtacatcccgtctggcatccgcagccttgaggagctgccgagtggcccaccgccagagaccctcagccttgactgggtttatgggtacaggggtcgtgactcccgctctaatctgtttgtgttgcgctctggggaggtggtctactttatcgcctgtgtggtggtgctgtaccggcctggaggaggcccagggggtcctggaggtggcggccagagacattaccgggggcacacagactgcgttcgatgccttgctgttcaccctgatggtgttcgggtagcctcgggacagacagctggagtggataaggatggaaagcccctgcagcctgtggttcacatctgggactcagagacgctgttgaaactgcaggagattggactgggggccttcgagcggggtgttggggccctggccttttcagctgcggatcagggtgcctttctttgtgtggtggatgattccaatgagcacatgctgtcggtgtgggactgcagccggggaatgaagctggctgagatcaagagtacaaatgactcagtcctggccgttggcttcaaccctcgtgacagcagctgcatcgtcaccagtgggaaatctcacgtccacttctggaattggagtggtggagtaggggttcctgggaatgggacccttacccggaaacagggtgtctttgggaaatacaagaaacccaagtttatcccttgctttgtgttccttccggatggagacattctcactggagactcagaggggaacattctcacctgggggcggagcccttcagattccaagaccccaggcaggggtggcgccaaagagacctatgggattgtggcccaggctcacgctcatgaaggttctatcttcgccttgtgtctccggagggacgggacagtgctgagtggtggcgggcgggaccgccggctggtacagtgggggcccgggttggtggccctccaggaggctgagattcccgagcacttcggggccgtgcgagccattgctgaagggcttggctctgagctgctggtgggaaccacgaagaatgcattgctgaggggagacctggcccagggcttctcccctgtaatccagggccacactgatgagctctgggggctctgcacacacccctcccagaaccgcttcctcacctgcggccacgaccggcagctctgcctgtgggatggggagagccatgcactggcctggagcatcgacctcaaggagactggtctctgtgctgacttccacccgagtggggcagttgtggccgtaggactgaacacggggaggtggttggttttggacacagagaccagagagatcgtgtctgatgtcattgatggcaatgagcagctctcagtggtccggtacagcccagatgggttgtacctggccattggttcccatgacaacgtgatctacatctatagtgtttccagtgatggtgccaaatccagccgctttggccgctgtatgggtcactccagcttcatcactcatcttgactggtccaaggatgggaatttcatcatgtccaattctggggactatgagattctttactgggacgtggctggaggctgcaagcagctgaagaatcgctatgagagccgagaccgggaatgggctacctacacctgtgtgctgggctttcacgtctacggcgtctggccggacggctccgatgggaccgacatcaactccctgtgccgctcccacaacgagcgcgtggtggcggtggccgacgacttctgcaaagtgcatctcttccagtacccgtgcgctcgtgccaaggcgccgagccgcatgtacgggggccacggcagccacgtgaccagcgtccgattcacgcacgacgactcgcacctcgtctcgctgggcggcaaggacgccagcatcttccagtggcgagtgctgggcgctgggggcgcggggccggcgcccgccacgccctctcgaaccccctccctgtcccccgcctcctccctcgacgtttgatcgctgcctggcgggaccgactggcccggcggcgtggccccgccccgccctgcccttccctggcccaatcccccacgactaggggccgactctttcctggactgacttcgagacattcccgatcgcgcattttcctggagggcgcgaacggcgcccctgcacacactgtttagacccgctggctgagccgggcagccccagcctaggccttgactcccgctgcctgctgaggggcaataaaccagaaccaaagtcgcggaaacacacacaacaaacatcgaagaaccaaagacggaggcgaaaaaggcggacacgaa

SEQ ID NO: 285524 - DNA, 1210 bp, Homo sapiens
gcttcgaccgacattgatgctcgagactagttctctctctctctggccacactgatgagctctgggggctctgcacacacccctcccagaaccgcttcctcacctgcggccacgaccggcagctctgcctgtgggatggggagagccatgcactggcctggagcatcgacctcaaggagactggtctctgtgctgacttccacccgagtggggcagttgtggccgtaggactgaacacggggaggtggttggttttggacacagagaccagagagatcgtgtctgatgtcattgatggcaatgagcagctctcagtggtccggtacagcccagatgggttgtacctggccattggttcccatgacaacgtgatctacatctatagtgtttccagtgatggtgccaaatccagccgctttggccgctgtatgggtcactccagcttcatcactcatcttgactggtccaaggatgggaatttcatcatgtccaattctggggactatgagattctttactgggacgtggctggaggctgcaagcagctgaagaatcgctatgagagccgagaccgggaatgggctacctacacctgtgtgctgggctttcacgtctacggcgtctggccggacggctccgatgggaccgacatcaactccctgtgccgctcccacaacgagcgcgtggtggcggtggccgacgacttctgcaaagtgcatctcttccagtacccgtgcgctcgtgccaaggcgccgagccgcatgtacgggggccacggcagccacgtgaccagcgtccgattcacgcacgacgactcgcacctcgtctcgctgggcggcaaggacgccagcatcttccagtggcgagtgctgggcgctgggggcgcggggccggcgcccgccacgccctctcgaaccccctccctgtcccccgcctcctccctcgacgtttgatcgctgcctggcgggaccgactggcccggcggcgtggccccgccccgccctgcccttccctggcccaatcccccacgactaggggccgactctttcctggactgacttcgagacattcccgatcgcgcattttcctggagggcgcgaacggcgcccctgcacacactgtttagacccgctggctgagccgggcagccccagcctaggccttgactcccgctgcctgctgaggggcaataaaccagaaccaaagtcgc

SEQ ID NO: 285525 - DNA, 1498 bp, Homo sapiens
cagaggaggtggacagcacagaggaggtggacagacttcccaccaggacacctgtggccaccacgccttccccagcaccttgccttctgcctcccagaggtggccagtttgtactggtatggctgcactggctactcaaatattaatttttctgtactgactggtaaaagctgatgcttctagtaccacctgggcactccctgccgcccccagaacccctcagacttcctcttgatccagcacctaaatggttaatctccagcacagctattggcatcagttctgtggttaaatattttggtatcactccctgttcaggctccagtgatacccgggtatcccttccctctcttcccatcttctccttgggagtaagtggctttgaagttaggaggacaaggggttcactctggttccctcactagaaagacatcatcttgaattcaccttctcccctctcccaggagactggtctctgtgctgacttccacccgagtggggcagttgtggccgtaggactgaacacggggaggtggttggttttggacacagagaccagagagatcgtgtctgatgtcattgatggcaatgagcagctctcagtggtccggtacagcccagatgggttgtacctggccattggttcccatgacaacgtgatctacatctatagtgtttccagtgatggtgccaaatccagccgctttggccgctgtatgggtcactccagcttcatcactcatcttgactggtccaaggatgggaatttcatcatgtccaattctggggactatgagattctttactgggacgtggctggaggctgcaagcagctgaagaatcgctatgagagccgagaccgggaatgggctacctacacctgtgtgctgggctttcacgtctacggcgtctggccggacggctccgatgggaccgacatcaactccctgtgccgctcccacaacgagcgcgtggtggcggtggccgacgacttctgcaaagtgcatctcttccagtacccgtgcgctcgtgccaaggcgccgagccgcatgtacgggggccacggcagccacgtgaccagcgtccgattcacgcacgacgactcgcacctcgtctcgctgggcggcaaggacgccagcatcttccagtggcgagtgctgggcgctgggggcgcggggccggcgcccgccacgccctctcgaaccccctccctgtcccccgcctcctccctcgacgtttgatcgctgcctggcgggaccgactggcccggcggcgtggccccgccccgccctgcccttccctggcccaatcccccacgactaggggccgactctttcctggactgacttcgagacattcccgatcgcgcattttcctggagggcgcgaacggcgcccctgcacacactgtttagacccgctggctgagccgggcagccccagcctaggccttgactcccgctgcctgctgaggggcaataaaccagaaccaaagtcgc

SEQ ID NO: 285526 - DNA, 1129 bp, Homo sapiens
agaatgcagttgtgacctgtcttctacatcagagcctttctgtgtgtgtctctgagcttctctgatttgccatccccaagcctacccagggtggcctccctgggggtctccttacatcctgccttttcgtcttcctatctgcctccacttccctcccttccaggtggttggttttggacacagagaccagagagatcgtgtctgatgtcattgatggcaatgagcagctctcagtggtccggtacagcccagatgggttgtacctggccattggttcccatgacaacgtgatctacatctatagtgtttccagtgatggtgccaaatccagccgctttggccgctgtatgggtcactccagcttcatcactcatcttgactggtccaaggatgggaatttcatcatgtccaattctggggactatgagattctttactgggacgtggctggaggctgcaagcagctgaagaatcgctatgagagccgagaccgggaatgggctacctacacctgtgtgctgggctttcacgtctacggcgtctggccggacggctccgatgggaccgacatcaactccctgtgccgctcccacaacgagcgcgtggtggcggtggccgacgacttctgcaaagtgcatctcttccagtacccgtgcgctcgtgccaaggcgccgagccgcatgtacgggggccacggcagccacgtgaccagcgtccgattcacgcacgacgactcgcacctcgtctcgctgggcggcaaggacgccagcatcttccagtggcgagtgctgggcgctgggggcgcggggccggcgcccgccacgccctctcgaaccccctccctgtcccccgcctcctccctcgacgtttgatcgctgcctggcgggaccgactggcccggcggcgtggccccgccccgccctgcccttccctggcccaatcccccacgactaggggccgactctttcctggactgacttcgagacattcccgatcgcgcattttcctggagggcgcgaacggcgcccctgcacacactgtttagacccgctggctgagccgggcagccccagcctaggccttgactcccgctgcctgctgaggggcaataaaccagaaccaaagtcgc

SEQ ID NO: 285527 - DNA, 1125 bp, Homo sapiens
gtccctcaaatccgctctttggagcctggcttgtctctgaagaggcaggtgttgaaactgcagaagtagtttgattttgtttacctggattctgacaagctatacatttggaagcactggcttcatttcttattaagcacacactgcaatcccactgtccctccgtcttagtgaacattcccgctaatccgctctttggagccttgcttgtctctgaagtaccaaacttataagaggcaggagctggtatgggttgtacctggccattggttcccatgacaacgtgatctacatctatagtgtttccagtgatggtgccaaatccagccgctttggccgctgtatgggtcactccagcttcatcactcatcttgactggtccaaggatgggaatttcatcatgtccaattctggggactatgagattctttactgggacgtggctggaggctgcaagcagctgaagaatcgctatgagagccgagaccgggaatgggctacctacacctgtgtgctgggctttcacgtctacggcgtctggccggacggctccgatgggaccgacatcaactccctgtgccgctcccacaacgagcgcgtggtggcggtggccgacgacttctgcaaagtgcatctcttccagtacccgtgcgctcgtgccaaggcgccgagccgcatgtacgggggccacggcagccacgtgaccagcgtccgattcacgcacgacgactcgcacctcgtctcgctgggcggcaaggacgccagcatcttccagtggcgagtgctgggcgctgggggcgcggggccggcgcccgccacgccctctcgaaccccctccctgtcccccgcctcctccctcgacgtttgatcgctgcctggcgggaccgactggcccggcggcgtggccccgccccgccctgcccttccctggcccaatcccccacgactaggggccgactctttcctggactgacttcgagacattcccgatcgcgcattttcctggagggcgcgaacggcgcccctgcacacactgtttagacccgctggctgagccgggcagccccagcctaggccttgactcccgctgcctgctgaggggcaataaaccagaaccaaagtcgc

SEQ ID NO: 285528 - DNA, 2484 bp, Homo sapiens
cgccccggggtgcttccccttcccctctccccggccgtggcccccgcggcttagacgcctcctccgccgccgccgctcggagcaacccgggggccggatggacggggccgcggggcccggtgacggccctgctcgggaggccctccagtctctgagccagcggcttcgggtgcaggagcaggagatggaactggtaaaggcagccctggcagaagcccttcgcctgctgcggctgcaggtgcccccttcctccctgcagggctctggcacaccagctcctccgggggacagtcttgcagcccccccgggactgccacccacgtgcaccccttccttggtgagccgaggcacccagacggagacagaggtggagctcaagtcatcccctggaccccctggcctgagcaatggacccccagcccctcagggggccagcgaagagcctagtgggacccaatctgaaggagggggcagcagcagcagtggtgctggctcccctggccccccggggatcctcaggcccttgcagcccccacagcgtgctgacacgccgcgaagaaattcttcctcctcctcatccccctcagagcggcctcggcagaagctctccaggaaggcaatctcctccgccaacctgttagtgcggtccgggagcacagagagccgtgggggaaaagaccccctctccagccctgggggccctggatctcggaggagcaattacaatttggaaggcatctcagtgaagatgttccttcgagggcgccccattaccatgtacatcccgtctggcatccgcagccttgaggagctgccgagtggcccaccgccagagaccctcagccttgactgggtttatgggtacaggggtcgtgactcccgctctaatctgtttgtgttgcgctctggggaggtggtctactttatcgcctgtgtggtggtgctgtaccggcctggaggaggcccagggggtcctggaggtggcggccagagacattaccgggggcacacagactgcgttcgatgccttgctgttcaccctgatggtgttcgggtagcctcgggacagacagctggagtggataaggatggaaagcccctgcagcctgtggttcacatctgggactcagagacgctgttgaaactgcaggagattggactgggggccttcgagcggggtgttggggccctggccttttcagctgcggatcagggtgcctttctttgtgtggtggatgattccaatgagcacatgctgtcggtgtgggactgcagccggggaatgaagctggctgagatcaagagtacaaatgactcagtcctggccgttggcttcaaccctcgtgacagcagctgcatcgtcaccagtgggaaatctcacgtccacttctggaattggagtggtggagtaggggttcctgggaatgggacccttacccggaaacagggtgtctttgggaaatacaagaaacccaagtttatcccttgctttgtgttccttccggatggagacattctcactggagactcagaggggaacattctcacctgggggcggagcccttcagattccaagaccccaggcaggggtggcgccaaagagacctatgggattgtggcccaggctcacgctcatgaaggttctatcttcgccttgtgtctccggagggacgggacagtgctgagtggtggcgggcgggaccgccggctggtacagtgggggcccgggttggtggccctccaggaggctgagattcccgagcacttcggggccgtgcgagccattgctgaagggcttggctctgagctgctggtgggaaccacgaagaatgcattgctgaggggagacctggcccagggcttctcccctgtaatccagggccacactgatgagctctgggggctctgcacacacccctcccagaaccgcttcctcacctgcggccacgaccggcagctctgcctgtgggatggggagagccatgcactggcctggagcatcgacctcaaggagactggtctctgtgctgacttccacccgagtggggcagttgtggccgtaggactgaacacggggaggtgagagagagccaggactcccaggagggaaagcagggaggactgggaagggttcctggtactgggggagtgggcgagagtgaccacctctacccaggagccacctgcgccttggcactcctctgtgcctctccctgcagcccctgccacccgggctcccctcctcttctgtggtaactgtttctccccctcccccaacccagtgtctcctccaagcctgggagtggaggaggcagcagcccaggatagagaaacagtgggaatgggaggggcatagacaaacacagggaagtgacaggcttccagcttgcacagtgcctttgtagtcggcccctggtctgtagtttcagattactttttcagacgacatcagaagcccctcagcctttatccacacttagctcc

SEQ ID NO: 285529 - DNA, 1805 bp, Homo sapiens
cgccccggggtgcttccccttcccctctccccggccgtggcccccgcggcttagacgcctcctccgccgccgccgctcggagcaacccgggggccggatggacggggccgcggggcccggtgacggccctgctcgggaggccctccagtctctgagccagcggcttcgggtgcaggagcaggagatggaactggtaaaggcagccctggcagaagcccttcgcctgctgcggctgcaggtgcccccttcctccctgcagggctctggcacaccagctcctccgggggacagtcttgcagcccccccgggactgccacccacgtgcaccccttccttggtgagccgaggcacccagacggagacagaggtggagctcaagtcatcccctggaccccctggcctgagcaatggacccccagcccctcagggggccagcgaagagcctagtgggacccaatctgaaggagggggcagcagcagcagtggtgctggctcccctggccccccggggatcctcaggcccttgcagcccccacagcgtgctgacacgccgcgaagaaattcttcctcctcctcatccccctcagagcggcctcggcagaagctctccaggaaggcaatctcctccgccaacctgttagtgcggtccgggagcacagagagccgtgggggaaaagaccccctctccagccctgggggccctggatctcggaggagcaattacaatttggaaggcatctcagtgaagatgttccttcgagggcgccccattaccatgtacatcccgtctggcatccgcagccttgaggagctgccgagtggcccaccgccagagaccctcagccttgactgggtttatgggtacaggggtcgtgactcccgctctaatctgtttgtgttgcgctctggggaggtggtctactttatcgcctgtgtggtggtgctgtaccggcctggaggaggcccagggggtcctggaggtggcggccagagacattaccgggggcacacagactgcgttcgatgccttgctgttcaccctgatggtgttcgggtagcctcgggacagacagctggagtggataaggatggaaagcccctgcagcctgtggttcacatctgggactcagagacgctgttgaaactgcaggagattggactgggggccttcgagcggggtgttggggccctggccttttcagctgcggatcagggtgcctttctttgtgtggtggatgattccaatgagcacatgctgtcggtgtgggactgcagccggggaatgaagctggctgagatcaagagtacaaatgactcagtcctggccgttggcttcaaccctcgtgacagcagctgcatcgtcaccagtgggaaatctcacgtccacttctggaattggagtggtggagtaggggttcctgggaatgggacccttacccggaaacagggtgtctttgggaaatacaagaaacccaagtttatcccttgctttgtgttccttccggatggagacattctcactggagactcagaggggaacattctcacctgggggcggagcccttcagattccaagaccccaggcaggggtggcgccaaagagacctatgggattgtggcccaggctcacgctcatgaaggttctatcttcgccttgtgtctccggagggacgggacagtgctgagtggtggcgaacggcgcccctgcacacactgtttagacccgctggctgagccgggcagccccagcctaggccttgactcccgctgcctgctgaggggcaataaaccagaaccaaagtcgc

SEQ ID NO: 285530 - DNA, 969 bp, Homo sapiens
cagaggaggtggacagcacagaggaggtggacagacttcccaccaggacacctgtggccaccacgccttccccagcaccttgccttctgcctcccagaggtggccagtttgtactggtatggctgcactggctactcaaatattaatttttctgtactgactggtaaaagctgatgcttctagtaccacctgggcactccctgccgcccccagaacccctcagacttcctcttgatccagcacctaaatggttaatctccagcacagctattggcatcagttctgtggttaaatattttggtatcactccctgttcaggctccagtgatacccgggtatcccttccctctcttcccatcttctccttgggagtaagtggctttgaagttaggaggacaaggggttcactctggttccctcactagaaagacatcatcttgaattcaccttctcccctctcccaggagactggtctctgtgctgacttccacccgagtggggcagttgtggccgtaggactgaacacggggaggtggttggttttggacacagagaccagagagatcgtgtctgatgtcattgatggcaatgagcagctctcagtggtccggtacagcccagatgggttgtacctggccattggttcccatgacaacgtgatctacatctatagtgtttccagtgatggtgccaaatccagccgctttggccgctgtatgggtcactccagcttcatcactcatcttgactggtccaaggatgggaatttcatcatgtccaattctggggactatgagattctttactgggacgtggctggaggctgcaagcagctgaagaatcgctatgagagccgagaccgggaatgggctacctacacctgtgtgctgggctttcacgtctacggtgagcaggggcgtggaaacctgctggaagggtaaggctcctaagcgatccgctagatcacct

SEQ ID NO: 285531 - DNA, 377 bp, Homo sapiens
aacaaactaaaaaagaagaatgcagttgtgacctgtcttctacatcagagcctttctgtgtgtgtctctgagcttctctgatttgccatccccaagcctacccagggtggcctccctgggggtctccttacatcctgccttttcgtcttcctatctgcctccacttccctcccttccaggtggttggttttggacacagagaccagagagatcgtgtctgatgtcattgatggcaatgagcagctctcagtggtccggtacagcccaggtgggagccaccccaaccctggactcacatgcgtccctggcccttccctctctgagtgactgtatttgcagatgggttgtacctggccattggttcccatgacaacgtg

SEQ ID NO: 285532 - DNA, 376 bp, Homo sapiens
ttatgggtacaggggtcgtgactcccgctctaatctgtttgtgttgcgctctggggaggtggtctactttatcgcctgtgtggtggtgctgtaccggcctggaggaggcccagggggtcctggaggtggcggccagagacattaccgggggcacacagactgcgttcgatggtgaggagtccggggctggtgggcttggcaggaagagggtctggggggatggagaagcaggagaaaagagttgccttgctgctctgcaagcttggagaaggtgtcttggatggtcttgagagaccctttccctagagtgtcttccccctgccttagccttgctgttcaccctgatggtgttcgggtagcctcgggacagacagct

SEQ ID NO: 285533 - DNA, 1063 bp, Homo sapiens
aggatgggggcggggcgctggcgacatggcgcgctgattggccggcgccgcgctccaaggctgttaacggcgtctgggccgggctacggctccaaaacaaagggcaggcggcccgcggggcggcggcgggaggatgcctcgcgccctgcctaggcgttaacggcctcagcgcgtcccgggccgcgccgggaacgcctgagagccgagcccgcgctgaccggggcccgggccggatgggcgctgcgggccggggcgcggaccgcggagcggccgttacgtttttctctcgtcccagctgtgtggacagtgccacacgccctcctggacaacgacggctcttgcgtgcattttccagtgttgcttttgtcagagaggccagcagagccacggttcttccagaaccagccctgagctgagtgaggagtgcccaggagagatggtgaaaatgacaaagtccaaaactttccaagcgtatctgccgaactgtcaccgaacgtacagctgtatccactgcagagcacacctggccaatcatgacgagctcatctccaagtcctttcaggggagccagggacgcgcctacctcttcaattccgtggtgaacgtgggctgcggccctgcagaggagagggtccttctcaccgggctgcatgcggttgccgacatctactgcgagaactgcaagaccacgctcgggtggaaatacgagcatgcctttgagagcagtcagaaatataaggaaggaaaattcatcattgagcttgctcatatgatcaaagacaatggctgggagtaatgtgcgaactttcccttctccttcgaatgctgttttgtgaaagaaactgtgaatgtaatggaaacgtaggagcatctggtgacagcctttcttgccctctgacctcaaaggctagctgcgcatagctcttgacactcccggccatctctgtgggtaaggtgtccctcggatctgtcctcttcgtgtacacagttgtttctgaaaattttcaatgagctttttctaacttctcaagttctagagaaagaattaaccaactgatgactt

SEQ ID NO: 285534 - DNA, 2458 bp, Homo sapiens
aggatgggggcggggcgctggcgacatggcgcgctgattggccggcgccgcgctccaaggctgttaacggcgtctgggccgggctacggctccaaaacaaagggcaggcggcccgcggggcggcggcgggaggatgcctcgcgccctgcctaggcgttaacggcctcagcgcgtcccgggccgcgccgggaacgcctgagagccgagcccgcgctgaccggggcccgggccggatgggcgctgcgggccggggcgcggaccgcggagcggccgttacgtttttctctcgtcccagctgtgtggacagtgccacacgccctcctggacaacgacggctcttgcgtgcattttccagtgttgcttttgtcagagaggccagcagagccacggttcttccagaaccagccctgagctgagtgaggagtgcccaggagagatggtgaaaatgacaaagtccaaaactttccaagcgtatctgccgaactgtcaccgaacgtacagctgtatccactgcagagcacacctggccaatcatgacgagctcatctccaagtcctttcaggggagccagggacgcgcctacctcttcaattccgtggtgaacgtgggctgcggccctgcagaggagagggtccttctcaccgggctgcatgcggttgccgacatctactgcgagaactgcaagaccacgctcgggtggaaatacgagcatgcctttgagagcagtcagaaatataaggaaggaaaattcatcattgagcttgctcatatgatcaaagacaatggctgggagtaatgtgcgaactttcccttctccttcgaatgctgttttgtgaaagaaactgtgaatgtaatggaaacgtaggagcatctggtgacagcctttcttgccctctgacctcaaaggctagctgcgcatagctcttgacactcccggccatctctgtgggtaaggtgtccctcggatctgtcctcttcgtgtacacagttgtttctgaaaattttcaatgagctttttctaacttctcaagttctagagaaagaattaaccaactgatgacttacctgcctagttaatatcttcctttcacctttgtcttcaatatagttgggctctgcttttttaaggttcagttgaaaaccaaactggggccgggtgcggtggctcacgcctgtaatcccagcactttgggaggccaagatgggtggatcacctgaggtcaggagttctagatcagcctggccaacatggtgaaaccccatctctactaaaaatacgaaaattagccgggcatggtggcgagtgcctgtaatcttagctactcaggaggctaaggcaggagaatcacttgaacctgggacacggaggttgcagtgagctaagatcatgccatcgcactccagcctgggggacaaaagtgagacatcgtctcaaaaaaaaaaaaaaaagctgggtatggtggcgcatgcctttaatcccagctactcgggaggctgaggcacgagaatcacttgaacccaggaggcggaggttgcagtgagccaagatcgcgccactgcactccagcctggcaatagggcgagactccgtctcaatttaaaacaagagagaaccagactgagtctctgaagaccacagggacagggtctctttagatagcaagtctcaccattcccttttttagagaaaaggtattgtagcccaccctccaccccgctgtttttcttaaatttgcagaacttcaaattggctattcctcttgcaaatgaacccttaaagtacagtgttatttaagaatcttccagaggcagtcaacagacttatacactaagggcatttttggtttttagcttgttcaaaaacagaggccagcacagatgacattttagatacactctaaattgagaatggtgtctagtggaacatgtttatttaagccagtagattccttatctagaaagcaggtgagctagcccttagagaaggctgtcccggggcccgcagaggtgcccttactgaggtgacagcctcacagggtctggtaccaggggttgtgccctcagcagtgacagcagcttaggtgtcaggcagttgctgagtggctggtccatgtctatagagtaacacactggaccgaggaaaagtcagatttcattttctaccctggatgtacttgaagaaaaagaattatttttgcatatgaaagaggccagaacccacaggaaaaacttcaaaacttgacatttgccagaatgtttaaaatttgttcagaaaaggttaaagcaacaagtttagcctttgtgcatgaagacgcctggcctgctagacgcgttgcccgtccctgcgtggtgctgtcccatgtcacttgaactgatagaggggcctgtgcaatctcctaaggcctgtgtttctgccatatattttattataaattacaatccactcatccacctgccc

SEQ ID NO: 285535 - DNA, 1800 bp, Homo sapiens
gaaaagtgaaaccttctgtcctgaaacctttgtctcttctttttcaaggagcatgcctttgagagcagtcagaaatataaggaaggaaaattcatcattgagcttgctcatatgatcaaagacaatggctgggagtaatgtgcgaactttcccttctccttcgaatgctgttttgtgaaagaaactgtgaatgtaatggaaacgtaggagcatctggtgacagcctttcttgccctctgacctcaaaggctagctgcgcatagctcttgacactcccggccatctctgtgggtaaggtgtccctcggatctgtcctcttcgtgtacacagttgtttctgaaaattttcaatgagctttttctaacttctcaagttctagagaaagaattaaccaactgatgacttacctgcctagttaatatcttcctttcacctttgtcttcaatatagttgggctctgcttttttaaggttcagttgaaaaccaaactggggccgggtgcggtggctcacgcctgtaatcccagcactttgggaggccaagatgggtggatcacctgaggtcaggagttctagatcagcctggccaacatggtgaaaccccatctctactaaaaatacgaaaattagccgggcatggtggcgagtgcctgtaatcttagctactcaggaggctaaggcaggagaatcacttgaacctgggacacggaggttgcagtgagctaagatcatgccatcgcactccagcctgggggacaaaagtgagacatcgtctcaaaaaaaaaaaaaaaagctgggtatggtggcgcatgcctttaatcccagctactcgggaggctgaggcacgagaatcacttgaacccaggaggcggaggttgcagtgagccaagatcgcgccactgcactccagcctggcaatagggcgagactccgtctcaatttaaaacaagagagaaccagactgagtctctgaagaccacagggacagggtctctttagatagcaagtctcaccattcccttttttagagaaaaggtattgtagcccaccctccaccccgctgtttttcttaaatttgcagaacttcaaattggctattcctcttgcaaatgaacccttaaagtacagtgttatttaagaatcttccagaggcagtcaacagacttatacactaagggcatttttggtttttagcttgttcaaaaacagaggccagcacagatgacattttagatacactctaaattgagaatggtgtctagtggaacatgtttatttaagccagtagattccttatctagaaagcaggtgagctagcccttagagaaggctgtcccggggcccgcagaggtgcccttactgaggtgacagcctcacagggtctggtaccaggggttgtgccctcagcagtgacagcagcttaggtgtcaggcagttgctgagtggctggtccatgtctatagagtaacacactggaccgaggaaaagtcagatttcattttctaccctggatgtacttgaagaaaaagaattatttttgcatatgaaagaggccagaacccacaggaaaaacttcaaaacttgacatttgccagaatgtttaaaatttgttcagaaaaggttaaagcaacaagtttagcctttgtgcatgaagacgcctggcctgctagacgcgttgcccgtccctgcgtggtgctgtcccatgtcacttgaactgatagaggggcctgtgcaatctcctaaggcctgtgtttctgccatatattttattataaattacaatccactcatccacctgccc

SEQ ID NO: 285536 - DNA, 1097 bp, Homo sapiens
gcggccgccaccgactccccgtctgcttccctccgggcggcagccgcggtttggagcttgctgacagctctgcgaccggcgggcgcagcctcgtctcgtgcttccacgttatcctatcagggacggggcggggcggcggcctccgcagcctatcagcgcgaaccacgaccccggcgagcccgggaggaaagccgccagaaagaaggcgattggatggcggcggcgctctggggcgtagcgtcgcccgggccccgcccaccgctgccttcctctgctgggctccagagccactgaggcctgagcgagagccgacggcgggcgggcgcagctgctgccggagcgccggcgcgtgctggtgggccacacacctttcctcctcttcactcgcgagccctcggacatggtggcccccggctccgtgaccagccggctgggctcggtattccccttcctgctagtcctggtggatctgcagtacgaaggtgctgaatgtggagtaaatgcagatgttgagaaacatcttgaattgggcaagaaattacttgcagctggacagctagctgatgctttatctcagtttcatgctgccgtagatggtgaccctgataactatattgcttattatcggagggctactgtctttttagctatgggcaaatcaaaagctgcacttcctgatttaactaaagtgattcaattgaagatggacttcactgcagcaagattacagagaggtcacttattactcaaacaaggaaaacttgatgaagcagaagatgattttaaaaaagtggtgtttcctgttccttctctgttgggactccagcgttctctcctagatgatctatacttgctattttggttcttccttatgaagaaggtgactttcagatgcctctcgtcagccatctctgaatgccttcctcagtctttaaatttgatgaagttcaatttgttgatttcctttttacttctgtggactgtgcgtttggtgtcatgtctaagaagtattcactacgccgtaggatctaaaacttttctcatatcttctaaaagttttatggttttgtgttttatttttaagcccatagtctatt

SEQ ID NO: 285537 - DNA, 6163 bp, Homo sapiens
  misc_feature (3132)..(3133): n is a, c, g, or t
aaattattcacaaaaagcagctggaaatcagaaaggcagctgccgctccagggtctcaaatccattaaaaccaccacagaacaattaaaacaatcagagagagaaaaggaaaaggaaacaacgtccaacatttggcatttggttttatccacaggttttcccagagctcctcttggaattgaaagcaaaatatattggcaaacactgcttctcaatacacaggaaggggagcctcagtgcctcctgccaacagaggcggctctgtgcagtcagactgtggggtgcacagcagtctctcaggctggggtttctggcctctttccatccaatcaccccttccaggaaattcagcagcctaccagacactgggcctctgcctggctgccctttcccccaggcagagcggccttgggcataataccaggcaacctgccagccccagagcagaaaccctgctgggatcccttccttcatcaaccttggtgtggaggatgctcaatagcgcttccacctccccctccccagcccctagctacatctctccacccttccctggacagtcctacttcccagctcacccacccaccagcagcttaagtctgggtgggatctatcatcagctcctccccctgtaacctcttccctccacagatccaccctgtgactcctcttcactcgcgagccctcggacatggtggcccccggctccgtgaccagccggctgggctcggtattccccttcctgctagtcctggtggatctgcagtacgaaggtgctgaatgtggagtaaatgcagatgttgagaaacatcttgaattgggcaagaaattacttgcagctggacagctagctgatgctttatctcagtttcatgctgccgtagatggtgaccctgataactatattgcttattatcggagggctactgtctttttagctatgggcaaatcaaaagctgcacttcctgatttaactaaagtgattcaattgaagatggacttcactgcagcaagattacagagaggtcacttattactcaaacaaggaaaacttgatgaagcagaagatgattttaaaaaagtgctcaaatctaatccaagtgaaaatgaagaaaaggaagcacagtctcaacttataaaatctgatgaaatgcagcgtttgcgttcacaagcacttaacgcttttggaagtggagattatactgctgctatagccttccttgataagattttagaggtttgtgtttgggatgcagaactacgggaacttcgagctgaatgttttataaaagaaggagaacctaggaaagctataagtgacttaaaagctgcgtcaaagttgaagaatgataatactgaagcgttttataaaataagcacactgtactaccaactaggagaccacgaactgtccctcagtgaagttcgggaatgtcttaaacttgaccaggatcataaaaggtgttttgcacactataaacaagtaaagaaacttaataagctgattgagtcagctgaagagctcatcagagatggcagatacacagatgctaccagcaaatatgaatctgtcatgaaaacagagccaagcattgctgaatatacagttcgttcaaaggagaggatttgccactgcttttctaaggacgagaagcctgttgaagctattagggtttgttctgaagttttacagatggaacctgacaatgtgaatgccctgaaagatcgagcagaggcctatttgatagaggaaatgtatgatgaagctattcaggattatgaaactgctcaggaacacaatgaaaatgatcagcagattcgagaaggtctagagaaagcacaaagattattgaaacagtcgcagaaacgagattattataaaatcttgggagtaaaaagaaatgccaaaaagcaagaaattattaaagcataccgaaaattagcactgcagtggcacccagataacttccagaatgaagaagaaaagaaaaaagctgagaaaaagttcattgatatagcagctgctaaagaagtcctctctgatccagaaatgagaaagaagtttgacgacggagaagatcctttggatgcagagagccagcaaggaggcggcggcaaccctttccacagaagctggaactcatggcaagggttcaatcccttcagctcaggcggaccatttagatttaaattccacttcaattaaaccaactgtttttctgctcttcttaatttttttaaagattaaaaacaaagaaatcttgttccgggaccctaatgaaaaaaaatttcaaatcttttcagtttgtccatgaccaaagagttgctttaataggaaaaaatctgttcttatccctgtcagatttatggttaatgggtttgcaacggcaaggaggcaaggaatggttctatttctgacagagcagcctgcatctgctttatgctgtctggagggaagtggtctgaggcaggctcacccgtggaagtgctcacgtattctgtattatttttctacactggagctgagattcttctcttcacagccttgcagagtaagtcagtgcctacaagtgtaagaaggagctgtaatcttcatgaggatggttatacttcagtattcttaaagagaacatgaacatttttgagctgtatgttcttagggacaactgtgcttcgatgtggtcagtctcgtcacttgtgagtagctgtgaaatctttagtgtgcatgtgtttgcacctctgtggtctgtcaacgtggctgtcactgaaggagcaagagaccatcttttaggaaccctgccaccaaataataatatatccaggcttagactttggattaatgttaaatgtacatttttttggttcagtacctgaagaagaatactgaaacttgaatctataaattcctatggacccttttaatattaaacacaacaaattaaaagttgttataggtaaaataagttcagataaaatagtggtggtatttaaaataatattgctgaagtgcagattgaaatactttttaaacaactgaagttctgagtttttatagggaatttcatgtaacaagactggtttagaaacgtaaagttgcgcagtcaacataaataaatacagaatgccatgttnnccacttctaagtaaagacagtgggcagcttctgtttctccttctatcaaggcttcaccctatcttaaaggtctgtggtgcctcccacgtgggacctgtctgctggtatgtgttaaacagcagaccggcccttctaccagatcttgatgcctctgattttctcctgcctacaagaaaatacaggcaaggttagtcaggtctggctatatttccactgttgtttcatttaataagatggcatctcctcttgagatatgttcttcttaccttttaagaagatactatttaagaagtgaactattcagtctttgtatactgaatgctttttccctaaaaaatgttaatcaagaatattgaatatttatggcactcttgatgctgcatttgaaagctgaaggaattactttagatagataggaattgctacctttattctggaaaggttttgtttctgcctcaaagcattttgaagtgttttaaccattaaagggtctaatttttttttcttaatgaaatcaagcattttaattcactgtgggaggcatcctgaccacggacatccataacagcaaagcacaaatcgttttcgtctgtagtcatatcctgaaacataggtggacaaatttttaactgagagacaaaaatcacatagttgaattgagcagaacacttaagtgctttctgcatctatttaggagtctatttcttaccaataaacttgacaacgcatttggaaaactagtgaacaccttacagctttcattttgctttaatgtttcaattcaagccggtgtaaaaataatttccaaggcatttctgtttattctttagtaatctcactactggctatgtcagcaatatctttttcaatctggttccttttgtatatgatgtcactgtgacctctttgaaatatagtgatggcttttacctactttgaaaagaattttcacatagagtcagaaaaaaaaggaaatatcaaatcacttgcctttccacttggagagcacgacagttgccaacaacaaggggtcaagggccgcacaggagatgtgtgggggcctggccacctcccacctgctgcccagaggcttgtttgcattttcattttttctccacttgtaacaaccatagtttcagctcctaaattcttatcatggatttacttagtcatcttaactgacctgcagttacttgcctgttttcagtgaagagagagaagcagctctggtgccacatgccagtgccatggagggaaatgaattctctgcaatctgttgtttcgctgattcatgaagaaagtaacaactgttgagtttcagccttgatggctgtcggcagttttctggtgtccacccaaacggagagacagtcactcctgcttaccctaatgtgtgactgagaagcagcctgggtgtgtaaagagatagtcattccccctgcctgtctcactgtagggtagcattatccactgtaaaaccatactactttcattttcccttggggactacaggtgccaggtaaccttttttttttttttttttttttttgagacagaatcttgctctgttgcccaggctggagtgcagggacacctcccgggttcaagcagttctcctgcctcagcctccaagtagctgggactataggcacgcaccaccatgcctggctaatttttgtatttttagtagaaatggggtttcactgtgttagccaggatggtcttgatctcctgaccttgtgatctgcccgccttggccttccaaagtgttgggattacaggcgtgagccactgcgcctggccatcaggtaacctttatggctctttcaggaaaagtgaaatcagagaggcgtaccctagccacagctgttgtattctgctcttctttcctttttggtgagcttcatgggtggagttatcagtggtctgtactttgtggatattttgcccagcaggaagtattagacacatcagtctagaagcattgtgaaaaggttccaaaacgggagacaaaatttaattcattcctcagttctgaaagtttgtgctttcttaccatgaatagatgaaaacttgaaaaaaatcttgacagtttactaatgtgaatcagatgtaacgtactactaattctacaatgcctttctctttagtcagtattaaaaatcttttttaaagtattggtatgaaaacaaatttttgttgccctgataatggaattttaaaactacccacagtttaagagaaaacataacttggtaaaaaaggtagccaataaaaccacaatttgaaattgataccattttctactcacaatggatgatgaaaaatttcacctttaaatgggtcagaagttgtctttgacatttaccatgaaaaaactacataaaatggctccctggtgaggttacagacacggccctggtgatgggcgttgcaaagttttcactgagcacacagcaatggtatcacctagagaagttcacgcaactttgttgaatgtagttgacttttccaaatttataaaggaaggaagaaggcaaatgttaatttgccaacaacgaatatcctttttctaaatcagatcattccttttttgttagtggcagtttatcctgtaatttcaaatgacgttaagaggtgggattatttgggggttttttttgtttgtttacagatgatctcatttgctgaatgattgatttaagagtaaaattagccactgcgtggctttgtgtatagtaaccggttttgttgcacttgtctgtggctgaaacacttacctgcagtggaaagccgagcaaggaggaggtaaacattggagatgtttgtgaaaatattactcttgctgtgaggttttagtttgttttgaatgagaaaagactaagtaacttaatccatctcaatgtagtgttttaataaaaaaggaacctaatatttgaaatgggtctcagacatgtctacaaatatgggtactatttttatgcccgtgtattttcacatttaataaaaatatttatggtcatatcagta

SEQ ID NO: 285538 - DNA, 5872 bp, Homo sapiens
  misc_feature (2841)..(2842): n is a, c, g, or t
gcggccgccaccgactccccgtctgcttccctccgggcggcagccgcggtttggagcttgctgacagctctgcgaccggcgggcgcagcctcgtctcgtgcttccacgttatcctatcagggacggggcggggcggcggcctccgcagcctatcagcgcgaaccacgaccccggcgagcccgggaggaaagccgccagaaagaaggcgattggatggcggcggcgctctggggcgtagcgtcgcccgggccccgcccaccgctgccttcctctgctgggctccagagccactgaggcctgagcgagagccgacggcgggcgggcgcagctgctgccggagcgccggcgcgtgctggtgggccacacacctttcctcctcttcactcgcgagccctcggacatggtggcccccggctccgtgaccagccggctgggctcggtattccccttcctgctagtcctggtggatctgcagtacgaaggtgctgaatgtggagtaaatgcagatgttgagaaacatcttgaattgggcaagaaattacttgcagctggacagctagctgatgctttatctcagtttcatgctgccgtagatggtgaccctgataactatattgcttattatcggagggctactgtctttttagctatgggcaaatcaaaagctgcacttcctgatttaactaaagtgattcaattgaagatggacttcactgcagcaagattacagagaggtcacttattactcaaacaaggaaaacttgatgaagcagaagatgattttaaaaaagtgctcaaatctaatccaagtgaaaatgaagaaaaggaagcacagtctcaacttataaaatctgatgaaatgcagcgtttgcgttcacaagcacttaacgcttttggaagtggagattatactgctgctatagccttccttgataagattttagaggtttgtgtttgggatgcagaactacgggaacttcgagctgaatgttttataaaagaaggagaacctaggaaagctataagtgacttaaaagctgcgtcaaagttgaagaatgataatactgaagcgttttataaaataagcacactgtactaccaactaggagaccacgaactgtccctcagtgaagttcgggaatgtcttaaacttgaccaggatcataaaaggtgttttgcacactataaacaagtaaagaaacttaataagctgattgagtcagctgaagagctcatcagagatggcagatacacagatgctaccagcaaatatgaatctgtcatgaaaacagagccaagcattgctgaatatacagttcgttcaaaggagaggatttgccactgcttttctaaggacgagaagcctgttgaagctattagggtttgttctgaagttttacagatggaacctgacaatgtgaatgccctgaaagatcgagcagaggcctatttgatagaggaaatgtatgatgaagctattcaggattatgaaactgctcaggaacacaatgaaaatgatcagcagattcgagaaggtctagagaaagcacaaagattattgaaacagtcgcagaaacgagattattataaaatcttgggagtaaaaagaaatgccaaaaagcaagaaattattaaagcataccgaaaattagcactgcagtggcacccagataacttccagaatgaagaagaaaagaaaaaagctgagaaaaagttcattgatatagcagctgctaaagaagtcctctctgatccagaaatgagaaagaagtttgacgacggagaagatcctttggatgcagagagccagcaaggaggcggcggcaaccctttccacagaagctggaactcatggcaagggttcaatcccttcagctcaggcggaccatttagatttaaattccacttcaattaaaccaactgtttttctgctcttcttaatttttttaaagattaaaaacaaagaaatcttgttccgggaccctaatgaaaaaaaatttcaaatcttttcagtttgtccatgaccaaagagttgctttaataggaaaaaatctgttcttatccctgtcagatttatggttaatgggtttgcaacggcaaggaggcaaggaatggttctatttctgacagagcagcctgcatctgctttatgctgtctggagggaagtggtctgaggcaggctcacccgtggaagtgctcacgtattctgtattatttttctacactggagctgagattcttctcttcacagccttgcagagtaagtcagtgcctacaagtgtaagaaggagctgtaatcttcatgaggatggttatacttcagtattcttaaagagaacatgaacatttttgagctgtatgttcttagggacaactgtgcttcgatgtggtcagtctcgtcacttgtgagtagctgtgaaatctttagtgtgcatgtgtttgcacctctgtggtctgtcaacgtggctgtcactgaaggagcaagagaccatcttttaggaaccctgccaccaaataataatatatccaggcttagactttggattaatgttaaatgtacatttttttggttcagtacctgaagaagaatactgaaacttgaatctataaattcctatggacccttttaatattaaacacaacaaattaaaagttgttataggtaaaataagttcagataaaatagtggtggtatttaaaataatattgctgaagtgcagattgaaatactttttaaacaactgaagttctgagtttttatagggaatttcatgtaacaagactggtttagaaacgtaaagttgcgcagtcaacataaataaatacagaatgccatgttnnccacttctaagtaaagacagtgggcagcttctgtttctccttctatcaaggcttcaccctatcttaaaggtctgtggtgcctcccacgtgggacctgtctgctggtatgtgttaaacagcagaccggcccttctaccagatcttgatgcctctgattttctcctgcctacaagaaaatacaggcaaggttagtcaggtctggctatatttccactgttgtttcatttaataagatggcatctcctcttgagatatgttcttcttaccttttaagaagatactatttaagaagtgaactattcagtctttgtatactgaatgctttttccctaaaaaatgttaatcaagaatattgaatatttatggcactcttgatgctgcatttgaaagctgaaggaattactttagatagataggaattgctacctttattctggaaaggttttgtttctgcctcaaagcattttgaagtgttttaaccattaaagggtctaatttttttttcttaatgaaatcaagcattttaattcactgtgggaggcatcctgaccacggacatccataacagcaaagcacaaatcgttttcgtctgtagtcatatcctgaaacataggtggacaaatttttaactgagagacaaaaatcacatagttgaattgagcagaacacttaagtgctttctgcatctatttaggagtctatttcttaccaataaacttgacaacgcatttggaaaactagtgaacaccttacagctttcattttgctttaatgtttcaattcaagccggtgtaaaaataatttccaaggcatttctgtttattctttagtaatctcactactggctatgtcagcaatatctttttcaatctggttccttttgtatatgatgtcactgtgacctctttgaaatatagtgatggcttttacctactttgaaaagaattttcacatagagtcagaaaaaaaaggaaatatcaaatcacttgcctttccacttggagagcacgacagttgccaacaacaaggggtcaagggccgcacaggagatgtgtgggggcctggccacctcccacctgctgcccagaggcttgtttgcattttcattttttctccacttgtaacaaccatagtttcagctcctaaattcttatcatggatttacttagtcatcttaactgacctgcagttacttgcctgttttcagtgaagagagagaagcagctctggtgccacatgccagtgccatggagggaaatgaattctctgcaatctgttgtttcgctgattcatgaagaaagtaacaactgttgagtttcagccttgatggctgtcggcagttttctggtgtccacccaaacggagagacagtcactcctgcttaccctaatgtgtgactgagaagcagcctgggtgtgtaaagagatagtcattccccctgcctgtctcactgtagggtagcattatccactgtaaaaccatactactttcattttcccttggggactacaggtgccaggtaaccttttttttttttttttttttttttgagacagaatcttgctctgttgcccaggctggagtgcagggacacctcccgggttcaagcagttctcctgcctcagcctccaagtagctgggactataggcacgcaccaccatgcctggctaatttttgtatttttagtagaaatggggtttcactgtgttagccaggatggtcttgatctcctgaccttgtgatctgcccgccttggccttccaaagtgttgggattacaggcgtgagccactgcgcctggccatcaggtaacctttatggctctttcaggaaaagtgaaatcagagaggcgtaccctagccacagctgttgtattctgctcttctttcctttttggtgagcttcatgggtggagttatcagtggtctgtactttgtggatattttgcccagcaggaagtattagacacatcagtctagaagcattgtgaaaaggttccaaaacgggagacaaaatttaattcattcctcagttctgaaagtttgtgctttcttaccatgaatagatgaaaacttgaaaaaaatcttgacagtttactaatgtgaatcagatgtaacgtactactaattctacaatgcctttctctttagtcagtattaaaaatcttttttaaagtattggtatgaaaacaaatttttgttgccctgataatggaattttaaaactacccacagtttaagagaaaacataacttggtaaaaaaggtagccaataaaaccacaatttgaaattgataccattttctactcacaatggatgatgaaaaatttcacctttaaatgggtcagaagttgtctttgacatttaccatgaaaaaactacataaaatggctccctggtgaggttacagacacggccctggtgatgggcgttgcaaagttttcactgagcacacagcaatggtatcacctagagaagttcacgcaactttgttgaatgtagttgacttttccaaatttataaaggaaggaagaaggcaaatgttaatttgccaacaacgaatatcctttttctaaatcagatcattccttttttgttagtggcagtttatcctgtaatttcaaatgacgttaagaggtgggattatttgggggttttttttgtttgtttacagatgatctcatttgctgaatgattgatttaagagtaaaattagccactgcgtggctttgtgtatagtaaccggttttgttgcacttgtctgtggctgaaacacttacctgcagtggaaagccgagcaaggaggaggtaaacattggagatgtttgtgaaaatattactcttgctgtgaggttttagtttgttttgaatgagaaaagactaagtaacttaatccatctcaatgtagtgttttaataaaaaaggaacctaatatttgaaatgggtctcagacatgtctacaaatatgggtactatttttatgcccgtgtattttcacatttaataaaaatatttatggtcatatcagta

SEQ ID NO: 285539 - DNA, 5601 bp, Homo sapiens
  misc_feature (24)..(24): n is a, c, g, or t
  misc_feature (27)..(27): n is a, c, g, or t
  misc_feature (37)..(38): n is a, c, g, or t
  misc_feature (64)..(65): n is a, c, g, or t
  misc_feature (69)..(71): n is a, c, g, or t
  misc_feature (73)..(73): n is a, c, g, or t
  misc_feature (169)..(169): n is a, c, g, or t
  misc_feature (181)..(181): n is a, c, g, or t
  misc_feature (199)..(199): n is a, c, g, or t
  misc_feature (219)..(219): n is a, c, g, or t
  misc_feature (230)..(230): n is a, c, g, or t
  misc_feature (243)..(243): n is a, c, g, or t
  misc_feature (429)..(429): n is a, c, g, or t
  misc_feature (2570)..(2571): n is a, c, g, or t
gctcggtacccctttttctgtctnagntggtttcatnnaatgcagcacttggttagcagatgtnnaatnnntntttcttaatgaaatcaagcattctaattcactgtgggaggcatcctgaccacggacatccataacagctaagcacaaatcgttttcgtctgtagtnatatcctgaaanataggtggacaaattttnaactgagagacaaaaatcanatagttgaatngagcagaacactnaagtgctttctgcatctatttaggagtctatttcttaccaataaacttgacaacgcatttggaaaactagtgacaccttacagctttcatttgtgctttaatgtttcaattcaagccggtgtaaaaataatttccaaggcatttctgtttattctttagtaatctcactactggctatgtcagcantatctttttcaatctggcgcaagattacagagaggtcacttattactcaaacaaggaaaacttgatgaagcagaagatgattttaaaaaagtgctcaaatctaatccaagtgaaaatgaagaaaaggaagcacagtctcaacttataaaatctgatgaaatgcagcgtttgcgttcacaagcacttaacgcttttggaagtggagattatactgctgctatagccttccttgataagattttagaggtttgtgtttgggatgcagaactacgggaacttcgagctgaatgttttataaaagaaggagaacctaggaaagctataagtgacttaaaagctgcgtcaaagttgaagaatgataatactgaagcgttttataaaataagcacactgtactaccaactaggagaccacgaactgtccctcagtgaagttcgggaatgtcttaaacttgaccaggatcataaaaggtgttttgcacactataaacaagtaaagaaacttaataagctgattgagtcagctgaagagctcatcagagatggcagatacacagatgctaccagcaaatatgaatctgtcatgaaaacagagccaagcattgctgaatatacagttcgttcaaaggagaggatttgccactgcttttctaaggacgagaagcctgttgaagctattagggtttgttctgaagttttacagatggaacctgacaatgtgaatgccctgaaagatcgagcagaggcctatttgatagaggaaatgtatgatgaagctattcaggattatgaaactgctcaggaacacaatgaaaatgatcagcagattcgagaaggtctagagaaagcacaaagattattgaaacagtcgcagaaacgagattattataaaatcttgggagtaaaaagaaatgccaaaaagcaagaaattattaaagcataccgaaaattagcactgcagtggcacccagataacttccagaatgaagaagaaaagaaaaaagctgagaaaaagttcattgatatagcagctgctaaagaagtcctctctgatccagaaatgagaaagaagtttgacgacggagaagatcctttggatgcagagagccagcaaggaggcggcggcaaccctttccacagaagctggaactcatggcaagggttcaatcccttcagctcaggcggaccatttagatttaaattccacttcaattaaaccaactgtttttctgctcttcttaatttttttaaagattaaaaacaaagaaatcttgttccgggaccctaatgaaaaaaaatttcaaatcttttcagtttgtccatgaccaaagagttgctttaataggaaaaaatctgttcttatccctgtcagatttatggttaatgggtttgcaacggcaaggaggcaaggaatggttctatttctgacagagcagcctgcatctgctttatgctgtctggagggaagtggtctgaggcaggctcacccgtggaagtgctcacgtattctgtattatttttctacactggagctgagattcttctcttcacagccttgcagagtaagtcagtgcctacaagtgtaagaaggagctgtaatcttcatgaggatggttatacttcagtattcttaaagagaacatgaacatttttgagctgtatgttcttagggacaactgtgcttcgatgtggtcagtctcgtcacttgtgagtagctgtgaaatctttagtgtgcatgtgtttgcacctctgtggtctgtcaacgtggctgtcactgaaggagcaagagaccatcttttaggaaccctgccaccaaataataatatatccaggcttagactttggattaatgttaaatgtacatttttttggttcagtacctgaagaagaatactgaaacttgaatctataaattcctatggacccttttaatattaaacacaacaaattaaaagttgttataggtaaaataagttcagataaaatagtggtggtatttaaaataatattgctgaagtgcagattgaaatactttttaaacaactgaagttctgagtttttatagggaatttcatgtaacaagactggtttagaaacgtaaagttgcgcagtcaacataaataaatacagaatgccatgttnnccacttctaagtaaagacagtgggcagcttctgtttctccttctatcaaggcttcaccctatcttaaaggtctgtggtgcctcccacgtgggacctgtctgctggtatgtgttaaacagcagaccggcccttctaccagatcttgatgcctctgattttctcctgcctacaagaaaatacaggcaaggttagtcaggtctggctatatttccactgttgtttcatttaataagatggcatctcctcttgagatatgttcttcttaccttttaagaagatactatttaagaagtgaactattcagtctttgtatactgaatgctttttccctaaaaaatgttaatcaagaatattgaatatttatggcactcttgatgctgcatttgaaagctgaaggaattactttagatagataggaattgctacctttattctggaaaggttttgtttctgcctcaaagcattttgaagtgttttaaccattaaagggtctaatttttttttcttaatgaaatcaagcattttaattcactgtgggaggcatcctgaccacggacatccataacagcaaagcacaaatcgttttcgtctgtagtcatatcctgaaacataggtggacaaatttttaactgagagacaaaaatcacatagttgaattgagcagaacacttaagtgctttctgcatctatttaggagtctatttcttaccaataaacttgacaacgcatttggaaaactagtgaacaccttacagctttcattttgctttaatgtttcaattcaagccggtgtaaaaataatttccaaggcatttctgtttattctttagtaatctcactactggctatgtcagcaatatctttttcaatctggttccttttgtatatgatgtcactgtgacctctttgaaatatagtgatggcttttacctactttgaaaagaattttcacatagagtcagaaaaaaaaggaaatatcaaatcacttgcctttccacttggagagcacgacagttgccaacaacaaggggtcaagggccgcacaggagatgtgtgggggcctggccacctcccacctgctgcccagaggcttgtttgcattttcattttttctccacttgtaacaaccatagtttcagctcctaaattcttatcatggatttacttagtcatcttaactgacctgcagttacttgcctgttttcagtgaagagagagaagcagctctggtgccacatgccagtgccatggagggaaatgaattctctgcaatctgttgtttcgctgattcatgaagaaagtaacaactgttgagtttcagccttgatggctgtcggcagttttctggtgtccacccaaacggagagacagtcactcctgcttaccctaatgtgtgactgagaagcagcctgggtgtgtaaagagatagtcattccccctgcctgtctcactgtagggtagcattatccactgtaaaaccatactactttcattttcccttggggactacaggtgccaggtaaccttttttttttttttttttttttttgagacagaatcttgctctgttgcccaggctggagtgcagggacacctcccgggttcaagcagttctcctgcctcagcctccaagtagctgggactataggcacgcaccaccatgcctggctaatttttgtatttttagtagaaatggggtttcactgtgttagccaggatggtcttgatctcctgaccttgtgatctgcccgccttggccttccaaagtgttgggattacaggcgtgagccactgcgcctggccatcaggtaacctttatggctctttcaggaaaagtgaaatcagagaggcgtaccctagccacagctgttgtattctgctcttctttcctttttggtgagcttcatgggtggagttatcagtggtctgtactttgtggatattttgcccagcaggaagtattagacacatcagtctagaagcattgtgaaaaggttccaaaacgggagacaaaatttaattcattcctcagttctgaaagtttgtgctttcttaccatgaatagatgaaaacttgaaaaaaatcttgacagtttactaatgtgaatcagatgtaacgtactactaattctacaatgcctttctctttagtcagtattaaaaatcttttttaaagtattggtatgaaaacaaatttttgttgccctgataatggaattttaaaactacccacagtttaagagaaaacataacttggtaaaaaaggtagccaataaaaccacaatttgaaattgataccattttctactcacaatggatgatgaaaaatttcacctttaaatgggtcagaagttgtctttgacatttaccatgaaaaaactacataaaatggctccctggtgaggttacagacacggccctggtgatgggcgttgcaaagttttcactgagcacacagcaatggtatcacctagagaagttcacgcaactttgttgaatgtagttgacttttccaaatttataaaggaaggaagaaggcaaatgttaatttgccaacaacgaatatcctttttctaaatcagatcattccttttttgttagtggcagtttatcctgtaatttcaaatgacgttaagaggtgggattatttgggggttttttttgtttgtttacagatgatctcatttgctgaatgattgatttaagagtaaaattagccactgcgtggctttgtgtatagtaaccggttttgttgcacttgtctgtggctgaaacacttacctgcagtggaaagccgagcaaggaggaggtaaacattggagatgtttgtgaaaatattactcttgctgtgaggttttagtttgttttgaatgagaaaagactaagtaacttaatccatctcaatgtagtgttttaataaaaaaggaacctaatatttgaaatgggtctcagacatgtctacaaatatgggtactatttttatgcccgtgtattttcacatttaataaaaatatttatggtcatatcagta

SEQ ID NO: 285540 - DNA, 4634 bp, Homo sapiens
  misc_feature (1603)..(1604): n is a, c, g, or t
ctacaatgtgtgaaatgttgtctaccagggaagctcgttatagacactgcacccagagtttttttggggaactagtcactagacacgttctgtctggcctgcaccaaaatcccagactcccagaaggaaagatgtttaccataaactgtatttttcatacaaacagttcaggcatgagtcattcttaccatggaatgttgggaacactcctgaaatctggcttcccaaacgtcagcactattcaggattatgaaactgctcaggaacacaatgaaaatgatcagcagattcgagaaggtctagagaaagcacaaagattattgaaacagtcgcagaaacgagattattataaaatcttgggagtaaaaagaaatgccaaaaagcaagaaattattaaagcataccgaaaattagcactgcagtggcacccagataacttccagaatgaagaagaaaagaaaaaagctgagaaaaagttcattgatatagcagctgctaaagaagtcctctctgatccagaaatgagaaagaagtttgacgacggagaagatcctttggatgcagagagccagcaaggaggcggcggcaaccctttccacagaagctggaactcatggcaagggttcaatcccttcagctcaggcggaccatttagatttaaattccacttcaattaaaccaactgtttttctgctcttcttaatttttttaaagattaaaaacaaagaaatcttgttccgggaccctaatgaaaaaaaatttcaaatcttttcagtttgtccatgaccaaagagttgctttaataggaaaaaatctgttcttatccctgtcagatttatggttaatgggtttgcaacggcaaggaggcaaggaatggttctatttctgacagagcagcctgcatctgctttatgctgtctggagggaagtggtctgaggcaggctcacccgtggaagtgctcacgtattctgtattatttttctacactggagctgagattcttctcttcacagccttgcagagtaagtcagtgcctacaagtgtaagaaggagctgtaatcttcatgaggatggttatacttcagtattcttaaagagaacatgaacatttttgagctgtatgttcttagggacaactgtgcttcgatgtggtcagtctcgtcacttgtgagtagctgtgaaatctttagtgtgcatgtgtttgcacctctgtggtctgtcaacgtggctgtcactgaaggagcaagagaccatcttttaggaaccctgccaccaaataataatatatccaggcttagactttggattaatgttaaatgtacatttttttggttcagtacctgaagaagaatactgaaacttgaatctataaattcctatggacccttttaatattaaacacaacaaattaaaagttgttataggtaaaataagttcagataaaatagtggtggtatttaaaataatattgctgaagtgcagattgaaatactttttaaacaactgaagttctgagtttttatagggaatttcatgtaacaagactggtttagaaacgtaaagttgcgcagtcaacataaataaatacagaatgccatgttnnccacttctaagtaaagacagtgggcagcttctgtttctccttctatcaaggcttcaccctatcttaaaggtctgtggtgcctcccacgtgggacctgtctgctggtatgtgttaaacagcagaccggcccttctaccagatcttgatgcctctgattttctcctgcctacaagaaaatacaggcaaggttagtcaggtctggctatatttccactgttgtttcatttaataagatggcatctcctcttgagatatgttcttcttaccttttaagaagatactatttaagaagtgaactattcagtctttgtatactgaatgctttttccctaaaaaatgttaatcaagaatattgaatatttatggcactcttgatgctgcatttgaaagctgaaggaattactttagatagataggaattgctacctttattctggaaaggttttgtttctgcctcaaagcattttgaagtgttttaaccattaaagggtctaatttttttttcttaatgaaatcaagcattttaattcactgtgggaggcatcctgaccacggacatccataacagcaaagcacaaatcgttttcgtctgtagtcatatcctgaaacataggtggacaaatttttaactgagagacaaaaatcacatagttgaattgagcagaacacttaagtgctttctgcatctatttaggagtctatttcttaccaataaacttgacaacgcatttggaaaactagtgaacaccttacagctttcattttgctttaatgtttcaattcaagccggtgtaaaaataatttccaaggcatttctgtttattctttagtaatctcactactggctatgtcagcaatatctttttcaatctggttccttttgtatatgatgtcactgtgacctctttgaaatatagtgatggcttttacctactttgaaaagaattttcacatagagtcagaaaaaaaaggaaatatcaaatcacttgcctttccacttggagagcacgacagttgccaacaacaaggggtcaagggccgcacaggagatgtgtgggggcctggccacctcccacctgctgcccagaggcttgtttgcattttcattttttctccacttgtaacaaccatagtttcagctcctaaattcttatcatggatttacttagtcatcttaactgacctgcagttacttgcctgttttcagtgaagagagagaagcagctctggtgccacatgccagtgccatggagggaaatgaattctctgcaatctgttgtttcgctgattcatgaagaaagtaacaactgttgagtttcagccttgatggctgtcggcagttttctggtgtccacccaaacggagagacagtcactcctgcttaccctaatgtgtgactgagaagcagcctgggtgtgtaaagagatagtcattccccctgcctgtctcactgtagggtagcattatccactgtaaaaccatactactttcattttcccttggggactacaggtgccaggtaaccttttttttttttttttttttttttgagacagaatcttgctctgttgcccaggctggagtgcagggacacctcccgggttcaagcagttctcctgcctcagcctccaagtagctgggactataggcacgcaccaccatgcctggctaatttttgtatttttagtagaaatggggtttcactgtgttagccaggatggtcttgatctcctgaccttgtgatctgcccgccttggccttccaaagtgttgggattacaggcgtgagccactgcgcctggccatcaggtaacctttatggctctttcaggaaaagtgaaatcagagaggcgtaccctagccacagctgttgtattctgctcttctttcctttttggtgagcttcatgggtggagttatcagtggtctgtactttgtggatattttgcccagcaggaagtattagacacatcagtctagaagcattgtgaaaaggttccaaaacgggagacaaaatttaattcattcctcagttctgaaagtttgtgctttcttaccatgaatagatgaaaacttgaaaaaaatcttgacagtttactaatgtgaatcagatgtaacgtactactaattctacaatgcctttctctttagtcagtattaaaaatcttttttaaagtattggtatgaaaacaaatttttgttgccctgataatggaattttaaaactacccacagtttaagagaaaacataacttggtaaaaaaggtagccaataaaaccacaatttgaaattgataccattttctactcacaatggatgatgaaaaatttcacctttaaatgggtcagaagttgtctttgacatttaccatgaaaaaactacataaaatggctccctggtgaggttacagacacggccctggtgatgggcgttgcaaagttttcactgagcacacagcaatggtatcacctagagaagttcacgcaactttgttgaatgtagttgacttttccaaatttataaaggaaggaagaaggcaaatgttaatttgccaacaacgaatatcctttttctaaatcagatcattccttttttgttagtggcagtttatcctgtaatttcaaatgacgttaagaggtgggattatttgggggttttttttgtttgtttacagatgatctcatttgctgaatgattgatttaagagtaaaattagccactgcgtggctttgtgtatagtaaccggttttgttgcacttgtctgtggctgaaacacttacctgcagtggaaagccgagcaaggaggaggtaaacattggagatgtttgtgaaaatattactcttgctgtgaggttttagtttgttttgaatgagaaaagactaagtaacttaatccatctcaatgtagtgttttaataaaaaaggaacctaatatttgaaatgggtctcagacatgtctacaaatatgggtactatttttatgcccgtgtattttcacatttaataaaaatatttatggtcatatcagta

SEQ ID NO: 285541 - DNA, 6536 bp, Homo sapiens
  misc_feature (3132)..(3133): n is a, c, g, or t
aaattattcacaaaaagcagctggaaatcagaaaggcagctgccgctccagggtctcaaatccattaaaaccaccacagaacaattaaaacaatcagagagagaaaaggaaaaggaaacaacgtccaacatttggcatttggttttatccacaggttttcccagagctcctcttggaattgaaagcaaaatatattggcaaacactgcttctcaatacacaggaaggggagcctcagtgcctcctgccaacagaggcggctctgtgcagtcagactgtggggtgcacagcagtctctcaggctggggtttctggcctctttccatccaatcaccccttccaggaaattcagcagcctaccagacactgggcctctgcctggctgccctttcccccaggcagagcggccttgggcataataccaggcaacctgccagccccagagcagaaaccctgctgggatcccttccttcatcaaccttggtgtggaggatgctcaatagcgcttccacctccccctccccagcccctagctacatctctccacccttccctggacagtcctacttcccagctcacccacccaccagcagcttaagtctgggtgggatctatcatcagctcctccccctgtaacctcttccctccacagatccaccctgtgactcctcttcactcgcgagccctcggacatggtggcccccggctccgtgaccagccggctgggctcggtattccccttcctgctagtcctggtggatctgcagtacgaaggtgctgaatgtggagtaaatgcagatgttgagaaacatcttgaattgggcaagaaattacttgcagctggacagctagctgatgctttatctcagtttcatgctgccgtagatggtgaccctgataactatattgcttattatcggagggctactgtctttttagctatgggcaaatcaaaagctgcacttcctgatttaactaaagtgattcaattgaagatggacttcactgcagcaagattacagagaggtcacttattactcaaacaaggaaaacttgatgaagcagaagatgattttaaaaaagtgctcaaatctaatccaagtgaaaatgaagaaaaggaagcacagtctcaacttataaaatctgatgaaatgcagcgtttgcgttcacaagcacttaacgcttttggaagtggagattatactgctgctatagccttccttgataagattttagaggtttgtgtttgggatgcagaactacgggaacttcgagctgaatgttttataaaagaaggagaacctaggaaagctataagtgacttaaaagctgcgtcaaagttgaagaatgataatactgaagcgttttataaaataagcacactgtactaccaactaggagaccacgaactgtccctcagtgaagttcgggaatgtcttaaacttgaccaggatcataaaaggtgttttgcacactataaacaagtaaagaaacttaataagctgattgagtcagctgaagagctcatcagagatggcagatacacagatgctaccagcaaatatgaatctgtcatgaaaacagagccaagcattgctgaatatacagttcgttcaaaggagaggatttgccactgcttttctaaggacgagaagcctgttgaagctattagggtttgttctgaagttttacagatggaacctgacaatgtgaatgccctgaaagatcgagcagaggcctatttgatagaggaaatgtatgatgaagctattcaggattatgaaactgctcaggaacacaatgaaaatgatcagcagattcgagaaggtctagagaaagcacaaagattattgaaacagtcgcagaaacgagattattataaaatcttgggagtaaaaagaaatgccaaaaagcaagaaattattaaagcataccgaaaattagcactgcagtggcacccagataacttccagaatgaagaagaaaagaaaaaagctgagaaaaagttcattgatatagcagctgctaaagaagtcctctctgatccagaaatgagaaagaagtttgacgacggagaagatcctttggatgcagagagccagcaaggaggcggcggcaaccctttccacagaagctggaactcatggcaagggttcaatcccttcagctcaggcggaccatttagatttaaattccacttcaattaaaccaactgtttttctgctcttcttaatttttttaaagattaaaaacaaagaaatcttgttccgggaccctaatgaaaaaaaatttcaaatcttttcagtttgtccatgaccaaagagttgctttaataggaaaaaatctgttcttatccctgtcagatttatggttaatgggtttgcaacggcaaggaggcaaggaatggttctatttctgacagagcagcctgcatctgctttatgctgtctggagggaagtggtctgaggcaggctcacccgtggaagtgctcacgtattctgtattatttttctacactggagctgagattcttctcttcacagccttgcagagtaagtcagtgcctacaagtgtaagaaggagctgtaatcttcatgaggatggttatacttcagtattcttaaagagaacatgaacatttttgagctgtatgttcttagggacaactgtgcttcgatgtggtcagtctcgtcacttgtgagtagctgtgaaatctttagtgtgcatgtgtttgcacctctgtggtctgtcaacgtggctgtcactgaaggagcaagagaccatcttttaggaaccctgccaccaaataataatatatccaggcttagactttggattaatgttaaatgtacatttttttggttcagtacctgaagaagaatactgaaacttgaatctataaattcctatggacccttttaatattaaacacaacaaattaaaagttgttataggtaaaataagttcagataaaatagtggtggtatttaaaataatattgctgaagtgcagattgaaatactttttaaacaactgaagttctgagtttttatagggaatttcatgtaacaagactggtttagaaacgtaaagttgcgcagtcaacataaataaatacagaatgccatgttnnccacttctaagtaaagacagtgggcagcttctgtttctccttctatcaaggcttcaccctatcttaaaggtctgtggtgcctcccacgtgggacctgtctgctggtatgtgttaaacagcagaccggcccttctaccagatcttgatgcctctgattttctcctgcctacaagaaaatacaggcaaggttagtcaggtctggctatatttccactgttgtttcatttaataagatggcatctcctcttgagatatgttcttcttaccttttaagaagatactatttaagaagtgaactattcagtctttgtatactgaatgctttttccctaaaaaatgttaatcaagaatattgaatatttatggcactcttgatgctgcatttgaaagctgaaggaattactttagatagataggaattgctacctttattctggaaaggttttgtttctgcctcaaagcattttgaagtgttttaaccattaaagggtctaatttttttttcttaatgaaatcaagcattttaattcactgtgggaggcatcctgaccacggacatccataacagcaaagcacaaatcgttttcgtctgtagtcatatcctgaaacataggtggacaaatttttaactgagagacaaaaatcacatagttgaattgagcagaacacttaagtgctttctgcatctatttaggagtctatttcttaccaataaacttgacaacgcatttggaaaactagtgaacaccttacagctttcattttgctttaatgtttcaattcaagccggtgtaaaaataatttccaaggcatttctgtttattctttagtaatctcactactggctatgtcagcaatatctttttcaatctggttccttttgtatatgatgtcactgtgacctctttgaaatatagtgatggcttttacctactttgaaaagaattttcacatagagtcagaaaaaaaaggaaatatcaaatcacttgcctttccacttggagagcacgacagttgccaacaacaaggggtcaagggccgcacaggagatgtgtgggggcctggccacctcccacctgctgcccagaggcttgtttgcattttcattttttctccacttgtaacaaccatagtttcagctcctaaattcttatcatggatttacttagtcatcttaactgacctgcagttacttgcctgttttcagtgaagagagagaagcagctctggtgccacatgccagtgccatggagggaaatgaattctctgcaatctgttgtttcgctgattcatgaagaaagtaacaactgttgagtttcagccttgatggctgtcggcagttttctggtgtccacccaaacggagagacagtcactcctgcttaccctaatgtgtgactgagaagcagcctgggtgtgtaaagagatagtcattccccctgcctgtctcactgtagggtagcattatccactgtaaaaccatactactttcattttcccttggggactacaggtgccaggtaaccttttttttttttttttttttttttgagacagaatcttgctctgttgcccaggctggagtgcagggacacctcccgggttcaagcagttctcctgcctcagcctccaagtagctgggactataggcacgcaccaccatgcctggctaatttttgtatttttagtagaaatggggtttcactgtgttagccaggatggtcttgatctcctgaccttgtgatctgcccgccttggccttccaaagtgttgggattacaggcgtgagccactgcgcctggccatcaggtaacctttatggctctttcaggaaaagtgaaatcagagaggcgtaccctagccacagctgttgtattctgctcttctttcctttttggtgagcttcatgggtggagttatcagtggtctgtactttgtggatattttgcccagcaggaagtattagacacatcagtctagaagcattgtgaaaaggttccaaaacgggagacaaaatttaattcattcctcagttctgaaagtttgtgctttcttaccatgaatagatgaaaacttgaaaaaaatcttgacagtttactaatgtgaatcagatgtaacgtactactaattctacaatgcctttctctttagtcagtattaaaaatcttttttaaagtattggtatgaaaacaaatttttgttgccctgataatggaattttaaaactacccacagtttaagagaaaacataacttggtaaaaaaggtagccaataaaaccacaatttgaaattgataccattttctactcacaatggatgatgaaaaatttcacctttaaatgggtcagaagttgtctttgacatttaccatgaaaaaactacataaaatggctccctggtgaggttacagacacggccctggtgatgggcgttgcaaagttttcactgagcacacagcaatggtatcacctagagaagttcacgcaactttgttgaatgtagttgacttttccaaatttataaaggaaggaagaaggcaaatgttaatttgccaacaacgaatatcctttttctaaatcagatcattccttttttgttagtggcagtttatcctgtaatttcaaatgacgttaagaggtgggattatttgggggttttttttgtttgtttacagatgatctcatttgctgaatgattgatttaagagtaaaattagccactgcgtggctttgtgtatagtaaccggttttgttgcacttgtctgtggctgaaacacttacctgcagtggaaagccgagcaaggaggaggtaaacattggagatgtttgtgaaaatattactcttgctgtgaggttttagtttgttttgaatgagaaaagactaagtaacttaatccatctcaatgtagtgttttaataaaaaaggaacctaatatttgaaatgggtctcagacatgtctacaaatatgggtactatttttatgcccgtgtattttcacatttaataaaaatatttatggtcatatcagtatttccttgcttttgattcatttttgtccttgagtataaaattctaagaaagtccgtcttaggaaaagtctattatttccagctttgcttcacgcaaaaccagtgactgaggtgacaaaagggctcttcctttacacaagttgacagggaaggtcagaacacacaaagcagaaagggctaaaataaaatctcttaaccctcaaaagtcctaggacaactaaggacttaaaaagtggacaagtcttccatttcagtgctattaaaatgtaacacttaaattggctttgtctgaagattttctcttctcttttataccccatttgtacatttctgttaaggtcctaagttgggaggaaggaaggacactatagcct

SEQ ID NO: 285542 - DNA, 4321 bp, Homo sapiens
  misc_feature (3132)..(3133): n is a, c, g, or t
aaattattcacaaaaagcagctggaaatcagaaaggcagctgccgctccagggtctcaaatccattaaaaccaccacagaacaattaaaacaatcagagagagaaaaggaaaaggaaacaacgtccaacatttggcatttggttttatccacaggttttcccagagctcctcttggaattgaaagcaaaatatattggcaaacactgcttctcaatacacaggaaggggagcctcagtgcctcctgccaacagaggcggctctgtgcagtcagactgtggggtgcacagcagtctctcaggctggggtttctggcctctttccatccaatcaccccttccaggaaattcagcagcctaccagacactgggcctctgcctggctgccctttcccccaggcagagcggccttgggcataataccaggcaacctgccagccccagagcagaaaccctgctgggatcccttccttcatcaaccttggtgtggaggatgctcaatagcgcttccacctccccctccccagcccctagctacatctctccacccttccctggacagtcctacttcccagctcacccacccaccagcagcttaagtctgggtgggatctatcatcagctcctccccctgtaacctcttccctccacagatccaccctgtgactcctcttcactcgcgagccctcggacatggtggcccccggctccgtgaccagccggctgggctcggtattccccttcctgctagtcctggtggatctgcagtacgaaggtgctgaatgtggagtaaatgcagatgttgagaaacatcttgaattgggcaagaaattacttgcagctggacagctagctgatgctttatctcagtttcatgctgccgtagatggtgaccctgataactatattgcttattatcggagggctactgtctttttagctatgggcaaatcaaaagctgcacttcctgatttaactaaagtgattcaattgaagatggacttcactgcagcaagattacagagaggtcacttattactcaaacaaggaaaacttgatgaagcagaagatgattttaaaaaagtgctcaaatctaatccaagtgaaaatgaagaaaaggaagcacagtctcaacttataaaatctgatgaaatgcagcgtttgcgttcacaagcacttaacgcttttggaagtggagattatactgctgctatagccttccttgataagattttagaggtttgtgtttgggatgcagaactacgggaacttcgagctgaatgttttataaaagaaggagaacctaggaaagctataagtgacttaaaagctgcgtcaaagttgaagaatgataatactgaagcgttttataaaataagcacactgtactaccaactaggagaccacgaactgtccctcagtgaagttcgggaatgtcttaaacttgaccaggatcataaaaggtgttttgcacactataaacaagtaaagaaacttaataagctgattgagtcagctgaagagctcatcagagatggcagatacacagatgctaccagcaaatatgaatctgtcatgaaaacagagccaagcattgctgaatatacagttcgttcaaaggagaggatttgccactgcttttctaaggacgagaagcctgttgaagctattagggtttgttctgaagttttacagatggaacctgacaatgtgaatgccctgaaagatcgagcagaggcctatttgatagaggaaatgtatgatgaagctattcaggattatgaaactgctcaggaacacaatgaaaatgatcagcagattcgagaaggtctagagaaagcacaaagattattgaaacagtcgcagaaacgagattattataaaatcttgggagtaaaaagaaatgccaaaaagcaagaaattattaaagcataccgaaaattagcactgcagtggcacccagataacttccagaatgaagaagaaaagaaaaaagctgagaaaaagttcattgatatagcagctgctaaagaagtcctctctgatccagaaatgagaaagaagtttgacgacggagaagatcctttggatgcagagagccagcaaggaggcggcggcaaccctttccacagaagctggaactcatggcaagggttcaatcccttcagctcaggcggaccatttagatttaaattccacttcaattaaaccaactgtttttctgctcttcttaatttttttaaagattaaaaacaaagaaatcttgttccgggaccctaatgaaaaaaaatttcaaatcttttcagtttgtccatgaccaaagagttgctttaataggaaaaaatctgttcttatccctgtcagatttatggttaatgggtttgcaacggcaaggaggcaaggaatggttctatttctgacagagcagcctgcatctgctttatgctgtctggagggaagtggtctgaggcaggctcacccgtggaagtgctcacgtattctgtattatttttctacactggagctgagattcttctcttcacagccttgcagagtaagtcagtgcctacaagtgtaagaaggagctgtaatcttcatgaggatggttatacttcagtattcttaaagagaacatgaacatttttgagctgtatgttcttagggacaactgtgcttcgatgtggtcagtctcgtcacttgtgagtagctgtgaaatctttagtgtgcatgtgtttgcacctctgtggtctgtcaacgtggctgtcactgaaggagcaagagaccatcttttaggaaccctgccaccaaataataatatatccaggcttagactttggattaatgttaaatgtacatttttttggttcagtacctgaagaagaatactgaaacttgaatctataaattcctatggacccttttaatattaaacacaacaaattaaaagttgttataggtaaaataagttcagataaaatagtggtggtatttaaaataatattgctgaagtgcagattgaaatactttttaaacaactgaagttctgagtttttatagggaatttcatgtaacaagactggtttagaaacgtaaagttgcgcagtcaacataaataaatacagaatgccatgttnnccacttctaagtaaagacagtgggcagcttctgtttctccttctatcaaggcttcaccctatcttaaaggtctgtggtgcctcccacgtgggacctgtctgctggtatgtgttaaacagcagaccggcccttctaccagatcttgatgcctctgattttctcctgcctacaagaaaatacaggcaaggttagtcaggtctggctatatttccactgttgtttcatttaataagatggcatctcctcttgagatatgttcttcttaccttttaagaagatactatttaagaagtgaactattcagtctttgtatactgaatgctttttccctaaaaaatgttaatcaagaatattgaatatttatggcactcttgatgctgcatttgaaagctgaaggaattactttagatagataggaattgctacctttattctggaaaggttttgtttctgcctcaaagcattttgaagtgttttaaccattaaagggtctaatttttttttcttaatgaaatcaagcattttaattcactgtgggaggcatcctgaccacggacatccataacagcaaagcacaaatcgttttcgtctgtagtcatatcctgaaacataggtggacaaatttttaactgagagacaaaaatcacatagttgaattgagcagaacacttaagtgctttctgcatctatttaggagtctatttcttaccaataaacttgacaacgcatttggaaaactagtgaacaccttacagctttcattttgctttaatgtttcaattcaagccggtgtaaaaataatttccaaggcatttctgtttattctttagtaatctcactactggctatgtcagcaatatctttttcaatctggttccttttgtatatgatgtcactgtgacctctttgaaatatagtgatggcttttacctactttgaaaagaattttcacatagagtcagaaaaaaaaggaaatatcaaatcacttgcctttccacttggagagcacgacagttgccaacaacaaggggtcaagggccgcacaggagatgtgtgggggcctggccacctcccacctgctgcccagaggcttgtttgcattttcattttttctccacttgtaacaacagattgcagagaattcatttccctccatggcactggcatgtggcaccagagctgtcgacg

SEQ ID NO: 285543 - DNA, 2748 bp, Homo sapiens
aaattattcacaaaaagcagctggaaatcagaaaggcagctgccgctccagggtctcaaatccattaaaaccaccacagaacaattaaaacaatcagagagagaaaaggaaaaggaaacaacgtccaacatttggcatttggttttatccacaggttttcccagagctcctcttggaattgaaagcaaaatatattggcaaacactgcttctcaatacacaggaaggggagcctcagtgcctcctgccaacagaggcggctctgtgcagtcagactgtggggtgcacagcagtctctcaggctggggtttctggcctctttccatccaatcaccccttccaggaaattcagcagcctaccagacactgggcctctgcctggctgccctttcccccaggcagagcggccttgggcataataccaggcaacctgccagccccagagcagaaaccctgctgggatcccttccttcatcaaccttggtgtggaggatgctcaatagcgcttccacctccccctccccagcccctagctacatctctccacccttccctggacagtcctacttcccagctcacccacccaccagcagcttaagtctgggtgggatctatcatcagctcctccccctgtaacctcttccctccacagatccaccctgtgactcctcttcactcgcgagccctcggacatggtggcccccggctccgtgaccagccggctgggctcggtattccccttcctgctagtcctggtggatctgcagtacgaaggtgctgaatgtggagtaaatgcagatgttgagaaacatcttgaattgggcaagaaattacttgcagctggacagctagctgatgctttatctcagtttcatgctgccgtagatggtgaccctgataactatattgcttattatcggagggctactgtctttttagctatgggcaaatcaaaagctgcacttcctgatttaactaaagtgattcaattgaagatggacttcactgcagcaagattacagagaggtcacttattactcaaacaaggaaaacttgatgaagcagaagatgattttaaaaaagtgctcaaatctaatccaagtgaaaatgaagaaaaggaagcacagtctcaacttataaaatctgatgaaatgcagcgtttgcgttcacaagcacttaacgcttttggaagtggagattatactgctgctatagccttccttgataagattttagaggtttgtgtttgggatgcagaactacgggaacttcgagctgaatgttttataaaagaaggagaacctaggaaagctataagtgacttaaaagctgcgtcaaagttgaagaatgataatactgaagcgttttataaaataagcacactgtactaccaactaggagaccacgaactgtccctcagtgaagttcgggaatgtcttaaacttgaccaggatcataaaaggtgttttgcacactataaacaagtaaagaaacttaataagctgattgagtcagctgaagagctcatcagagatggcagatacacagatgctaccagcaaatatgaatctgtcatgaaaacagagccaagcattgctgaatatacagttcgttcaaaggagaggatttgccactgcttttctaaggacgagaagcctgttgaagctattagggtttgttctgaagttttacagatggaacctgacaatgtgaatgccctgaaagatcgagcagaggcctatttgatagaggaaatgtatgatgaagctattcaggattatgaaactgctcaggaacacaatgaaaatgatcagcagattcgagaaggtctagagaaagcacaaagattattgaaacagtcgcagaaacgagattattataaaatcttgggagtaaaaagaaatgccaaaaagcaagaaattattaaagcataccgaaaattagcactgcagtggcacccagataacttccagaatgaagaagaaaagaaaaaagctgagaaaaagttcattgatatagcagctgctaaagaagtcctctctgatccagaaatgagaaagaagtttgacgacggagaagatcctttggatgcagagagccagcaaggaggcggcggcaaccctttccacagaagctggaactcatggcaagggttcaatcccttcagctcaggcggaccatttagatttaaattccacttcaattaaaccaactgtttttctgctcttcttaatttttttaaagattaaaaacaaagaaatcttgttccgggaccctaatgaaaaaaaatttcaaatcttttcagtttgtccatgaccaaagagttgctttaataggaaaaaatctgttcttatccctgtcagatttatggttaatgggtttgcaacggcaaggaggcaaggaatggttctatttctgacagagcagcctgcatctgctttatgctgtctggagggaagtggtctgaggcaggctcacccgtggaagtgctcacgtattctgtattatttttctacactggagctgagattcttctcttcacagccttgcagagtaagtcagtgcctacaagtgtaagaaggagctgtaatcttcatgaggatggttatacttcagtattcttaaagagaacatgaacatttttgagctgtatgttcttagggacaactgtgcttcgatgtggtcagtctcgtcacttgtgagtagcaccacagcagcaccacgaatcgcgggggtccacagagcgggc

SEQ ID NO: 285544 - DNA, 1255 bp, Homo sapiens
gcggccgccaccgactccccgtctgcttccctccgggcggcagccgcggtttggagcttgctgacagctctgcgaccggcgggcgcagcctcgtctcgtgcttccacgttatcctatcagggacggggcggggcggcggcctccgcagcctatcagcgcgaaccacgaccccggcgagcccgggaggaaagccgccagaaagaaggcgattggatggcggcggcgctctggggcgtagcgtcgcccgggccccgcccaccgctgccttcctctgctgggctccagagccactgaggcctgagcgagagccgacggcgggcgggcgcagctgctgccggagcgccggcgcgtgctggtgggccacacacctttcctcctcttcactcgcgagccctcggacatggtggcccccggctccgtgaccagccggctgggctcggtattccccttcctgctagtcctggtggatctgcagtacgaaggtgctgaatgtggagtaaatgcagatgttgagaaacatcttgaattgggcaagaaattacttgcagctggacagctagctgatgctttatctcagtttcatgctgccgtagatggtgaccctgataactatattgcttattatcggagggctactgtctttttagctatgggcaaatcaaaagctgcacttcctgatttaactaaagtgattcaattgaagatggacttcactgcagcaagattacagagaggtcacttattactcaaacaaggaaaacttgatgaagcagaagatgattttaaaaaagtgctcaaatctaatccaagtgaaaatgaagaaaaggaagcacagtctcaacttataaaatctgatgaaatgcagcgtttgcgttcacaagcacttaacgcttttggaagtggagattatactgctgctatagccttccttgataagattttagaggtaagtttcttagatactgcagttgaccagcctgacacttattgtaaggcacatttatatacttcgacatgtcacataccacaaagacctagacaggagaaaatcaggttggtccttgggcttttgcctcttaagtataaaatagtgttcctagacaacaaaatttggactgaagttttcagtaaatgtactgaatgtgctgtggcatgagagttaaatatgtttataaattgcttgctttgctattttagttgattttgtatttttttgggaagaaaactctagcggttagataatgggataaaagat

SEQ ID NO: 285545 - DNA, 187 bp, Homo sapiens
aagctgcacttcctgatttaactaaagtgattcaattgaagatggacttcactgcagtaagtatatctcaactttctttaaaggggaacttaacagaacttggggagagataatttgtttcataaggtgaggactggcatgctagacatagctggaagagatcaaagctacagtgatgttgtggact

SEQ ID NO: 285546 - DNA, 321 bp, Homo sapiens
cacccaccctcctctgcccaaagaaaacattccccctgcccctataccttagatattatctggttcttaattttctgatttctttctagaaatgagaaagaagtttgacgacggagaagatcctttggatgcagagagccagcaaggaggcggcggcaaccctttccacagaagctggaactcatggcaagggttcaatcccttcagctcaggcggaccatttagatttaaattccacttcaattaaaccaactgtttttctgctcttcttaatttttttaaagattaaaaacaaagaaatcttgttccgggaccctaatg

SEQ ID NO: 285547 - DNA, 5390 bp, Homo sapiens
  misc_feature (3132)..(3133): n is a, c, g, or t
  misc_feature (5361)..(5361): n is a, c, g, or t
  misc_feature (5384)..(5384): n is a, c, g, or t
aaattattcacaaaaagcagctggaaatcagaaaggcagctgccgctccagggtctcaaatccattaaaaccaccacagaacaattaaaacaatcagagagagaaaaggaaaaggaaacaacgtccaacatttggcatttggttttatccacaggttttcccagagctcctcttggaattgaaagcaaaatatattggcaaacactgcttctcaatacacaggaaggggagcctcagtgcctcctgccaacagaggcggctctgtgcagtcagactgtggggtgcacagcagtctctcaggctggggtttctggcctctttccatccaatcaccccttccaggaaattcagcagcctaccagacactgggcctctgcctggctgccctttcccccaggcagagcggccttgggcataataccaggcaacctgccagccccagagcagaaaccctgctgggatcccttccttcatcaaccttggtgtggaggatgctcaatagcgcttccacctccccctccccagcccctagctacatctctccacccttccctggacagtcctacttcccagctcacccacccaccagcagcttaagtctgggtgggatctatcatcagctcctccccctgtaacctcttccctccacagatccaccctgtgactcctcttcactcgcgagccctcggacatggtggcccccggctccgtgaccagccggctgggctcggtattccccttcctgctagtcctggtggatctgcagtacgaaggtgctgaatgtggagtaaatgcagatgttgagaaacatcttgaattgggcaagaaattacttgcagctggacagctagctgatgctttatctcagtttcatgctgccgtagatggtgaccctgataactatattgcttattatcggagggctactgtctttttagctatgggcaaatcaaaagctgcacttcctgatttaactaaagtgattcaattgaagatggacttcactgcagcaagattacagagaggtcacttattactcaaacaaggaaaacttgatgaagcagaagatgattttaaaaaagtgctcaaatctaatccaagtgaaaatgaagaaaaggaagcacagtctcaacttataaaatctgatgaaatgcagcgtttgcgttcacaagcacttaacgcttttggaagtggagattatactgctgctatagccttccttgataagattttagaggtttgtgtttgggatgcagaactacgggaacttcgagctgaatgttttataaaagaaggagaacctaggaaagctataagtgacttaaaagctgcgtcaaagttgaagaatgataatactgaagcgttttataaaataagcacactgtactaccaactaggagaccacgaactgtccctcagtgaagttcgggaatgtcttaaacttgaccaggatcataaaaggtgttttgcacactataaacaagtaaagaaacttaataagctgattgagtcagctgaagagctcatcagagatggcagatacacagatgctaccagcaaatatgaatctgtcatgaaaacagagccaagcattgctgaatatacagttcgttcaaaggagaggatttgccactgcttttctaaggacgagaagcctgttgaagctattagggtttgttctgaagttttacagatggaacctgacaatgtgaatgccctgaaagatcgagcagaggcctatttgatagaggaaatgtatgatgaagctattcaggattatgaaactgctcaggaacacaatgaaaatgatcagcagattcgagaaggtctagagaaagcacaaagattattgaaacagtcgcagaaacgagattattataaaatcttgggagtaaaaagaaatgccaaaaagcaagaaattattaaagcataccgaaaattagcactgcagtggcacccagataacttccagaatgaagaagaaaagaaaaaagctgagaaaaagttcattgatatagcagctgctaaagaagtcctctctgatccagaaatgagaaagaagtttgacgacggagaagatcctttggatgcagagagccagcaaggaggcggcggcaaccctttccacagaagctggaactcatggcaagggttcaatcccttcagctcaggcggaccatttagatttaaattccacttcaattaaaccaactgtttttctgctcttcttaatttttttaaagattaaaaacaaagaaatcttgttccgggaccctaatgaaaaaaaatttcaaatcttttcagtttgtccatgaccaaagagttgctttaataggaaaaaatctgttcttatccctgtcagatttatggttaatgggtttgcaacggcaaggaggcaaggaatggttctatttctgacagagcagcctgcatctgctttatgctgtctggagggaagtggtctgaggcaggctcacccgtggaagtgctcacgtattctgtattatttttctacactggagctgagattcttctcttcacagccttgcagagtaagtcagtgcctacaagtgtaagaaggagctgtaatcttcatgaggatggttatacttcagtattcttaaagagaacatgaacatttttgagctgtatgttcttagggacaactgtgcttcgatgtggtcagtctcgtcacttgtgagtagctgtgaaatctttagtgtgcatgtgtttgcacctctgtggtctgtcaacgtggctgtcactgaaggagcaagagaccatcttttaggaaccctgccaccaaataataatatatccaggcttagactttggattaatgttaaatgtacatttttttggttcagtacctgaagaagaatactgaaacttgaatctataaattcctatggacccttttaatattaaacacaacaaattaaaagttgttataggtaaaataagttcagataaaatagtggtggtatttaaaataatattgctgaagtgcagattgaaatactttttaaacaactgaagttctgagtttttatagggaatttcatgtaacaagactggtttagaaacgtaaagttgcgcagtcaacataaataaatacagaatgccatgttnnccacttctaagtaaagacagtgggcagcttctgtttctccttctatcaaggcttcaccctatcttaaaggtctgtggtgcctcccacgtgggacctgtctgctggtatgtgttaaacagcagaccggcccttctaccagatcttgatgcctctgattttctcctgcctacaagaaaatacaggcaaggttagtcaggtctggctatatttccactgttgtttcatttaataagatggcatctcctcttgagatatgttcttcttaccttttaagaagatactatttaagaagtgaactattcagtctttgtatactgaatgctttttccctaaaaaatgttaatcaagaatattgaatatttatggcactcttgatgctgcatttgaaagctgaaggaattactttagatagataggaattgctacctttattctggaaaggttttgtttctgcctcaaagcattttgaagtgttttaaccattaaagggtctaatttttttttcttaatgaaatcaagcattttaattcactgtgggaggcatcctgaccacggacatccataacagcaaagcacaaatcgttttcgtctgtagtcatatcctgaaacataggtggacaaatttttaactgagagacaaaaatcacatagttgaattgagcagaacacttaagtgctttctgcatctatttaggagtctatttcttaccaataaacttgacaacgcatttggaaaactagtgaacaccttacagctttcattttgctttaatgtttcaattcaagccggtgtaaaaataatttccaaggcatttctgtttattctttagtaatctcactactggctatgtcagcaatatctttttcaatctggttccttttgtatatgatgtcactgtgacctctttgaaatatagtgatggcttttacctactttgaaaagaattttcacatagagtcagaaaaaaaaggaaatatcaaatcacttgcctttccacttggagagcacgacagttgccaacaacaaggggtcaagggccgcacaggagatgtgtgggggcctggccacctcccacctgctgcccagaggcttgtttgcattttcattttttctccacttgtaacaaccatagtttcagctcctaaattcttatcatggatttacttagtcatcttaactgacctgcagttacttgcctgttttcagtgaagagagagaagcagctctggtgccacatgccagtgccatggagggaaatgaattctctgcaatctgttgtttcgctgattcatgaagaaagtaacaactgttgagtttcagccttgatggctgtcggcagttttctggtgtccacccaaacggagagacagtcactcctgcttaccctaatgtgtgactgagaagcagcctgggtgtgtaaagagatagtcattccccctgcctgtctcactgtagggtagcattatccactgtaaaaccatactactttcattttcccttggggactacaggtgccaggtaaccttttttttttttttttttttttttgagacagaatcttgctctgttgcccaggctggagtgcagggacacctcccgggttcaagcagttctcctgcctcagcctccaagtagctgggactataggcacgcaccaccatgcctggctaatttttgtatttttagtagaaatggggtttcactgtgttagccaggatggtcttgatctcctgaccttgtgatctgcccgccttggccttccaaagtgttgggattacaggcgtgagccactgcgcctggccatcaggtaacctttatggctctttcaggaaaagtgaaatcagagaggcgtaccctagccacagctgttgtattctgctcttctttcctttttggtgagcttcatgggtggagttatcagtggtctgtactttgtggatattttgcccagcaggaagtattagacacatcagtctagaagcattgtgaaaaggttgtttccggtgtggctgtgtctgattcgagtgttgctgccaatgcgcaggtgctctcgaaaggaagtggtgtcagcatttcggcgacggggggtagctctcagagtaagtgatgaggtgcaaacgagttccggtgggcatggattcgctaggcagctcgctcaatgtacgccaggtgacgatggctgcaggtattttggcaccgatggagtgaagtaaaacgccattggatnacaagtatgccggtcaagaaccncttgcc

SEQ ID NO: 285548 - DNA, 3141 bp, Homo sapiens
  misc_feature (3132)..(3133): n is a, c, g, or t
aaattattcacaaaaagcagctggaaatcagaaaggcagctgccgctccagggtctcaaatccattaaaaccaccacagaacaattaaaacaatcagagagagaaaaggaaaaggaaacaacgtccaacatttggcatttggttttatccacaggttttcccagagctcctcttggaattgaaagcaaaatatattggcaaacactgcttctcaatacacaggaaggggagcctcagtgcctcctgccaacagaggcggctctgtgcagtcagactgtggggtgcacagcagtctctcaggctggggtttctggcctctttccatccaatcaccccttccaggaaattcagcagcctaccagacactgggcctctgcctggctgccctttcccccaggcagagcggccttgggcataataccaggcaacctgccagccccagagcagaaaccctgctgggatcccttccttcatcaaccttggtgtggaggatgctcaatagcgcttccacctccccctccccagcccctagctacatctctccacccttccctggacagtcctacttcccagctcacccacccaccagcagcttaagtctgggtgggatctatcatcagctcctccccctgtaacctcttccctccacagatccaccctgtgactcctcttcactcgcgagccctcggacatggtggcccccggctccgtgaccagccggctgggctcggtattccccttcctgctagtcctggtggatctgcagtacgaaggtgctgaatgtggagtaaatgcagatgttgagaaacatcttgaattgggcaagaaattacttgcagctggacagctagctgatgctttatctcagtttcatgctgccgtagatggtgaccctgataactatattgcttattatcggagggctactgtctttttagctatgggcaaatcaaaagctgcacttcctgatttaactaaagtgattcaattgaagatggacttcactgcagcaagattacagagaggtcacttattactcaaacaaggaaaacttgatgaagcagaagatgattttaaaaaagtgctcaaatctaatccaagtgaaaatgaagaaaaggaagcacagtctcaacttataaaatctgatgaaatgcagcgtttgcgttcacaagcacttaacgcttttggaagtggagattatactgctgctatagccttccttgataagattttagaggtttgtgtttgggatgcagaactacgggaacttcgagctgaatgttttataaaagaaggagaacctaggaaagctataagtgacttaaaagctgcgtcaaagttgaagaatgataatactgaagcgttttataaaataagcacactgtactaccaactaggagaccacgaactgtccctcagtgaagttcgggaatgtcttaaacttgaccaggatcataaaaggtgttttgcacactataaacaagtaaagaaacttaataagctgattgagtcagctgaagagctcatcagagatggcagatacacagatgctaccagcaaatatgaatctgtcatgaaaacagagccaagcattgctgaatatacagttcgttcaaaggagaggatttgccactgcttttctaaggacgagaagcctgttgaagctattagggtttgttctgaagttttacagatggaacctgacaatgtgaatgccctgaaagatcgagcagaggcctatttgatagaggaaatgtatgatgaagctattcaggattatgaaactgctcaggaacacaatgaaaatgatcagcagattcgagaaggtctagagaaagcacaaagattattgaaacagtcgcagaaacgagattattataaaatcttgggagtaaaaagaaatgccaaaaagcaagaaattattaaagcataccgaaaattagcactgcagtggcacccagataacttccagaatgaagaagaaaagaaaaaagctgagaaaaagttcattgatatagcagctgctaaagaagtcctctctgatccagaaatgagaaagaagtttgacgacggagaagatcctttggatgcagagagccagcaaggaggcggcggcaaccctttccacagaagctggaactcatggcaagggttcaatcccttcagctcaggcggaccatttagatttaaattccacttcaattaaaccaactgtttttctgctcttcttaatttttttaaagattaaaaacaaagaaatcttgttccgggaccctaatgaaaaaaaatttcaaatcttttcagtttgtccatgaccaaagagttgctttaataggaaaaaatctgttcttatccctgtcagatttatggttaatgggtttgcaacggcaaggaggcaaggaatggttctatttctgacagagcagcctgcatctgctttatgctgtctggagggaagtggtctgaggcaggctcacccgtggaagtgctcacgtattctgtattatttttctacactggagctgagattcttctcttcacagccttgcagagtaagtcagtgcctacaagtgtaagaaggagctgtaatcttcatgaggatggttatacttcagtattcttaaagagaacatgaacatttttgagctgtatgttcttagggacaactgtgcttcgatgtggtcagtctcgtcacttgtgagtagctgtgaaatctttagtgtgcatgtgtttgcacctctgtggtctgtcaacgtggctgtcactgaaggagcaagagaccatcttttaggaaccctgccaccaaataataatatatccaggcttagactttggattaatgttaaatgtacatttttttggttcagtacctgaagaagaatactgaaacttgaatctataaattcctatggacccttttaatattaaacacaacaaattaaaagttgttataggtaaaataagttcagataaaatagtggtggtatttaaaataatattgctgaagtgcagattgaaatactttttaaacaactgaagttctgagtttttatagggaatttcatgtaacaagactggtttagaaacgtaaagttgcgcagtcaacataaataaatacagaatgccatgttnnccacttct

SEQ ID NO: 285549 - DNA, 2613 bp, Homo sapiens
ggccaccgtcgtaggtgcgggccgcatgaatggagcgccgggcgtaaggcaaagcctggcaccgtctgcgcggccgctatctgctcccggagcgtgagtgcggggtgtggggcgtgcgcgtgcgcgctcagagggggctcaaggcgagcgcgccgggcagttgcgggcgcgtggctgctgaggttggcggcggtgccgcgcgcccgacgggccggtggttgcggggcctcccgcctcgacccgggctgggggcagccgtggcggccgccggggaccgcaaggggcggaggaaaggagggggccggtcccggcacgcagaggagcagccgaccatgccccgagacaacatggcctccttgatccaacggatcgcccgccaggcttgcctcaccttccggggcagcgggggcggccgcggcgcttccgatcgcgacgcggcttctggcccggaggcgccgatgcagccgggcttccccgagaacctgagcaagctgaagagcctcctgacccagctccgcgccgaggacttgaacatcgccccgcgcaaggccacactgcagccgctgccgcccaacctgccgccagtcacctacatgcacatctacgagacggacggcttcagcctgggcgtgttcctgctcaagagcggcacgtccatcccgctgcacgaccacccgggcatgcacggcatgctcaaggtgctgtacggcaccgtgcgcatcagctgcatggacaagctagacgcgggcggcgggcaacggccgcgggccttgccgcccgagcagcagttcgagccgccgctgcagccccgggagcgagaagccgtgcggccgggcgtgctgcgttcgcgggccgagtacaccgaggccagcggcccctgcatcctcacaccgcaccgggacaacctgcaccagatcgacgccgtggaagggcctgccgccttcctggacatcctggccccgccctacgacccggacgatggccgggactgccactattaccgggtgctggagccggtcaggcccaaggaggcctccagctcggcctgtgacctgcctcgagaggtgtggctcctggagaccccacaggccgatgacttctggtgcgagggagaaccctatccaggtcccaaggtcttcccttgaagccactggcgcccaggagcggtgggccgaagacgtgccctaccctaccacaagggctgtgtctctaccccctagcctgggcgttggatctactggaatgagcagcagccgcttcctcggcagccttgggaagcacgggcgactggacagcagccgccgggcacggttatgggggcggggtgggcggggaggctagattgtttcctggtactgtcactgccactggggctttgatttggaggaatggggcaggggactatctgaagcgcttccatcctaaagccataatgaaaatatcttcctctcttccccattctatacaaaatactaagtggttttcttgctcccactccctaccccttagttaaatagggtttattttccactcatgcccttatgcctttttttcttatagttttttaacttattgactgtgcatgacccagtggtttgaattgtttttagttcaagtcattggtaaaaactaggtttaaggagatgagctactgtttaaagtgagctggcctgcctaattaattccttgtgaaaactaaatgattttttcagtttggggatcattctcacaacataactatgcatgtagaggacaagatttattttctttcctccctttgcccagtagccacatctggtttactcaggcagcatctactaagaaattcagcacctgcatatctctgtgacatggtcacttagagcttatcttccctatgaatctccagatctgtgagtcgagcagatttcatgttgcagattcacctttaatgcaaagactgtattatcctcacatgactttttttcttgtcttactgtaccttaaaaggtgatagagtaattctgtattttctaacgggaagattcaaaggagctgaatgtgttatgcttccaaacaactgaatgtaaaacactcctagccagttgttgcattccctatatttatttacttccaatattttactgtaaaagtagggagaaatattatgttgatagttgtttcatattctctcaggaactttaatgttcccgactcgggtgattccagctgtgttgctggcagtgttgtctcaaccctctccctaaaatgactgagccctgggttcatctaatgtggttttccttaggaagagatagaaggcacagaagatcacagctagagaattgagaattaactatactactagccattttagggcaccaaaacttgggattaaacacttcctacttcccactcccaactcctgaaatgaagtcttgctatctgtgactagttttatttttgtgcttttaatagtccgagcagtcttaccttgtttacacatgtattgacaccatttgcttcaggccatggagcactgtttctccctttttactatttataggattccgttttttcacaagacttttaataaaaagaaattgtagaaataaacacattaaaatttgccca

SEQ ID NO: 285550 - DNA, 3637 bp, Homo sapiens
gacgtcaactagaacctcaatatggggcgcccttggcagttaactgcggtggctatttctcttcattgtactcgcgacattaacgatgggtgtctatggctcgcgccagcgtgtgcggctccgctcaccggctggggcagcgtcggcgcggacgagggcggaggaaaggagggggccggtcccggcacgcagaggagcagccgaccatgccccgagacaacatggcctccttgatccaacggatcgcccgccaggcttgcctcaccttccggggcagcgggggcggccgcggcgcttccgatcgcgacgcggcttctggcccggaggcgccgatgcagccgggcttccccgagaacctgagcaagctgaagagcctcctgacccagctccgcgccgaggacttgaacatcgccccgcgcaaggccacactgcagccgctgccgcccaacctgccgccagtcacctacatgcacatctacgagacggacggcttcagcctgggcgtgttcctgctcaagagcggcacgtccatcccgctgcacgaccacccgggcatgcacggcatgctcaaggtgctgtacggcaccgtgcgcatcagctgcatggacaagctagacgcgggcggcgggcaacggccgcgggccttgccgcccgagcagcagttcgagccgccgctgcagccccgggagcgagaagccgtgcggccgggcgtgctgcgttcgcgggccgagtacaccgaggccagcggcccctgcatcctcacaccgcaccgggacaacctgcaccagatcgacgccgtggaagggcctgccgccttcctggacatcctggccccgccctacgacccggacgatggccgggactgccactattaccgggtgctggagccggtcaggcccaaggaggcctccagctcggcctgtgacctgcctcgagaggtgtggctcctggagaccccacaggccgatgacttctggtgcgagggagaaccctatccaggtcccaaggtcttcccttgaagccactggcgcccaggagcggtgggccgaagacgtgccctaccctaccacaagggctgtgtctctaccccctagcctgggcgttggatctactggaatgagcagcagccgcttcctcggcagccttgggaagcacgggcgactggacagcagccgccgggcacggttatgggggcggggtgggcggggaggctagattgtttcctggtactgtcactgccactggggctttgatttggaggaatggggcaggggactatctgaagcgcttccatcctaaagccataatgaaaatatcttcctctcttccccattctatacaaaatactaagtggttttcttgctcccactccctaccccttagttaaatagggtttattttccactcatgcccttatgcctttttttcttatagttttttaacttattgactgtgcatgacccagtggtttgaattgtttttagttcaagtcattggtaaaaactaggtttaaggagatgagctactgtttaaagtgagctggcctgcctaattaattccttgtgaaaactaaatgattttttcagtttggggatcattctcacaacataactatgcatgtagaggacaagatttattttctttcctccctttgcccagtagccacatctggtttactcaggcagcatctactaagaaattcagcacctgcatatctctgtgacatggtcacttagagcttatcttccctatgaatctccagatctgtgagtcgagcagatttcatgttgcagattcacctttaatgcaaagactgtattatcctcacatgactttttttcttgtcttactgtaccttaaaaggtgatagagtaattctgtattttctaacgggaagattcaaaggagctgaatgtgttatgcttccaaacaactgaatgtaaaacactcctagccagttgttgcattccctatatttatttacttccaatattttactgtaaaagtagggagaaatattatgttgatagttgtttcatattctctcaggaactttaatgttcccgactcgggtgattccagctgtgttgctggcagtgttgtctcaaccctctccctaaaatgactgagccctgggttcatctaatgtggttttccttaggaagagatagaaggcacagaagatcacagctagagaattgagaattaactatactactagccattttagggcaccaaaacttgggattaaacacttcctacttcccactcccaactcctgaaatgaagtcttgctatctgtgactagttttatttttgtgcttttaatagtccgagcagtcttaccttgtttacacatgtattgacaccatttgcttcaggccatggagcactgtttctccctttttactatttataggattccgttttttcacaagacttttaataaaaagaaattgtagaaataaacacattaaaatttgcccagctgtcgtctaagccctcttgattgacttgcccaagtggcaatagagttctaatatctataataaagggagatttgctattattagtggaatgttgaccccgtatgtagagaaacagtacgtgcctttgcctctttatgcacacagagacccagggtgagggagtatttgttcccagtttttaagatagtataaaaaagcaaatacttggtgagtgatttaaaaataaaaccaaaacaaaacacaaaaagatattccacaggacatgccactttattataaaacctgacacaggcatagtaccaagtatttcctgcattgttgctaaaattgttttattgtagctccacattctggtgtagtttaaaatgcctttgggggcagtttgaagcagttcttcatgccacttagtttgaaaataaaattctagatatgcaaatgattttcttagaaaacttcacaaaataaaagatcttgtttttttttccatagcacagtaatgaatgtggttatcaatcacatacttttttggattatattgtagcaaaaagttgattagcttaccaagattattaatagcaatgtatgtgttataatacaacttagtacattaaagctacgaaaactcatcctggctgtaggatagtaataaaggaagaattatgacttcattatgaaaaaaagaagttttaaagttttcaattacgagcaatttggaagaaaaaacctaaggtgcttttcaaaagagtaactgaaattgttgcaggccaaaacagcaatatgatatctcagatttagttcaataagaacagtgaaacttttggttcactaataaattctgagtaaattagtggtgaagacaaaatataacttgttttagtgagccactgaggaaagaatatgcttattacaaagacaaaatgtggtgcagaaactatcttgcacctgtgtgcataaactgttagtcgtgactgacttggtgtgttgctattgtgtttctatatactccgtccaatatagataatgttttaataacaactgtgggataaaagttatcttccccttggaaagactaatgagcacaatgatattaatcacttttatggtgaataataaatgcaataattgcctcatgggtgagaaaaaaaaaa

SEQ ID NO: 285551 - DNA, 3524 bp, Homo sapiens
ggccaccgtcgtaggtgcgggccgcatgaatggagcgccgggcgtaaggcaaagcctggcaccgtctgcgcggccgctatctgctcccggagcgtgagtgcggggtgtggggcgtgcgcgtgcgcgctcagagggggctcaaggcgagcgcgccgggcagttgcgggcgcgtggctgctgaggttggcggcggtgccgcgcgcccgacgggccggtggttgcggggcctcccgcctcgacccgggctgggggcagccgtggcggccgccggggaccgcaaggggcggaggaaaggagggggccggtcccggcacgcagaggagcagccgaccatgccccgagacaacatggcctccttgatccaacggatcgcccgccaggcttgcctcaccttccggggcagcgggggcggccgcggcgcttccgatcgcgacgcggcttctggcccggaggcgccgatgcagccgggcttccccgagaacctgagcaagctgaagagcctcctgacccagctccgcgccgaggacttgaacatcgcccgagcagcagttcgagccgccgctgcagccccgggagcgagaagccgtgcggccgggcgtgctgcgttcgcgggccgagtacaccgaggccagcggcccctgcatcctcacaccgcaccgggacaacctgcaccagatcgacgccgtggaagggcctgccgccttcctggacatcctggccccgccctacgacccggacgatggccgggactgccactattaccgggtgctggagccggtcaggcccaaggaggcctccagctcggcctgtgacctgcctcgagaggtgtggctcctggagaccccacaggccgatgacttctggtgcgagggagaaccctatccaggtcccaaggtcttcccttgaagccactggcgcccaggagcggtgggccgaagacgtgccctaccctaccacaagggctgtgtctctaccccctagcctgggcgttggatctactggaatgagcagcagccgcttcctcggcagccttgggaagcacgggcgactggacagcagccgccgggcacggttatgggggcggggtgggcggggaggctagattgtttcctggtactgtcactgccactggggctttgatttggaggaatggggcaggggactatctgaagcgcttccatcctaaagccataatgaaaatatcttcctctcttccccattctatacaaaatactaagtggttttcttgctcccactccctaccccttagttaaatagggtttattttccactcatgcccttatgcctttttttcttatagttttttaacttattgactgtgcatgacccagtggtttgaattgtttttagttcaagtcattggtaaaaactaggtttaaggagatgagctactgtttaaagtgagctggcctgcctaattaattccttgtgaaaactaaatgattttttcagtttggggatcattctcacaacataactatgcatgtagaggacaagatttattttctttcctccctttgcccagtagccacatctggtttactcaggcagcatctactaagaaattcagcacctgcatatctctgtgacatggtcacttagagcttatcttccctatgaatctccagatctgtgagtcgagcagatttcatgttgcagattcacctttaatgcaaagactgtattatcctcacatgactttttttcttgtcttactgtaccttaaaaggtgatagagtaattctgtattttctaacgggaagattcaaaggagctgaatgtgttatgcttccaaacaactgaatgtaaaacactcctagccagttgttgcattccctatatttatttacttccaatattttactgtaaaagtagggagaaatattatgttgatagttgtttcatattctctcaggaactttaatgttcccgactcgggtgattccagctgtgttgctggcagtgttgtctcaaccctctccctaaaatgactgagccctgggttcatctaatgtggttttccttaggaagagatagaaggcacagaagatcacagctagagaattgagaattaactatactactagccattttagggcaccaaaacttgggattaaacacttcctacttcccactcccaactcctgaaatgaagtcttgctatctgtgactagttttatttttgtgcttttaatagtccgagcagtcttaccttgtttacacatgtattgacaccatttgcttcaggccatggagcactgtttctccctttttactatttataggattccgttttttcacaagacttttaataaaaagaaattgtagaaataaacacattaaaatttgcccagctgtcgtctaagccctcttgattgacttgcccaagtggcaatagagttctaatatctataataaagggagatttgctattattagtggaatgttgaccccgtatgtagagaaacagtacgtgcctttgcctctttatgcacacagagacccagggtgagggagtatttgttcccagtttttaagatagtataaaaaagcaaatacttggtgagtgatttaaaaataaaaccaaaacaaaacacaaaaagatattccacaggacatgccactttattataaaacctgacacaggcatagtaccaagtatttcctgcattgttgctaaaattgttttattgtagctccacattctggtgtagtttaaaatgcctttgggggcagtttgaagcagttcttcatgccacttagtttgaaaataaaattctagatatgcaaatgattttcttagaaaacttcacaaaataaaagatcttgtttttttttccatagcacagtaatgaatgtggttatcaatcacatacttttttggattatattgtagcaaaaagttgattagcttaccaagattattaatagcaatgtatgtgttataatacaacttagtacattaaagctacgaaaactcatcctggctgtaggatagtaataaaggaagaattatgacttcattatgaaaaaaagaagttttaaagttttcaattacgagcaatttggaagaaaaaacctaaggtgcttttcaaaagagtaactgaaattgttgcaggccaaaacagcaatatgatatctcagatttagttcaataagaacagtgaaacttttggttcactaataaattctgagtaaattagtggtgaagacaaaatataacttgttttagtgagccactgaggaaagaatatgcttattacaaagacaaaatgtggtgcagaaactatcttgcacctgtgtgcataaactgttagtcgtgactgacttggtgtgttgctattgtgtttctatatactccgtccaatatagataatgttttaataacaactgtgggataaaagttatcttccccttggaaagactaatgagcacaatgatattaatcacttttatggtgaataataaatgcaataattgcctcatgggtgagaaaaaaaaaa

SEQ ID NO: 285552 - DNA, 1757 bp, Homo sapiens
aatgcatgagtgaatgaatgaatgaacaaactgaggattatgttatgcccctagacatgagcaataatgaaggaacgcaacaatttgtgcaaaggaaaaatacgcaagggaggcccagtctcatgctttccgctggagaaccccttgtgcatcaactgtctcctctcctcagagctctgctttatgagtagatcaacagcccacaaggagatggcagtgttgtctcaaccctctccctaaaatgactgagccctgggttcatctaatgtggttttccttaggaagagatagaaggcacagaagatcacagctagagaattgagaattaactatactactagccattttagggcaccaaaacttgggattaaacacttcctacttcccactcccaactcctgaaatgaagtcttgctatctgtgactagttttatttttgtgcttttaatagtccgagcagtcttaccttgtttacacatgtattgacaccatttgcttcaggccatggagcactgtttctccctttttactatttataggattccgttttttcacaagacttttaataaaaagaaattgtagaaataaacacattaaaatttgcccagctgtcgtctaagccctcttgattgacttgcccaagtggcaatagagttctaatatctataataaagggagatttgctattattagtggaatgttgaccccgtatgtagagaaacagtacgtgcctttgcctctttatgcacacagagacccagggtgagggagtatttgttcccagtttttaagatagtataaaaaagcaaatacttggtgagtgatttaaaaataaaaccaaaacaaaacacaaaaagatattccacaggacatgccactttattataaaacctgacacaggcatagtaccaagtatttcctgcattgttgctaaaattgttttattgtagctccacattctggtgtagtttaaaatgcctttgggggcagtttgaagcagttcttcatgccacttagtttgaaaataaaattctagatatgcaaatgattttcttagaaaacttcacaaaataaaagatcttgtttttttttccatagcacagtaatgaatgtggttatcaatcacatacttttttggattatattgtagcaaaaagttgattagcttaccaagattattaatagcaatgtatgtgttataatacaacttagtacattaaagctacgaaaactcatcctggctgtaggatagtaataaaggaagaattatgacttcattatgaaaaaaagaagttttaaagttttcaattacgagcaatttggaagaaaaaacctaaggtgcttttcaaaagagtaactgaaattgttgcaggccaaaacagcaatatgatatctcagatttagttcaataagaacagtgaaacttttggttcactaataaattctgagtaaattagtggtgaagacaaaatataacttgttttagtgagccactgaggaaagaatatgcttattacaaagacaaaatgtggtgcagaaactatcttgcacctgtgtgcataaactgttagtcgtgactgacttggtgtgttgctattgtgtttctatatactccgtccaatatagataatgttttaataacaactgtgggataaaagttatcttccccttggaaagactaatgagcacaatgatattaatcacttttatggtgaataataaatgcaataattgcctcatgggtgagaaaaaaaaaa

SEQ ID NO: 285553 - DNA, 2798 bp, Homo sapiens
  misc_feature (2627)..(2628): n is a, c, g, or t
  misc_feature (2653)..(2653): n is a, c, g, or t
  misc_feature (2658)..(2658): n is a, c, g, or t
  misc_feature (2664)..(2665): n is a, c, g, or t
  misc_feature (2681)..(2681): n is a, c, g, or t
  misc_feature (2708)..(2708): n is a, c, g, or t
ggccaccgtcgtaggtgcgggccgcatgaatggagcgccgggcgtaaggcaaagcctggcaccgtctgcgcggccgctatctgctcccggagcgtgagtgcggggtgtggggcgtgcgcgtgcgcgctcagagggggctcaaggcgagcgcgccgggcagttgcgggcgcgtggctgctgaggttggcggcggtgccgcgcgcccgacgggccggtggttgcggggcctcccgcctcgacccgggctgggggcagccgtggcggccgccggggaccgcaaggggcggaggaaaggagggggccggtcccggcacgcagaggagcagccgaccatgccccgagacaacatggcctccttgatccaacggatcgcccgccaggcttgcctcaccttccggggcagcgggggcggccgcggcgcttccgatcgcgacgcggcttctggcccggaggcgccgatgcagccgggcttccccgagaacctgagcaagctgaagagcctcctgacccagctccgcgccgaggacttgaacatcgccccgcgcaaggccacactgcagccgctgccgcccaacctgccgccagtcacctacatgcacatctacgagacggacggcttcagcctgggcgtgttcctgctcaagagcggcacgtccatcccgctgcacgaccacccgggcatgcacggcatgctcaaggtgctgtacggcaccgtgcgcatcagctgcatggacaagctagacgcgggcggcgggcaacggccgcgggccttgccgcccgagcagcagttcgagccgccgctgcagccccgggagcgagaagccgtgcggccgggcgtgctgcgttcgcgggccgagtacaccgaggccagcggcccctgcatcctcacaccgcaccgggacaacctgcaccagatcgacgccgtggaagggcctgccgccttcctggacatcctggccccgccctacgacccggacgatggccgggactgccactattaccgggtgctggagccggtcaggcccaaggaggcctccagctcggcctgtgacctgcctcgagaggtgtggctcctggagaccccacaggccgatgacttctggtgcgagggagaaccctatccaggtcccaaggtcttcccttgaagccactggcgcccaggagcggtgggccgaagacgtgccctaccctaccacaagggctgtgtctctaccccctagcctgggcgttggatctactggaatgagcagcagccgcttcctcggcagccttgggaagcacgggcgactggacagcagccgccgggcacggttatgggggcggggtgggcggggaggctagattgtttcctggtactgtcactgccactggggctttgatttggaggaatggggcaggggactatctgaagcgcttccatcctaaagccataatgaaaatatcttcctctcttccccattctatacaaaatactaagtggttttcttgctcccactccctaccccttagttaaatagggtttattttccactcatgcccttatgcctttttttcttatagttttttaacttattgactgtgcatgacccagtggtttgaattgtttttagttcaagtcattggtaaaaactaggtttaaggagatgagctactgtttaaagtgagctggcctgcctaattaattccttgtgaaaactaaatgattttttcagtttggggatcattctcacaacataactatgcatgtagaggacaagatttattttctttcctccctttgcccagtagccacatctggtttactcaggcagcatctactaagaaattcagcacctgcatatctctgtgacatggtcacttagagcttatcttccctatgaatctccagatctgtgagtcgagcagatttcatgttgcagattcacctttaatgcaaagactgtattatcctcacatgactttttttcttgtcttactgtaccttaaaaggtgatagagtaattctgtattttctaacgggaagattcaaaggagctgaatgtgttatgcttccaaacaactgaatgtaaaacactcctagccagttgttgcattccctatatttatttacttccaatattttactgtaaaagtagggagaaatattatgttgatagttgtttcatattctctcaggaactttaatgttcccgactcgggtgattccagctgtgttgctggcagtgttgtctcaaccctctccctaaaatgactgagccctgggttcatctaatgtggttttccttaggaagagatagaaggcacagaagatcacagctagagaattgagaattaactatactactagccattttagggcaccaaaacttgggattaaacacttcctacttcccactcccaactcctgaaatgaagtcttgctatctgtgactagttttatttttgtgcttttaatagtccgagcagtcttaccttgtttacacatgtattgacaccatttgcttcaggccatggagcactgtttctccctttttactatttataggattccgttttttcacaagacttttaataaaaagaaattgtagaaataaacacattaaaatttgcccaaaaaaaaaaaaaannaaaaaaaaaaaaaaaaaataaatanattanaaaatnntaattttaaattttanaattttttatatatattttttaatttntattaatttataatatttattttatatttatattttattaatttaaatataatttatttaccccttttcctccttctcctattctcacca

SEQ ID NO: 285554 - DNA, 3763 bp, Homo sapiens
ggccaccgtcgtaggtgcgggccgcatgaatggagcgccgggcgtaaggcaaagcctggcaccgtctgcgcggccgctatctgctcccggagcgtgagtgcggggtgtggggcgtgcgcgtgcgcgctcagagggggctcaaggcgagcgcgccgggcagttgcgggcgcgtggctgctgaggttggcggcggtgccgcgcgcccgacgggccggtggttgcggggcctcccgcctcgacccgggctgggggcagccgtggcggccgccggggaccgcaaggggcggaggaaaggagggggccggtcccggcacgcagaggagcagccgaccatgccccgagacaacatggcctccttgatccaacggatcgcccgccaggcttgcctcaccttccggggcagcgggggcggccgcggcgcttccgatcgcgacgcggcttctggcccggaggcgccgatgcagccgggcttccccgagaacctgagcaagctgaagagcctcctgacccagctccgcgccgaggacttgaacatcgccccgcgcaaggccacactgcagccgctgccgcccaacctgccgccagtcacctacatgcacatctacgagacggacggcttcagcctgggcgtgttcctgctcaagagcggcacgtccatcccgctgcacgaccacccgggcatgcacggcatgctcaaggtgctgtacggcaccgtgcgcatcagctgcatggacaagctagacgcgggcggcgggcaacggccgcgggccttgccgcccgagcagcagttcgagccgccgctgcagccccgggagcgagaagccgtgcggccgggcgtgctgcgttcgcgggccgagtacaccgaggccagcggcccctgcatcctcacaccgcaccgggacaacctgcaccagatcgacgccgtggaagggcctgccgccttcctggacatcctggccccgccctacgacccggacgatggccgggactgccactattaccgggtgctggagccggtcaggcccaaggaggcctccagctcggcctgtgacctgcctcgagaggtgtggctcctggagaccccacaggccgatgacttctggtgcgagggagaaccctatccaggtcccaaggtcttcccttgaagccactggcgcccaggagcggtgggccgaagacgtgccctaccctaccacaagggctgtgtctctaccccctagcctgggcgttggatctactggaatgagcagcagccgcttcctcggcagccttgggaagcacgggcgactggacagcagccgccgggcacggttatgggggcggggtgggcggggaggctagattgtttcctggtactgtcactgccactggggctttgatttggaggaatggggcaggggactatctgaagcgcttccatcctaaagccataatgaaaatatcttcctctcttccccattctatacaaaatactaagtggttttcttgctcccactccctaccccttagttaaatagggtttattttccactcatgcccttatgcctttttttcttatagttttttaacttattgactgtgcatgacccagtggtttgaattgtttttagttcaagtcattggtaaaaactaggtttaaggagatgagctactgtttaaagtgagctggcctgcctaattaattccttgtgaaaactaaatgattttttcagtttggggatcattctcacaacataactatgcatgtagaggacaagatttattttctttcctccctttgcccagtagccacatctggtttactcaggcagcatctactaagaaattcagcacctgcatatctctgtgacatggtcacttagagcttatcttccctatgaatctccagatctgtgagtcgagcagatttcatgttgcagattcacctttaatgcaaagactgtattatcctcacatgactttttttcttgtcttactgtaccttaaaaggtgatagagtaattctgtattttctaacgggaagattcaaaggagctgaatgtgttatgcttccaaacaactgaatgtaaaacactcctagccagttgttgcattccctatatttatttacttccaatattttactgtaaaagtagggagaaatattatgttgatagttgtttcatattctctcaggaactttaatgttcccgactcgggtgattccagctgtgttgctggcagtgttgtctcaaccctctccctaaaatgactgagccctgggttcatctaatgtggttttccttaggaagagatagaaggcacagaagatcacagctagagaattgagaattaactatactactagccattttagggcaccaaaacttgggattaaacacttcctacttcccactcccaactcctgaaatgaagtcttgctatctgtgactagttttatttttgtgcttttaatagtccgagcagtcttaccttgtttacacatgtattgacaccatttgcttcaggccatggagcactgtttctccctttttactatttataggattccgttttttcacaagacttttaataaaaagaaattgtagaaataaacacattaaaatttgcccagctgtcgtctaagccctcttgattgacttgcccaagtggcaatagagttctaatatctataataaagggagatttgctattattagtggaatgttgaccccgtatgtagagaaacagtacgtgcctttgcctctttatgcacacagagacccagggtgagggagtatttgttcccagtttttaagatagtataaaaaagcaaatacttggtgagtgatttaaaaataaaaccaaaacaaaacacaaaaagatattccacaggacatgccactttattataaaacctgacacaggcatagtaccaagtatttcctgcattgttgctaaaattgttttattgtagctccacattctggtgtagtttaaaatgcctttgggggcagtttgaagcagttcttcatgccacttagtttgaaaataaaattctagatatgcaaatgattttcttagaaaacttcacaaaataaaagatcttgtttttttttccatagcacagtaatgaatgtggttatcaatcacatacttttttggattatattgtagcaaaaagttgattagcttaccaagattattaatagcaatgtatgtgttataatacaacttagtacattaaagctacgaaaactcatcctggctgtaggatagtaataaaggaagaattatgacttcattatgaaaaaaagaagttttaaagttttcaattacgagcaatttggaagaaaaaacctaaggtgcttttcaaaagagtaactgaaattgttgcaggccaaaacagcaatatgatatctcagatttagttcaataagaacagtgaaacttttggttcactaataaattctgagtaaattagtggtgaagacaaaatataacttgttttagtgagccactgaggaaagaatatgcttattacaaagacaaaatgtggtgcagaaactatcttgcacctgtgtgcataaactgttagtcgtgactgacttggtgtgttgctattgtgtttctatatactccgtccaatatagataatgttttaataacaactgtgggataaaagttatcttccccttggaaagactaatgagcacaatgatattaatcacttttatggtgaataataaatgcaataattgcctcatgggtgagaaaaaaaaaa

SEQ ID NO: 285555 - DNA, 3615 bp, Homo sapiens
ggccaccgtcgtaggtgcgggccgcatgaatggagcgccgggcgtaaggcaaagcctggcaccgtctgcgcggccgctatctgctcccggagcgtgagtgcggggtgtggggcgtgcgcgtgcgcgctcagagggggctcaaggcgagcgcgccgggcagttgcgggcgcgtggctgctgaggttggcggcggtgccgcgcgcccgacgggccggtggttgcggggcctcccgcctcgacccgggctgggggcagccgtggcggccgcggcgcttccgatcgcgacgcggcttctggcccggaggcgccgatgcagccgggcttccccgagaacctgagcaagctgaagagcctcctgacccagctccgcgccgaggacttgaacatcgccccgcgcaaggccacactgcagccgctgccgcccaacctgccgccagtcacctacatgcacatctacgagacggacggcttcagcctgggcgtgttcctgctcaagagcggcacgtccatcccgctgcacgaccacccgggcatgcacggcatgctcaaggtgctgtacggcaccgtgcgcatcagctgcatggacaagctagacgcgggcggcgggcaacggccgcgggccttgccgcccgagcagcagttcgagccgccgctgcagccccgggagcgagaagccgtgcggccgggcgtgctgcgttcgcgggccgagtacaccgaggccagcggcccctgcatcctcacaccgcaccgggacaacctgcaccagatcgacgccgtggaagggcctgccgccttcctggacatcctggccccgccctacgacccggacgatggccgggactgccactattaccgggtgctggagccggtcaggcccaaggaggcctccagctcggcctgtgacctgcctcgagaggtgtggctcctggagaccccacaggccgatgacttctggtgcgagggagaaccctatccaggtcccaaggtcttcccttgaagccactggcgcccaggagcggtgggccgaagacgtgccctaccctaccacaagggctgtgtctctaccccctagcctgggcgttggatctactggaatgagcagcagccgcttcctcggcagccttgggaagcacgggcgactggacagcagccgccgggcacggttatgggggcggggtgggcggggaggctagattgtttcctggtactgtcactgccactggggctttgatttggaggaatggggcaggggactatctgaagcgcttccatcctaaagccataatgaaaatatcttcctctcttccccattctatacaaaatactaagtggttttcttgctcccactccctaccccttagttaaatagggtttattttccactcatgcccttatgcctttttttcttatagttttttaacttattgactgtgcatgacccagtggtttgaattgtttttagttcaagtcattggtaaaaactaggtttaaggagatgagctactgtttaaagtgagctggcctgcctaattaattccttgtgaaaactaaatgattttttcagtttggggatcattctcacaacataactatgcatgtagaggacaagatttattttctttcctccctttgcccagtagccacatctggtttactcaggcagcatctactaagaaattcagcacctgcatatctctgtgacatggtcacttagagcttatcttccctatgaatctccagatctgtgagtcgagcagatttcatgttgcagattcacctttaatgcaaagactgtattatcctcacatgactttttttcttgtcttactgtaccttaaaaggtgatagagtaattctgtattttctaacgggaagattcaaaggagctgaatgtgttatgcttccaaacaactgaatgtaaaacactcctagccagttgttgcattccctatatttatttacttccaatattttactgtaaaagtagggagaaatattatgttgatagttgtttcatattctctcaggaactttaatgttcccgactcgggtgattccagctgtgttgctggcagtgttgtctcaaccctctccctaaaatgactgagccctgggttcatctaatgtggttttccttaggaagagatagaaggcacagaagatcacagctagagaattgagaattaactatactactagccattttagggcaccaaaacttgggattaaacacttcctacttcccactcccaactcctgaaatgaagtcttgctatctgtgactagttttatttttgtgcttttaatagtccgagcagtcttaccttgtttacacatgtattgacaccatttgcttcaggccatggagcactgtttctccctttttactatttataggattccgttttttcacaagacttttaataaaaagaaattgtagaaataaacacattaaaatttgcccagctgtcgtctaagccctcttgattgacttgcccaagtggcaatagagttctaatatctataataaagggagatttgctattattagtggaatgttgaccccgtatgtagagaaacagtacgtgcctttgcctctttatgcacacagagacccagggtgagggagtatttgttcccagtttttaagatagtataaaaaagcaaatacttggtgagtgatttaaaaataaaaccaaaacaaaacacaaaaagatattccacaggacatgccactttattataaaacctgacacaggcatagtaccaagtatttcctgcattgttgctaaaattgttttattgtagctccacattctggtgtagtttaaaatgcctttgggggcagtttgaagcagttcttcatgccacttagtttgaaaataaaattctagatatgcaaatgattttcttagaaaacttcacaaaataaaagatcttgtttttttttccatagcacagtaatgaatgtggttatcaatcacatacttttttggattatattgtagcaaaaagttgattagcttaccaagattattaatagcaatgtatgtgttataatacaacttagtacattaaagctacgaaaactcatcctggctgtaggatagtaataaaggaagaattatgacttcattatgaaaaaaagaagttttaaagttttcaattacgagcaatttggaagaaaaaacctaaggtgcttttcaaaagagtaactgaaattgttgcaggccaaaacagcaatatgatatctcagatttagttcaataagaacagtgaaacttttggttcactaataaattctgagtaaattagtggtgaagacaaaatataacttgttttagtgagccactgaggaaagaatatgcttattacaaagacaaaatgtggtgcagaaactatcttgcacctgtgtgcataaactgttagtcgtgactgacttggtgtgttgctattgtgtttctatatactccgtccaatatagataatgttttaataacaactgtgggataaaagttatcttccccttggaaagactaatgagcacaatgatattaatcacttttatggtgaataataaatgcaataattgcctcatgggtgagaaaaaaaaaa

SEQ ID NO: 285556 - DNA, 3471 bp, Homo sapiens
ggccaccgtcgtaggtgcgggccgcatgaatggagcgccgggcgtaaggcaaagcctggcaccgtctgcgcggccgctatctgctcccggagcgtgagtgcggggtgtggggcgtgcgcgtgcgcgctcagagggggctcaaggcgagcgcgccgggcagttgcgggcgcgtggctgctgaggttggcggcggtgccgcgcgcccgacgggccggtggttgcggggcctcccgcctcgacccgggctgggggcagccgtggcggccgccggggaccgcaaggggcggaggaaaggagggggccggtcccggcacgcagaggagcagccgaccatgccccgagacaacatggcctccttgatccaacggatcgcccgccaggcttgcctcaccttccggggcagcgggggcggccgcggcgcttccgatcgcgacgcggcttctggcccggaggcgccgatgcagccgggcttccccgagaacctgagcaagctgaagagcctcctgacccagctccgcgccgaggacttgaacatcgccccgcgcaaggccacactgcagccgagtacaccgaggccagcggcccctgcatcctcacaccgcaccgggacaacctgcaccagatcgacgccgtggaagggcctgccgccttcctggacatcctggccccgccctacgacccggacgatggccgggactgccactattaccgggtgctggagccggtcaggcccaaggaggcctccagctcggcctgtgacctgcctcgagaggtgtggctcctggagaccccacaggccgatgacttctggtgcgagggagaaccctatccaggtcccaaggtcttcccttgaagccactggcgcccaggagcggtgggccgaagacgtgccctaccctaccacaagggctgtgtctctaccccctagcctgggcgttggatctactggaatgagcagcagccgcttcctcggcagccttgggaagcacgggcgactggacagcagccgccgggcacggttatgggggcggggtgggcggggaggctagattgtttcctggtactgtcactgccactggggctttgatttggaggaatggggcaggggactatctgaagcgcttccatcctaaagccataatgaaaatatcttcctctcttccccattctatacaaaatactaagtggttttcttgctcccactccctaccccttagttaaatagggtttattttccactcatgcccttatgcctttttttcttatagttttttaacttattgactgtgcatgacccagtggtttgaattgtttttagttcaagtcattggtaaaaactaggtttaaggagatgagctactgtttaaagtgagctggcctgcctaattaattccttgtgaaaactaaatgattttttcagtttggggatcattctcacaacataactatgcatgtagaggacaagatttattttctttcctccctttgcccagtagccacatctggtttactcaggcagcatctactaagaaattcagcacctgcatatctctgtgacatggtcacttagagcttatcttccctatgaatctccagatctgtgagtcgagcagatttcatgttgcagattcacctttaatgcaaagactgtattatcctcacatgactttttttcttgtcttactgtaccttaaaaggtgatagagtaattctgtattttctaacgggaagattcaaaggagctgaatgtgttatgcttccaaacaactgaatgtaaaacactcctagccagttgttgcattccctatatttatttacttccaatattttactgtaaaagtagggagaaatattatgttgatagttgtttcatattctctcaggaactttaatgttcccgactcgggtgattccagctgtgttgctggcagtgttgtctcaaccctctccctaaaatgactgagccctgggttcatctaatgtggttttccttaggaagagatagaaggcacagaagatcacagctagagaattgagaattaactatactactagccattttagggcaccaaaacttgggattaaacacttcctacttcccactcccaactcctgaaatgaagtcttgctatctgtgactagttttatttttgtgcttttaatagtccgagcagtcttaccttgtttacacatgtattgacaccatttgcttcaggccatggagcactgtttctccctttttactatttataggattccgttttttcacaagacttttaataaaaagaaattgtagaaataaacacattaaaatttgcccagctgtcgtctaagccctcttgattgacttgcccaagtggcaatagagttctaatatctataataaagggagatttgctattattagtggaatgttgaccccgtatgtagagaaacagtacgtgcctttgcctctttatgcacacagagacccagggtgagggagtatttgttcccagtttttaagatagtataaaaaagcaaatacttggtgagtgatttaaaaataaaaccaaaacaaaacacaaaaagatattccacaggacatgccactttattataaaacctgacacaggcatagtaccaagtatttcctgcattgttgctaaaattgttttattgtagctccacattctggtgtagtttaaaatgcctttgggggcagtttgaagcagttcttcatgccacttagtttgaaaataaaattctagatatgcaaatgattttcttagaaaacttcacaaaataaaagatcttgtttttttttccatagcacagtaatgaatgtggttatcaatcacatacttttttggattatattgtagcaaaaagttgattagcttaccaagattattaatagcaatgtatgtgttataatacaacttagtacattaaagctacgaaaactcatcctggctgtaggatagtaataaaggaagaattatgacttcattatgaaaaaaagaagttttaaagttttcaattacgagcaatttggaagaaaaaacctaaggtgcttttcaaaagagtaactgaaattgttgcaggccaaaacagcaatatgatatctcagatttagttcaataagaacagtgaaacttttggttcactaataaattctgagtaaattagtggtgaagacaaaatataacttgttttagtgagccactgaggaaagaatatgcttattacaaagacaaaatgtggtgcagaaactatcttgcacctgtgtgcataaactgttagtcgtgactgacttggtgtgttgctattgtgtttctatatactccgtccaatatagataatgttttaataacaactgtgggataaaagttatcttccccttggaaagactaatgagcacaatgatattaatcacttttatggtgaataataaatgcaataattgcctcatgggtgagaaaaaaaaaa

SEQ ID NO: 285557 - DNA, 2593 bp, Homo sapiens
  misc_feature (1199)..(1199): n is a, c, g, or t
gagaaaactggcggggatagctgtatcaggggctagcacctttaaggagcctctcagtgtggagcaggggagccccagaaaccacaggaagaatttttttggtgtctgtttggtggttcaggctgtacatagggcacggttggggttaagcactccatctaccaggatgggtggtgctagagggcagtgaatcaagaaaggagccaaaaccaacagaacagggatagagaagtgagcgagaggaggttcagtttgctcagtccctctttaaccactacttagagtacatggtctaatgcttagggccaaggagggaggtgaaggctaaggaagtcagatttgagatgcataaccagcagcaaaagagcctctagaaacgccatggactttaggaagggccaagtgacaccttccatgatgtttggttctggtccagatggatctggaagacaaagatttggggagagtgaccacatggctggtagcaataacaaggcctctggctctgaattgcttcctatggtcctggtagaaactgcatagttcagagccaaggggagatgagaagccttaacgtggaagagggacaagagagatgaattgctccctctgcaacccaactcttcaaagtaagaatggttgagagcaatagtcaccaatttcccaggccagaacctggggtcctttgctgggaccagttctgcactttccctctcctcttcctccctcctttcaatcttatactcaagtaaacccactcagcatcttggctatgacgcttcaagatcctggagcactgcatgtaaagagaagagagaagaaatgggttgaagaaactctggaggacctggaagacctagtggctaagctaggaacctggtgaaagagaaagaagatagtccagacggtgatgggcacttgtgaacagaagactctagctcagaaaagcagacagatgtgtgagggggagagatggggtagaacaaaggaactcgagagtcccctacatgacagcctccaggagggctgagtctgaagtagttacagaagagagacaggggcggtaatgttgataggggaatgaagagagagaagcaggagcagaaaaatgaccaaagatgacaatatgctttggccggtaaactcttataaaacataaaggaatcgattaatccctaacttgatggaacaagctttgnaatactttgttcctgtctgccctgatggttaaactaaagaaggagggaggggaggagacagaatcagccagtcagattctgggcccttcccttttcactaccaagcaatctttaataataaggccacaaaatgaggttgccaaggcttagtggggtggtgggaaagaccccaccactacactaaagtcaagggacaaaatgaggtacccaaatagctctgcaaatagatgaaaaagaattagaactcttgagggtttctttctttttggtggcaggtagagagaaggaataaagcttatggaaaaactggaaaatactgctacttcatacatcaaaggtaaccttacattctccgtaagtgaatgttttaactagaattaaggaagaggaaaaaggaaacgggtaaataagcagctatgggagacctgagtcctgagtccatggggtggctggggctgggtcagcgggtaatatgtcatcaaatctagcctccctctatctggcaggaagtggcatgctggtaaggaacaaaaaggtaacagccacggcttagtgggaagagagggaactgagaaaccccaaacctagaagtgccaagggttagtgttaaaagagacagatacacgtgcatggggcaggggtgattgttcggaccatctggaaaggcctttggctgtggatgcatcagaaaccccaccctgggggatgatctatgaggctccggggctgggaggcccccagcacaggtgtcaaacgtacatgaccacatggctaaaaagccccatatctgtccattactcacaacacacaattccccccacccatattgccatgtccaaggcagatgggaggggataagatgacatctctcttggctcttgggcgggcgagctctggctgaggacctctccaccagaggaggcatcatctgcccgcagactgggactgtggggtcatgattacatgcgattgtatcggcatgctcagttctgtcctttggctggccatctgagtgaggaccgaggtggccacagcttcagctgcagagcgaacactgaggccattgctaggggctgttgctgagctgtgctgaatcacaggggctggagaacccgttggctctgagctttccttggggctttctgccaggaaggagggcaaagagcagagagcaattggttagaaaacagaatggggaaagaggcaggactaccttttgccataattctaaaggagcccaaaagggaaatgaaacccatcttttttttggggaaaacttcccagaatcctggcttctaagtcataaatgggctaggaaatgggaagttgtaagaagggaagaactaggccaaaattaacctatctattccaataaaatgaatctccaacatgtt

SEQ ID NO: 285558 - DNA, 1759 bp, Homo sapiens
gagaaaactggcggggatagctgtatcaggggctagcacctttaaggagcctctcagtgtggagcaggggagccccagaaaccacaggaagaatttttttggtgtctgtttggtggttcaggctgtacatagggcacggttggggttaagcactccatctaccaggatgggtggtgctagagggcagtgaatcaagaaaggagccaaaaccaacagaacagggatagagaagtgagcgagaggaggttcagtttgctcagtccctctttaaccactacttagagtacatggtctaatgcttagggccaaggagggaggtgaaggctaaggaagtcagatttgagatgcataaccagcagcaaaagagtaagtaaagggggcatgactttttttttgttggcctctctagtattgtgggaggctttcttagacttttcaactctaagcaaactttctgttaggggaatggggcagaaagtgagcagaccagaagacctggttctgtcccctccctctgtggccttgggtacgtggcagctagctagagtgcttgtgtatcgagcactcacattggagtggggtgggaagcctgagtcctgtattcacatgaacgaattcaggacacccaccatacactcagctcctttctgaaagtgtcctcccttaggcctctagaaacgccatggactttaggaagggccaagtgacaccttccatgatgtttggttctggtccagatggatctggaagacaaagatttggggagagtgaccacatggctggtagcaataacaaggtaagtgaagttacctttgactatcagagaagtttcagggcagcaattattctgcctccttagtgagactgagaaccaactcaagaactatctagggggttctgacctgctgcttccttatttcagtgccattttgttactgtggttctggcagtgctcctcactgaggtcccgtacacatcttcccactgataaaaatgaagttaggactagataattagtcatgggggctaagaaataaaaaagacccgctacataaattagccacccaacacagggacagactggcagggcatgtatgcagttacaaattaattcttaactgtaaaaacacttgactgaagggggaagaaaaatagtcaagagtcttaggaaagctccttaggagccataaactcagtcaagctttagggcaaggctgctactgggaaatcaagacaataaaaaaatgaaacaaaactctaaagcaggagaaaatcccagggagcagccagctaaaggggaagtcctgagcacaagttacggctgtgaatttttaaaaggcaaaagtgaagtccctggatgtggtaacctgcgtcctgaccatctgccataacatttgctagtctgaatcacttcagggcctattcctgttgggtacctgatggtagaggatgagaaaaccgtgttttctctcctttgtctttaggggtgtggcctgttcagcaccagctctgaaaagcaggaggggaaatttaaaacaaatgcagcagaacctgttacctgactggttcactaggacaggatatcactttaaggaaacgggaatcttgtagcttagaacattttctcattcccctgtgacagtcaattttggagacaaaataagaaaggaagctggcagttattttgtatgtatgtttaagatggaggtaggaaagatggagagaaggacattcttggcttgcacagatggcagaaagt

SEQ ID NO: 285559 - DNA, 1562 bp, Homo sapiens
gagaaaactggcggggatagctgtatcaggggctagcacctttaaggagcctctcagtgtggagcaggggagccccagaaaccacaggaagaatttttttggtgtctgtttggtggttcaggctgtacatagggcacggttggggttaagcactccatctaccaggatgggtggtgctagagggcagtgaatcaagaaaggagccaaaaccaacagaacagggatagagaagtgagcgagaggaggttcagtttgctcagtccctctttaaccactacttagagtacatggtctaatgcttagggccaaggagggaggtgaaggctaaggaagtcagatttgagatgcataaccagcagcaaaagagtaagtaaagggggcatgactttttttttgttggcctctctagtattgtgggaggctttcttagacttttcaactctaagcaaactttctgttaggggaatggggcagaaagtgagcagaccagaagacctggttctgtcccctccctctgtggccttgggtacgtggcagctagctagagtgcttgtgtatcgagcactcacattggagtggggtgggaagcctgagtcctgtattcacatgaacgaattcaggacacccaccatacactcagctcctttctgaaagtgtcctcccttaggcctctagaaacgccatggactttaggaagggccaagtgacaccttccatgatgtttggttctggtccagatggatctggaagacaaagatttggggagagtgaccacatggctggtagcaataacaaggtaagtgaagttacctttgactatcagagaagtttcagggcagcaattattctgcctccttagtgagactgagaaccaactcaagaactatctagggggttctgacctgctgcttccttatttcagtgccattttgttactgtggttctggcagtgctcctcactgaggtcccgtacacatcttcccactgataaaaatgaagttaggactagataattagtcatgggggctaagaaataaaaaagacccgctacataaattagccacccaacacagggacagactggcagggcatgtatgcagttacaaattaattcttaactgtaaaaacacttgactgaagggggaagaaaaatagtcaagagtcttaggaaagctccttaggagccataaactcagtcaagctttagggcaaggctgctactgggaaatcaagacaataaaaaaatgaaacaaaactctaaagcaggagaaaatcccagggagcagccagctaaaggggaagtcctgagcacaagttacggctgtgaatttttaaaaggcaaaagtgaagtccctggatgtggtaacctgcgtcctgaccatctgccataacatttgctagtctgaatcatcccaggcacactcctgaagacacggacggtacgaggtgagaacccgcagtcattctaatgatacgacgtggccacagcgacagctcagagagaacaaggaaggatagcaaaacgaggacacactagaaacaggtacatgacaggtacatga

SEQ ID NO: 285560 - DNA, 340 bp, Homo sapiens
cattttatccagtaacatcgtgtttgtttttaatatcaaaaaatgtttcccaaagccaccaaggaaaattcctccagaaggcagggtctgcctcctctgtcacccaggctggagtacagtggcatgatctcggctcactacaacctgggaggcggacgttgcagtgagctgagatcacaccactgcactccagcctgggacagagcaagactccgtctcaaaaaaaaagaaaagaaaagaaataacacaggtacaagtcatcaaaatcctgaattataattgattatactaagtaatgtgttgttatgagagatttttaaataaaaacttttaattgtaa

SEQ ID NO: 285561 - DNA, 6210 bp, Homo sapiens
  misc_feature (3166)..(3166): n is a, c, g, or t
  misc_feature (5646)..(5646): n is a, c, g, or t
  misc_feature (5687)..(5687): n is a, c, g, or t
gcgctccgtcccttctagaggcaggcagagggaagagaaagggtctgttgtttttctctcctgtttctcgctccctctctgctgatcacaaagctgctgaccgggtcagaaagtcctgatggaaatccaccagcgctgggcaggcccctcctcctccagggagcttgtccttgcctaatttttcttcgtcctgatgagaacaaaaaagagagagagaagaaaagaaaaaccacaaacttcctttgaaaaccagcttgtagtcagggcccggagcgcatgccatagactcggcgactcaggaatcctgaagactctctgagcgacctggagcaccttggctgtgtccctgcctgccttcaccctcctccagtgcccccagtactgggcgtgagtccggaagtggccacaacccagcctggaccgtcgcttataaagctgtgtaaacctgtataagctcaggcgttgacagctggaaggcagctggcactggcagcccccttcattgcacctatctcccccatctcattgccacggctgaaccctccttctcaatcttggaacagcacccccttctttaagtaaaaactttattttaatcatcttcttcacctcttctcccacccttctctatttcctctccagctttggggagctgacacctgctgtccttccacctttggtctgcaagtctggattgcttagaggagctaagtcaggagagacatgtaaaggggatgctgcttggtcctcctccttttaatgaaagcacgaaaccttccccctctccttggaagctgactccacccatgtgttcaatcccaccagtcttccctcccaagtctggaagccccacgacctcttggtctcatctggtcacagcaagttagaggtggaaagagctcagcacggggcccttctgtttacacatatactgcccatagccaggagttactgcacaaacactagccagccttctacactacattccttttccaagacttttctgggttagtttgctttccagcccactgatttccttcttattggacaggtcactcttttgcatcccaagcctggcttaggcaagtccctgaggttagtaaacaccttcagtgcccctcagccgagtcccttttgaccatggaataccatcagcctgaggatccagcccctggtaaggccgggactgcagaagcagtcatccctgaaaaccatgaggttctggcaggcccagatgagcaccctcaggacacagatgcaagagatgctgatggggaggctagagaacgggagccagcagaccaagctttgctgcctagccagtgtggggacaaccttgagtcccctctgcctgaagctagctcagctccaccggggccaacccttgggacactgcctgaagtagagacaataagggcatgctccatgccccaggagcttcctcagtcccccaggacccgacagcctgagccagatttctactgtgtcaagtggatcccttggaaaggagaacagacacccatcatcacccagagcactaacggcccttgccctctccttgccatcatgaacatcctctttcttcagtggaaggtgaagctccccccgcagaaggaagtgatcacatcggatgagctcatggcccatcttggaaactgcctcctgtccatcaagccccaggagaagtcagagggacttcagcttaattttcagcagaatgtggatgatgcaatgacagtgctgcctaaactggccacaggtctggatgtcaatgtgcgattcacaggcgtctctgattttgagtatacacccgagtgcagtgtctttgacctgctaggcatacctctgtaccatggctggcttgttgatccacagagtcctgaggctgtgcgtgcagttgggaaactgagttacaaccagctggtggagaggatcatcacctgcaaacactccagtgacaccaacctcgtgacagaaggcctgattgcagagcagttcctggagaccaccgcggcccagctgacctaccacggactgtgtgagctgacagcagctgctaaggagggtgaacttagcgtctttttccgaaacaaccactttagcaccatgactaagcataagagtcacttatacctactggtcactgaccagggctttctacaggaggagcaagtcgtatgggagagcctgcacaatgtggatggagacagctgcttttgtgactctgactttcacctgagtcattccctgggcaaggggcctggagcagaaggtgggagtggctccccagaaaagcagctgcaggtagaccaggactacctgattgctctgtccctgcagcagcaacagccacgaggcccgctggggcttaccgacttggagctggcccagcagcttcagcaagaggagtatcaacagcagcaggcagcgcagccagtgcggatgcggacgcgggtcctgtcactgcaggggagaggagccacatctggacgcccagccggggagcgtcggcagaggccgaagcacgagtcagactgcattctgctgtagctctgccccagtgccaggctggcctgccccttcttccagaggctatggctagttggcttgctcccccgcctccacccctgagatgtgctggataacttatttatggactgttggggatgagagcaggcaacaaatgccaaggtcagacttggtaatgtccttgacctcacgtgctgctgccttctctgcctcccacccagggcaacactaggattggtgggtttctggttctcaactcccggtccctgaatagtcacacgtatgtacagactgaggctctggggtgaggtccctatccagaatgcatctcttctgcttcccatccctgctgcctggatgctcctgatcacctaggcaggcctgtctccagttgtttcagagcttaatttgggtttctatctcttatttgtaatgccttcctggggtttggaaataaaacttctggccgggcacggtggctcactcctgtaatctcaacaatttgagaggccaaggtgggcggatcacctgaggttaggagttcgagaccagcctgcccaaaaaggtgaaaccccgtctctactaaaaatacaagaaattactgggactacaggcatgcgccactgcgcccagctantttttgtatttttagtagagacggtttcgccactttggtcaggctagtcttgaattcctgacctcaagtaatccgcctgccttggcctcccgaagtgctggaattacaggcgtgagccactgcgcccagctacctgtcatttctaatatagcctgcagggggaaccaaagcctgactttttgtttttgtttctgtttttgtttttgttttctatgggaaatagtgctctcctgggaggtgggtttccaaatctctgcttggacacatgaatttgagggttgtgctctccactaacccaagaattcccatgctggggagggtagcttggccctccgcttgcttcccagttcatacagatggtcctttgctccctctatttctcaccttgttctaatgcctgtttctcaattattttgcctgaagtttcctggagaatgagggtgaggggagacctggagtgggagacctgggtgtggattactgtagcactaaggcaaaacaggattcctgcggaatagccaagtgcacatcaaaggcacctccaactccagtgcctcttcccggtccatgtcctgctccacccaaccttcaatcagggaacacaaacaacagcgaagtttgccaaaagaattcgagtatcagtgagatgttctggccagggtacaggagggatgagtgaggcagaaactatcaaagaaaactcatttccccacacccaagaaggagctggatgacccaggtacagatataattttgagatgggaaaattaagggattttaaagaaacagttccagcctcaacaagaagctagagaatgtggtgctcagtgaggggttatcctacttggaggcccagctggtctcccaggttcagccaaacacggaaatctcagatcctcggatgtcatgtggggtggggcagggaagtctcacatgtcttcagccctgcacaaggccaggagggctgactggcaatcccctttcactgcatcctgcagacaagggaattcagtgttagaaagatccaccaccactatggcccaagtgctctctcccctcctttgggctggtccatcacagttcatctgggagggaagggtcctcccgggagctcagagtcctgcactacattaaccaaagactcctgggttttcttttttaagatggagtcttgccctgtcacccaggtgggagtgcagtggcacgatcttggctcactgcaacctctgccttctgggttcaagcgactctcctgcctcagcctcctgagtagctgggattacaggtgcacgccaccatgcctggctaatttttgtatttttagtagagacggggtttcaccatgttggtcagggtggtcttgaactcctgacctcgtgatccgcccacctcagcctctcaaagtgctgggattacaggcgtgagccactgtgcctggctaactactgggttttctatggggcaagaatatgctcagctgtgtgcagggagtgagggtggaggtgaggagtgaaggcctgaggctccaggctaagaagtagccaagtttcacctggagagaagagtagagggacttcccaaatttcttcctgaactcagctctgatactcagaaggtcagtctcacatcgagagataaggatgcgaatcaggacttggtaattgggctcagtttcctagtaggggaagaaagagatggggggtagttagtgagagtctcactgagagtaggggttgaatggcttggagggttattgtaggaaggggaggcaaggtgggagtcaagggataagagtgtacattatacattatctcgggacaaaagttatgtttgtccatcctcaaggaagatgacacagcaggaaagatcagtctctgtgggggcagcttgagtatttatttctttccacatgtctttcctgcccctaccattagcttagagctgtgtacctccagaatttggtggtgagcagctccaaagataggtacaccaggaaggctagaaaagatttggtgcatataaagactgccagcatgaaaaccaggaaaactgcttttaactttcaagttagtgaatatccaaggaggatatacctgccctatccctaaactgagctgatgaggctctgatagggttcaaggttgtgtgacttctagttctgattccaacccaatagggccatctcacagccccatctctgcatattagtttctccggttggacccttaggctgaaacattgctatcttcctcctgtacatgcagcaggcctgttttttggctaaagaaagtaatgaaaggttcagtttagaaataacaggccaggcacagtggctcatgcctgtaatcccagcactttgggaggatgaggcgcgtggatcatctgaggtaggagttcgagaccagcctgaccaaaatggtgaaaccccgtctctactaaaaatacaaaaataagccaggcatggtggtgggtgcctgcantcccagctacttggaaggctgaggcaggagaattgcttgancccaggaggtggaggttgcagtgagctgagatcgcgccactgcactccaacctgggcaagaagagcaaaactccgtctcaaaaaaaaaaaaaaaaaagaaagaaagaaaaaagaaataacaggccaggtgtggtggctcatgcctgtaatcccagaattttgggaggccaaggcaagcagatcatttatggtcaggagttcgagaccagcctggccaacatggtgaaacccccgtctctattaaaactacaaaaattagccaggtgtggtggtaggcgcctataatcccagctactgaggagggtgaggtaggagaattgcttgaacctgggaggcggacgttgcagtgagctgagatcacaccactgcactccagcctgggacagagcaagactccgtctcaaaaaaaaagaaaagaaaagaaataacacaggtacaagtcatcaaaatcctgaattataattgattatactaagtaatgtgttgttatgagagatttttaaataaaaacttttaattgtaa

SEQ ID NO: 285562 - DNA, 2156 bp, Homo sapiens
gcgctccgtcccttctagaggcaggcagagggaagagaaagggtctgttgtttttctctcctgtttctcgctccctctctgctgatcacaaagctgctgaccgggtcagaaagtcctgatggaaatccaccagcgctgggcaggcccctcctcctccagggagcttgtccttgcctaatttttcttcgtcctgatgagaacaaaaaagagagagagaagaaaagaaaaaccacaaacttcctttgaaaaccagcttgtagtcagggcccggagcgcatgccatagactcggcgactcaggaatcctgaagactctctgagcgacctggagcaccttggctgtgtccctgcctgccttcaccctcctccagtgcccccagtactgggcgtgagtccggaagtggccacaacccagcctggaccgtcgcttataaagctgtgtaaacctgtataagctcaggcgttgacagctggaaggcagctggcactggcagcccccttcattgcacctatctcccccatctcattgccacggctgaaccctccttctcaatcttggaacagcacccccttctttaagcctcagtcccccaggacccgacagcctgagccagatttctactgtgtcaagtggatcccttggaaaggagaacagacacccatcatcacccagagcactaacggcccttgccctctccttgccatcatgaacatcctctttcttcagtggaaggtgaagctccccccgcagaaggaagtgatcacatcggatgagctcatggcccatcttggaaactgcctcctgtccatcaagccccaggagaagtcagagggacttcagcttaattttcagcagaatgtggatgatgcaatgacagtgctgcctaaactggccacaggtctggatgtcaatgtgcgattcacaggcgtctctgattttgagtatacacccgagtgcagtgtctttgacctgctaggcatacctctgtaccatggctggcttgttgatccacagagtcctgaggctgtgcgtgcagttgggaaactgagttacaaccagctggtggagaggatcatcacctgcaaacactccagtgacaccaacctcgtgacagaaggcctgattgcagagcagttcctggagaccaccgcggcccagctgacctaccacggactgtgtgagctgacagcagctgctaaggagggtgaacttagcgtctttttccgaaacaaccactttagcaccatgactaagcataagagtcacttatacctactggtcactgaccagggctttctacaggaggagcaagtcgtatgggagagcctgcacaatgtggatggagacagctgcttttgtgactctgactttcacctgagtcattccctgggcaaggggcctggagcagaaggtgggagtggctccccagaaaagcagctgcaggtagaccaggactacctgattgctctgtccctgcagcagcaacagccacgaggcccgctggggcttaccgacttggagctggcccagcagcttcagcaagaggagtatcaacagcagcaggcagcgcagccagtgcggatgcggacgcgggtcctgtcactgcaggggagaggagccacatctggacgcccagccggggagcgtcggcagaggccgaagcacgagtcagactgcattctgctgtagctctgccccagtgccaggctggcctgccccttcttccagaggctatggctagttggcttgctcccccgcctccacccctgagatgtgctggataacttatttatggactgttggggatgagagcaggcaacaaatgccaaggtcagacttggtaatgtccttgacctcacgtgctgctgccttctctgcctcccacccagggcaacactaggattggtgggtttctggttctcaactcccggtccctgaatagtcacacgtatgtacagactgaggctctggggtgaggtccctatccagaatgcatctcttctgcttcccatccctgctgcctggatgctcctgatcacctaggcaggcctgtctccagttgtttcagagcttaatttgggtttctatctcttatttgtaatgccttcctggggtttggaaataaaacttctggccgggcacggtggctcactcct

SEQ ID NO: 285563 - DNA, 4239 bp, Homo sapiens
  misc_feature (2694)..(2694): n is a, c, g, or t
gcgctccgtcccttctagaggcaggcagagggaagagaaagggtctgttgtttttctctcctgtttctcgctccctctctgctgatcacaaagctgctgaccgggtcagaaagtcctgatggaaatccaccagcgctgggcaggcccctcctcctccagggagcttgtccttgcctaatttttcttcgtcctgatgagaacaaaaaagagagagagaagaaaagaaaaaccacaaacttcctttgaaaaccagcttgtagtcagggcccggagcgcatgccatagactcggcgactcaggaatcctgaagactctctgagcgacctggagcaccttggctgtgtccctgcctgccttcaccctcctccagtgcccccagtactgggcgtgagtccggaagtggccacaacccagcctggaccgtcgcttataaagctgtgtaaacctgtataagctcaggcgttgacagctggaaggcagctggcactggcagcccccttcattgcacctatctcccccatctcattgccacggctgaaccctccttctcaatcttggaacagcacccccttctttaaggtcactcttttgcatcccaagcctggcttaggcaagtccctgaggttagtaaacaccttcagtgcccctcagccgagtcccttttgaccatggaataccatcagcctgaggatccagcccctggtaaggccgggactgcagaagcagtcatccctgaaaaccatgaggttctggcaggcccagatgagcaccctcaggacacagatgcaagagatgctgatggggaggctagagaacgggagccagcagaccaagctttgctgcctagccagtgtggggacaaccttgagtcccctctgcctgaagctagctcagctccaccggggccaacccttgggacactgcctgaagtagagacaataagggcatgctccatgccccaggagcttcctcagtcccccaggacccgacagcctgagccagatttctactgtgtcaagtggatcccttggaaaggagaacagacacccatcatcacccagagcactaacggcccttgccctctccttgccatcatgaacatcctctttcttcagtggaaggtgaagctccccccgcagaaggaagtgatcacatcggatgagctcatggcccatcttggaaactgcctcctgtccatcaagccccaggagaagtcagagggacttcagcttaattttcagcagaatgtggatgatgcaatgacagtgctgcctaaactggccacaggtctggatgtcaatgtgcgattcacaggcgtctctgattttgagtatacacccgagtgcagtgtctttgacctgctaggcatacctctgtaccatggctggcttgttgatccacagagtcctgaggctgtgcgtgcagttgggaaactgagttacaaccagctggtggagaggatcatcacctgcaaacactccagtgacaccaacctcgtgacagaaggcctgattgcagagcagttcctggagaccaccgcggcccagctgacctaccacggactgtgtgagctgacagcagctgctaaggagggtgaacttagcgtctttttccgaaacaaccactttagcaccatgactaagcataagagtcacttatacctactggtcactgaccagggctttctacaggaggagcaagtcgtatgggagagcctgcacaatgtggatggagacagctgcttttgtgactctgactttcacctgagtcattccctgggcaaggggcctggagcagaaggtgggagtggctccccagaaaagcagctgcaggtagaccaggactacctgattgctctgtccctgcagcagcaacagccacgaggcccgctggggcttaccgacttggagctggcccagcagcttcagcaagaggagtatcaacagcagcaggcagcgcagccagtgcggatgcggacgcgggtcctgtcactgcaggggagaggagccacatctggacgcccagccggggagcgtcggcagaggccgaagcacgagtcagactgcattctgctgtagctctgccccagtgccaggctggcctgccccttcttccagaggctatggctagttggcttgctcccccgcctccacccctgagatgtgctggataacttatttatggactgttggggatgagagcaggcaacaaatgccaaggtcagacttggtaatgtccttgacctcacgtgctgctgccttctctgcctcccacccagggcaacactaggattggtgggtttctggttctcaactcccggtccctgaatagtcacacgtatgtacagactgaggctctggggtgaggtccctatccagaatgcatctcttctgcttcccatccctgctgcctggatgctcctgatcacctaggcaggcctgtctccagttgtttcagagcttaatttgggtttctatctcttatttgtaatgccttcctggggtttggaaataaaacttctggccgggcacggtggctcactcctgtaatctcaacaatttgagaggccaaggtgggcggatcacctgaggttaggagttcgagaccagcctgcccaaaaaggtgaaaccccgtctctactaaaaatacaagaaattactgggactacaggcatgcgccactgcgcccagctantttttgtatttttagtagagacggtttcgccactttggtcaggctagtcttgaattcctgacctcaagtaatccgcctgccttggcctcccgaagtgctggaattacaggcgtgagccactgcgcccagctacctgtcatttctaatatagcctgcagggggaaccaaagcctgactttttgtttttgtttctgtttttgtttttgttttctatgggaaatagtgctctcctgggaggtgggtttccaaatctctgcttggacacatgaatttgagggttgtgctctccactaacccaagaattcccatgctggggagggtagcttggccctccgcttgcttcccagttcatacagatggtcctttgctccctctatttctcaccttgttctaatgcctgtttctcaattattttgcctgaagtttcctggagaatgagggtgaggggagacctggagtgggagacctgggtgtggattactgtagcactaaggcaaaacaggattcctgcggaatagccaagtgcacatcaaaggcacctccaactccagtgcctcttcccggtccatgtcctgctccacccaaccttcaatcagggaacacaaacaacagcgaagtttgccaaaagaattcgagtatcagtgagatgttctggccagggtacaggagggatgagtgaggcagaaactatcaaagaaaactcatttccccacacccaagaaggagctggatgacccaggtacagatataattttgagatgggaaaattaagggattttaaagaaacagttccagcctcaacaagaagctagagaatgtggtgctcagtgaggggttatcctacttggaggcccagctggtctcccaggttcagccaaacacggaaatctcagatcctcggatgtcatgtggggtggggcagggaagtctcacatgtcttcagccctgcacaaggccaggagggctgactggcaatcccctttcactgcatcctgcagacaagggaattcagtgttagaaagatccaccaccactatggcccaagtgctctctcccctcctttgggctggtccatcacagttcatctgggagggaagggtcctcccgggagctcagagtcctgcactacattaaccaaagactcctgggttttcttttttaagatggagtcttgccctgtcacccaggtgggagtgcagtggcacgatcttggctcactgcaacctctgccttctgggttcaagcgactctcctgcctcagcctcctgagtagctgggattacaggtgtggtggtaggcgcctataatcccagctactgaggagggtgaggtaggagaattgcttgaacctgggaggcggacgttgcagtgagctgagatcacaccactgcactccagcctgggacagagcaagactccgtctcaaaaaaaaagaaaagaaaagaaataacacaggtacaagtcatcaaaatcctgaattataattgattatactaagtaatgtgttgttatgagagatttttaaataaaaacttttaattgtaa

SEQ ID NO: 285564 - DNA, 4187 bp, Homo sapiens
  misc_feature (2694)..(2694): n is a, c, g, or t
gcgctccgtcccttctagaggcaggcagagggaagagaaagggtctgttgtttttctctcctgtttctcgctccctctctgctgatcacaaagctgctgaccgggtcagaaagtcctgatggaaatccaccagcgctgggcaggcccctcctcctccagggagcttgtccttgcctaatttttcttcgtcctgatgagaacaaaaaagagagagagaagaaaagaaaaaccacaaacttcctttgaaaaccagcttgtagtcagggcccggagcgcatgccatagactcggcgactcaggaatcctgaagactctctgagcgacctggagcaccttggctgtgtccctgcctgccttcaccctcctccagtgcccccagtactgggcgtgagtccggaagtggccacaacccagcctggaccgtcgcttataaagctgtgtaaacctgtataagctcaggcgttgacagctggaaggcagctggcactggcagcccccttcattgcacctatctcccccatctcattgccacggctgaaccctccttctcaatcttggaacagcacccccttctttaaggtcactcttttgcatcccaagcctggcttaggcaagtccctgaggttagtaaacaccttcagtgcccctcagccgagtcccttttgaccatggaataccatcagcctgaggatccagcccctggtaaggccgggactgcagaagcagtcatccctgaaaaccatgaggttctggcaggcccagatgagcaccctcaggacacagatgcaagagatgctgatggggaggctagagaacgggagccagcagaccaagctttgctgcctagccagtgtggggacaaccttgagtcccctctgcctgaagctagctcagctccaccggggccaacccttgggacactgcctgaagtagagacaataagggcatgctccatgccccaggagcttcctcagtcccccaggacccgacagcctgagccagatttctactgtgtcaagtggatcccttggaaaggagaacagacacccatcatcacccagagcactaacggcccttgccctctccttgccatcatgaacatcctctttcttcagtggaaggtgaagctccccccgcagaaggaagtgatcacatcggatgagctcatggcccatcttggaaactgcctcctgtccatcaagccccaggagaagtcagagggacttcagcttaattttcagcagaatgtggatgatgcaatgacagtgctgcctaaactggccacaggtctggatgtcaatgtgcgattcacaggcgtctctgattttgagtatacacccgagtgcagtgtctttgacctgctaggcatacctctgtaccatggctggcttgttgatccacagagtcctgaggctgtgcgtgcagttgggaaactgagttacaaccagctggtggagaggatcatcacctgcaaacactccagtgacaccaacctcgtgacagaaggcctgattgcagagcagttcctggagaccaccgcggcccagctgacctaccacggactgtgtgagctgacagcagctgctaaggagggtgaacttagcgtctttttccgaaacaaccactttagcaccatgactaagcataagagtcacttatacctactggtcactgaccagggctttctacaggaggagcaagtcgtatgggagagcctgcacaatgtggatggagacagctgcttttgtgactctgactttcacctgagtcattccctgggcaaggggcctggagcagaaggtgggagtggctccccagaaaagcagctgcaggtagaccaggactacctgattgctctgtccctgcagcagcaacagccacgaggcccgctggggcttaccgacttggagctggcccagcagcttcagcaagaggagtatcaacagcagcaggcagcgcagccagtgcggatgcggacgcgggtcctgtcactgcaggggagaggagccacatctggacgcccagccggggagcgtcggcagaggccgaagcacgagtcagactgcattctgctgtagctctgccccagtgccaggctggcctgccccttcttccagaggctatggctagttggcttgctcccccgcctccacccctgagatgtgctggataacttatttatggactgttggggatgagagcaggcaacaaatgccaaggtcagacttggtaatgtccttgacctcacgtgctgctgccttctctgcctcccacccagggcaacactaggattggtgggtttctggttctcaactcccggtccctgaatagtcacacgtatgtacagactgaggctctggggtgaggtccctatccagaatgcatctcttctgcttcccatccctgctgcctggatgctcctgatcacctaggcaggcctgtctccagttgtttcagagcttaatttgggtttctatctcttatttgtaatgccttcctggggtttggaaataaaacttctggccgggcacggtggctcactcctgtaatctcaacaatttgagaggccaaggtgggcggatcacctgaggttaggagttcgagaccagcctgcccaaaaaggtgaaaccccgtctctactaaaaatacaagaaattactgggactacaggcatgcgccactgcgcccagctantttttgtatttttagtagagacggtttcgccactttggtcaggctagtcttgaattcctgacctcaagtaatccgcctgccttggcctcccgaagtgctggaattacaggcgtgagccactgcgcccagctacctgtcatttctaatatagcctgcagggggaaccaaagcctgactttttgtttttgtttctgtttttgtttttgttttctatgggaaatagtgctctcctgggaggtgggtttccaaatctctgcttggacacatgaatttgagggttgtgctctccactaacccaagaattcccatgctggggagggtagcttggccctccgcttgcttcccagttcatacagatggtcctttgctccctctatttctcaccttgttctaatgcctgtttctcaattattttgcctgaagtttcctggagaatgagggtgaggggagacctggagtgggagacctgggtgtggattactgtagcactaaggcaaaacaggattcctgcggaatagccaagtgcacatcaaaggcacctccaactccagtgcctcttcccggtccatgtcctgctccacccaaccttcaatcagggaacacaaacaacagcgaagtttgccaaaagaattcgagtatcagtgagatgttctggccagggtacaggagggatgagtgaggcagaaactatcaaagaaaactcatttccccacacccaagaaggagctggatgacccaggtacagatataattttgagatgggaaaattaagggattttaaagaaacagttccagcctcaacaagaagctagagaatgtggtgctcagtgaggggttatcctacttggaggcccagctggtctcccaggttcagccaaacacggaaatctcagatcctcggatgtcatgtggggtggggcagggaagtctcacatgtcttcagccctgcacaaggccaggagggctgactggcaatcccctttcactgcatcctgcagacaagggaattcagtgttagaaagatccaccaccactatggcccaagtgctctctcccctcctttgggctggtccatcacagttcatctgggagggaagggtcctcccgggagctcagagtcctgcactacattaaccaaagactcctgggttttcttttttaagatggagtcttgccctgtcacccaggtgggagtgcagtggcacgatcttggctcactgcaacctctgccttctgggttcaagcgactctcctgcctcagctactgaggagggtgaggtaggagaattgcttgaacctgggaggcggacgttgcagtgagctgagatcacaccactgcactccagcctgggacagagcaagactccgtctcaaaaaaaaagaaaagaaaagaaataacacaggtacaagtcatcaaaatcctgaattataattgattatactaagtaatgtgttgttatgagagatttttaaataaaaacttttaattgtaa

SEQ ID NO: 285565 - DNA, 5143 bp, Homo sapiens
  misc_feature (2152)..(2152): n is a, c, g, or t
  misc_feature (4620)..(4620): n is a, c, g, or t
gcgctccgtcccttctagaggcaggcagagggaagagaaagggtctgttgtttttctctcctgtttctcgctccctctctgctgatcacaaagctgctgaccgggtcagaaagtcctgatggaaatccaccagcgctgggcaggcccctcctcctccagggagcttgtccttgcctaatttttcttcgtcctgatgagaacaaaaaagagagagagaagaaaagaaaaaccacaaacttcctttgaaaaccagcttgtagtcagggcccggagcgcatgccatagactcggcgactcaggaatcctgaagactctctgagcgacctggagcaccttggctgtgtccctgcctgccttcaccctcctccagtgcccccagtactgggcgtgagtccggaagtggccacaacccagcctggaccgtcgcttataaagctgtgtaaacctgtataagctcaggcgttgacagctggaaggcagctggcactggcagcccccttcattgcacctatctcccccatctcattgccacggctgaaccctccttctcaatcttggaacagcacccccttctttaaggtgaagctccccccgcagaaggaagtgatcacatcggatgagctcatggcccatcttggaaactgcctcctgtccatcaagccccaggagaagtcagagggacttcagcttaattttcagcagaatgtggatgatgcaatgacagtgctgcctaaactggccacaggtctggatgtcaatgtgcgattcacaggcgtctctgattttgagtatacacccgagtgcagtgtctttgacctgctaggcatacctctgtaccatggctggcttgttgatccacagagtcctgaggctgtgcgtgcagttgggaaactgagttacaaccagctggtggagaggatcatcacctgcaaacactccagtgacaccaacctcgtgacagaaggcctgattgcagagcagttcctggagaccaccgcggcccagctgacctaccacggactgtgtgagctgacagcagctgctaaggagggtgaacttagcgtctttttccgaaacaaccactttagcaccatgactaagcataagagtcacttatacctactggtcactgaccagggctttctacaggaggagcaagtcgtatgggagagcctgcacaatgtggatggagacagctgcttttgtgactctgactttcacctgagtcattccctgggcaaggggcctggagcagaaggtgggagtggctccccagaaaagcagctgcaggtagaccaggactacctgattgctctgtccctgcagcagcaacagccacgaggcccgctggggcttaccgacttggagctggcccagcagcttcagcaagaggagtatcaacagcagcaggcagcgcagccagtgcggatgcggacgcgggtcctgtcactgcaggggagaggagccacatctggacgcccagccggggagcgtcggcagaggccgaagcacgagtcagactgcattctgctgtagctctgccccagtgccaggctggcctgccccttcttccagaggctatggctagttggcttgctcccccgcctccacccctgagatgtgctggataacttatttatggactgttggggatgagagcaggcaacaaatgccaaggtcagacttggtaatgtccttgacctcacgtgctgctgccttctctgcctcccacccagggcaacactaggattggtgggtttctggttctcaactcccggtccctgaatagtcacacgtatgtacagactgaggctctggggtgaggtccctatccagaatgcatctcttctgcttcccatccctgctgcctggatgctcctgatcacctaggcaggcctgtctccagttgtttcagagcttaatttgggtttctatctcttatttgtaatgccttcctggggtttggaaataaaacttctggccgggcacggtggctcactcctgtaatctcaacaatttgagaggccaaggtgggcggatcacctgaggttaggagttcgagaccagcctgcccaaaaaggtgaaaccccgtctctactaaaaatacaagaaattactgggactacaggcatgcgccactgcgcccagctantttttgtatttttagtagagacggtttcgccactttggtcaggctagtcttgaattcctgacctcaagtaatccgcctgccttggcctcccgaagtgctggaattacaggcgtgagccactgcgcccagctacctgtcatttctaatatagcctgcagggggaaccaaagcctgactttttgtttttgtttctgtttttgtttttgttttctatgggaaatagtgctctcctgggaggtgggtttccaaatctctgcttggacacatgaatttgagggttgtgctctccactaacccaagaattcccatgctggggagggtagcttggccctccgcttgcttcccagttcatacagatggtcctttgctccctctatttctcaccttgttctaatgcctgtttctcaattattttgcctgaagtttcctggagaatgagggtgaggggagacctggagtgggagacctgggtgtggattactgtagcactaaggcaaaacaggattcctgcggaatagccaagtgcacatcaaaggcacctccaactccagtgcctcttcccggtccatgtcctgctccacccaaccttcaatcagggaacacaaacaacagcgaagtttgccaaaagaattcgagtatcagtgagatgttctggccagggtacaggagggatgagtgaggcagaaactatcaaagaaaactcatttccccacacccaagaaggagctggatgacccaggtacagatataattttgagatgggaaaattaagggattttaaagaaacagttccagcctcaacaagaagctagagaatgtggtgctcagtgaggggttatcctacttggaggcccagctggtctcccaggttcagccaaacacggaaatctcagatcctcggatgtcatgtggggtggggcagggaagtctcacatgtcttcagccctgcacaaggccaggagggctgactggcaatcccctttcactgcatcctgcagacaagggaattcagtgttagaaagatccaccaccactatggcccaagtgctctctcccctcctttgggctggtccatcacagttcatctgggagggaagggtcctcccgggagctcagagtcctgcactacattaaccaaagactcctgggttttcttttttaagatggagtcttgccctgtcacccaggtgggagtgcagtggcacgatcttggctcactgcaacctctgccttctgggttcaagcgactctcctgcctcagcctcctgagtagctgggattacaggtgcacgccaccatgcctggctaatttttgtatttttagtagagacggggtttcaccatgttggtcagggtggtcttgaactcctgacctcgtgatccgcccacctcagcctctcaaagtgctgggattacaggcgtgagccactgtgcctggctaactactgggttttctatggggcaagaatatgctcagctgtgtgcagggagtgagggtggaggtgaggagtgaaggcctgaggctccaggctaagaagtagccaagtttcacctggagagaagagtagagggacttcccaaatttcttcctgaactcagctctgatactcagaaggtcagtctcacatcgagagataaggatgcgaatcaggacttggtaattgggctcagtttcctagtaggggaagaaagagatggggggtagttagtgagagtctcactgagagtaggggttgaatggcttggagggttattgtaggaaggggaggcaaggtgggagtcaagggataagagtgtacattatacattatctcgggacaaaagttatgtttgtccatcctcaaggaagatgacacagcaggaaagatcagtctctgtgggggcagcttgagtatttatttctttccacatgtctttcctgcccctaccattagcttagagctgtgtacctccagaatttggtggtgagcagctccaaagataggtacaccaggaaggctagaaaagatttggtgcatataaagactgccagcatgaaaaccaggaaaactgcttttaactttcaagttagtgaatatccaaggaggatatacctgccctatccctaaactgagctgatgaggctctgatagggttcaaggttgtgtgacttctagttctgattccaacccaatagggccatctcacagccccatctctgcatattagtttctccggttggacccttaggctgaaacattgctatcttcctcctgtacatgcagcaggcctgttttttggctaaagaaagtaatgaaaggttcagtttagaaataacaggccaggcacagtggctcatgcctgtaatcccagcactttgggaggatgaggcgcgtggatcatctgaggtaggagttcgagaccagcctgaccaaaatggtgaaaccccgtctctactaaaaatacatgaggcaggagaattgcttgancccaggaggtggaggttgcagtgagctgagatcgcgccactgcactccaacctgggcaagaagagcaaaactccgtctcaaaaaaaaaaaaaaaaaagaaagaaagaaaaaagaaataacaggccaggtgtggtggctcatgcctgtaatcccagaattttgggaggccaaggcaagcagatcatttatggtcaggagttcgagaccagcctggccaacatggtgaaacccccgtctctattaaaactacaaaaattagccaggtgtggtggtaggcgcctataatcccagctactgaggagggtgaggtaggagaattgcttgaacctgggaggcggacgttgcagtgagctgagatcacaccactgcactccagcctgggacagagcaagactccgtctcaaaaaaaaagaaaagaaaagaaataacacaggtacaagtcatcaaaatcctgaattataattgattatactaagtaatgtgttgttatgagagatttttaaataaaaacttttaattgtaa

SEQ ID NO: 285566 - DNA, 4984 bp, Homo sapiens
  misc_feature (1993)..(1993): n is a, c, g, or t
  misc_feature (4461)..(4461): n is a, c, g, or t
gcgctccgtcccttctagaggcaggcagagggaagagaaagggtctgttgtttttctctcctgtttctcgctccctctctgctgatcacaaagctgctgaccgggtcagaaagtcctgatggaaatccaccagcgctgggcaggcccctcctcctccagggagcttgtccttgcctaatttttcttcgtcctgatgagaacaaaaaagagagagagaagaaaagaaaaaccacaaacttcctttgaaaaccagcttgtagtcagggcccggagcgcatgccatagactcggcgactcaggaatcctgaagactctctgagcgacctggagcaccttggctgtgtccctgcctgccttcaccctcctccagtgcccccagtactgggcgtgagtccggaagtggccacaacccagcctggaccgtcgcttataaagctgtgtaaacctgtataagctcaggcgttgacagctggaaggcagctggcactggcagcccccttcattgcacctatctcccccatctcattgccacggctgaaccctccttctcaatcttggaacagcacccccttctttaaggtgaagctccccccgcagaaggaagtgatcacatcggatgagctcatggcccatcttggaaactgcctcctgtccatcaagccccaggagaagtcagagggacttcagcttaattttcagcagagtcctgaggctgtgcgtgcagttgggaaactgagttacaaccagctggtggagaggatcatcacctgcaaacactccagtgacaccaacctcgtgacagaaggcctgattgcagagcagttcctggagaccaccgcggcccagctgacctaccacggactgtgtgagctgacagcagctgctaaggagggtgaacttagcgtctttttccgaaacaaccactttagcaccatgactaagcataagagtcacttatacctactggtcactgaccagggctttctacaggaggagcaagtcgtatgggagagcctgcacaatgtggatggagacagctgcttttgtgactctgactttcacctgagtcattccctgggcaaggggcctggagcagaaggtgggagtggctccccagaaaagcagctgcaggtagaccaggactacctgattgctctgtccctgcagcagcaacagccacgaggcccgctggggcttaccgacttggagctggcccagcagcttcagcaagaggagtatcaacagcagcaggcagcgcagccagtgcggatgcggacgcgggtcctgtcactgcaggggagaggagccacatctggacgcccagccggggagcgtcggcagaggccgaagcacgagtcagactgcattctgctgtagctctgccccagtgccaggctggcctgccccttcttccagaggctatggctagttggcttgctcccccgcctccacccctgagatgtgctggataacttatttatggactgttggggatgagagcaggcaacaaatgccaaggtcagacttggtaatgtccttgacctcacgtgctgctgccttctctgcctcccacccagggcaacactaggattggtgggtttctggttctcaactcccggtccctgaatagtcacacgtatgtacagactgaggctctggggtgaggtccctatccagaatgcatctcttctgcttcccatccctgctgcctggatgctcctgatcacctaggcaggcctgtctccagttgtttcagagcttaatttgggtttctatctcttatttgtaatgccttcctggggtttggaaataaaacttctggccgggcacggtggctcactcctgtaatctcaacaatttgagaggccaaggtgggcggatcacctgaggttaggagttcgagaccagcctgcccaaaaaggtgaaaccccgtctctactaaaaatacaagaaattactgggactacaggcatgcgccactgcgcccagctantttttgtatttttagtagagacggtttcgccactttggtcaggctagtcttgaattcctgacctcaagtaatccgcctgccttggcctcccgaagtgctggaattacaggcgtgagccactgcgcccagctacctgtcatttctaatatagcctgcagggggaaccaaagcctgactttttgtttttgtttctgtttttgtttttgttttctatgggaaatagtgctctcctgggaggtgggtttccaaatctctgcttggacacatgaatttgagggttgtgctctccactaacccaagaattcccatgctggggagggtagcttggccctccgcttgcttcccagttcatacagatggtcctttgctccctctatttctcaccttgttctaatgcctgtttctcaattattttgcctgaagtttcctggagaatgagggtgaggggagacctggagtgggagacctgggtgtggattactgtagcactaaggcaaaacaggattcctgcggaatagccaagtgcacatcaaaggcacctccaactccagtgcctcttcccggtccatgtcctgctccacccaaccttcaatcagggaacacaaacaacagcgaagtttgccaaaagaattcgagtatcagtgagatgttctggccagggtacaggagggatgagtgaggcagaaactatcaaagaaaactcatttccccacacccaagaaggagctggatgacccaggtacagatataattttgagatgggaaaattaagggattttaaagaaacagttccagcctcaacaagaagctagagaatgtggtgctcagtgaggggttatcctacttggaggcccagctggtctcccaggttcagccaaacacggaaatctcagatcctcggatgtcatgtggggtggggcagggaagtctcacatgtcttcagccctgcacaaggccaggagggctgactggcaatcccctttcactgcatcctgcagacaagggaattcagtgttagaaagatccaccaccactatggcccaagtgctctctcccctcctttgggctggtccatcacagttcatctgggagggaagggtcctcccgggagctcagagtcctgcactacattaaccaaagactcctgggttttcttttttaagatggagtcttgccctgtcacccaggtgggagtgcagtggcacgatcttggctcactgcaacctctgccttctgggttcaagcgactctcctgcctcagcctcctgagtagctgggattacaggtgcacgccaccatgcctggctaatttttgtatttttagtagagacggggtttcaccatgttggtcagggtggtcttgaactcctgacctcgtgatccgcccacctcagcctctcaaagtgctgggattacaggcgtgagccactgtgcctggctaactactgggttttctatggggcaagaatatgctcagctgtgtgcagggagtgagggtggaggtgaggagtgaaggcctgaggctccaggctaagaagtagccaagtttcacctggagagaagagtagagggacttcccaaatttcttcctgaactcagctctgatactcagaaggtcagtctcacatcgagagataaggatgcgaatcaggacttggtaattgggctcagtttcctagtaggggaagaaagagatggggggtagttagtgagagtctcactgagagtaggggttgaatggcttggagggttattgtaggaaggggaggcaaggtgggagtcaagggataagagtgtacattatacattatctcgggacaaaagttatgtttgtccatcctcaaggaagatgacacagcaggaaagatcagtctctgtgggggcagcttgagtatttatttctttccacatgtctttcctgcccctaccattagcttagagctgtgtacctccagaatttggtggtgagcagctccaaagataggtacaccaggaaggctagaaaagatttggtgcatataaagactgccagcatgaaaaccaggaaaactgcttttaactttcaagttagtgaatatccaaggaggatatacctgccctatccctaaactgagctgatgaggctctgatagggttcaaggttgtgtgacttctagttctgattccaacccaatagggccatctcacagccccatctctgcatattagtttctccggttggacccttaggctgaaacattgctatcttcctcctgtacatgcagcaggcctgttttttggctaaagaaagtaatgaaaggttcagtttagaaataacaggccaggcacagtggctcatgcctgtaatcccagcactttgggaggatgaggcgcgtggatcatctgaggtaggagttcgagaccagcctgaccaaaatggtgaaaccccgtctctactaaaaatacatgaggcaggagaattgcttgancccaggaggtggaggttgcagtgagctgagatcgcgccactgcactccaacctgggcaagaagagcaaaactccgtctcaaaaaaaaaaaaaaaaaagaaagaaagaaaaaagaaataacaggccaggtgtggtggctcatgcctgtaatcccagaattttgggaggccaaggcaagcagatcatttatggtcaggagttcgagaccagcctggccaacatggtgaaacccccgtctctattaaaactacaaaaattagccaggtgtggtggtaggcgcctataatcccagctactgaggagggtgaggtaggagaattgcttgaacctgggaggcggacgttgcagtgagctgagatcacaccactgcactccagcctgggacagagcaagactccgtctcaaaaaaaaagaaaagaaaagaaataacacaggtacaagtcatcaaaatcctgaattataattgattatactaagtaatgtgttgttatgagagatttttaaataaaaacttttaattgtaa

SEQ ID NO: 285567 - DNA, 2208 bp, Homo sapiens
gcgctccgtcccttctagaggcaggcagagggaagagaaagggtctgttgtttttctctcctgtttctcgctccctctctgctgatcacaaagctgctgaccgggtcagaaagtcctgatggaaatccaccagcgctgggcaggcccctcctcctccagggagcttgtccttgcctaatttttcttcgtcctgatgagaacaaaaaagagagagagaagaaaagaaaaaccacaaacttcctttgaaaaccagcttgtagtcagggcccggagcgcatgccatagactcggcgactcaggaatcctgaagactctctgagcgacctggagcaccttggctgtgtccctgcctgccttcaccctcctccagtgcccccagtactgggcgtgagtccggaagtggccacaacccagcctggaccgtcgcttataaagctgtgtaaacctgtataagctcaggcgttgacagctggaaggcagctggcactggcagcccccttcattgcacctatctcccccatctcattgccacggctgaaccctccttctcaatcttggaacagcacccccttctttaaggtcactcttttgcatcccaagcctggcttaggcaagtccctgaggttagtaaacaccttcagtgcccctcagccgagtcccttttgaccatggaataccatcagcctgaggatccagcccctggtaaggccgggactgcagaagcagtcatccctgaaaaccatgaggttctggcaggcccagatgagcaccctcaggacacagatgcaagagatgctgatggggaggctagagaacgggagccagcagaccaagctttgctgcctagccagtgtggggacaaccttgagtcccctctgcctgaagctagctcagctccaccggggccaacccttgggacactgcctgaagtagagacaataagggcatgctccatgccccaggagcttcctcagtcccccaggacccgacagcctgagccagatttctactgtgtcaagtggatcccttggaaaggagaacagacacccatcatcacccagagcactaacggcccttgccctctccttgccatcatgaacatcctctttcttcagtggaaggtgaagctccccccgcagaaggaagtgatcacatcggatgagctcatggcccatcttggaaactgcctcctgtccatcaagccccaggagaagtcagagggacttcagcttaattttcagcagaatgtggatgatgcaatgacagtgctgcctaaactggccacaggtctggatgtcaatgtgcgattcacaggcgtctctgattttgagtatacacccgagtgcagtgtctttgacctgctaggcatacctctgtaccatggctggcttgttgatccacagagtcctgaggctgtgcgtgcagttgggaaactgagttacaaccagctggtggagaggatcatcacctgcaaacactccagtgacaccaacctcgtgacagaaggcctgattgcagagcagttcctggagaccaccgcggcccagctgacctaccacggactgtgtgagctgacagcagctgctaaggagggtgaacttagcgtctttttccgaaacaaccactttagcaccatgactaagcataagagtcacttatacctactggtcactgaccagggctttctacaggaggagcaagtcgtatgggagagcctgcacaatgtggatggagacagctgcttttgtgactctgactttcacctgagtcattccctgggcaaggggcctggagcagaaggtgggagtggctccccagaaaagcagctgcaggtagaccaggtgtgtagggcacttaggaaaagtgcagagagcacatgtgcctcagagagctttttactgcatacattttaactgctagaggccatgtgaacccatgcctctctctctgggttacctcagaccgtctcctcacttggtgtgtattctctggcaccacagataatgcatttggctgtgtgtgctgctctgtggggagaaagagctagagaatttgagggatgtgggaaaactgatttggaaaccttgcctgaatagccacggctctgggcctcagcccactgcacaactcttgttctccccaggactacctgattgctctgtccctgcagcagctggtggcctaatcgtcgtacctgcaggctagcaa

SEQ ID NO: 285568 - DNA, 4461 bp, Homo sapiens
  misc_feature (1470)..(1470): n is a, c, g, or t
  misc_feature (3938)..(3938): n is a, c, g, or t
gatgacagagcgagactccatctccaagaaaaaaaatgtccacatgctcataccgagatttctggcagtgaactgcctccgtatcaactgtccccccaatgagctctgttcttttctttgtagagtcacttatacctactggtcactgaccagggctttctacaggaggagcaagtcgtatgggagagcctgcacaatgtggatggagacagctgcttttgtgactctgactttcacctgagtcattccctgggcaaggggcctggagcagaaggtgggagtggctccccagaaaagcagctgcaggtagaccaggtgtgtagggcacttaggaaaagtgcagagagcacatgtgcctcagagagctttttactgcatacattttaactgctagaggccatgtgaacccatgcctctctctctgggttacctcagaccgtctcctcacttggtgtgtattctctggcaccacagataatgcatttggctgtgtgtgctgctctgtggggagaaagagctagagaatttgagggatgtgggaaaactgatttggaaaccttgcctgaatagccacggctctgggcctcagcccactgcacaactcttgttctccccaggactacctgattgctctgtccctgcagcagcaacagccacgaggcccgctggggcttaccgacttggagctggcccagcagcttcagcaagaggagtatcaacagcagcaggcagcgcagccagtgcggatgcggacgcgggtcctgtcactgcaggggagaggagccacatctggacgcccagccggggagcgtcggcagaggccgaagcacgagtcagactgcattctgctgtagctctgccccagtgccaggctggcctgccccttcttccagaggctatggctagttggcttgctcccccgcctccacccctgagatgtgctggataacttatttatggactgttggggatgagagcaggcaacaaatgccaaggtcagacttggtaatgtccttgacctcacgtgctgctgccttctctgcctcccacccagggcaacactaggattggtgggtttctggttctcaactcccggtccctgaatagtcacacgtatgtacagactgaggctctggggtgaggtccctatccagaatgcatctcttctgcttcccatccctgctgcctggatgctcctgatcacctaggcaggcctgtctccagttgtttcagagcttaatttgggtttctatctcttatttgtaatgccttcctggggtttggaaataaaacttctggccgggcacggtggctcactcctgtaatctcaacaatttgagaggccaaggtgggcggatcacctgaggttaggagttcgagaccagcctgcccaaaaaggtgaaaccccgtctctactaaaaatacaagaaattactgggactacaggcatgcgccactgcgcccagctantttttgtatttttagtagagacggtttcgccactttggtcaggctagtcttgaattcctgacctcaagtaatccgcctgccttggcctcccgaagtgctggaattacaggcgtgagccactgcgcccagctacctgtcatttctaatatagcctgcagggggaaccaaagcctgactttttgtttttgtttctgtttttgtttttgttttctatgggaaatagtgctctcctgggaggtgggtttccaaatctctgcttggacacatgaatttgagggttgtgctctccactaacccaagaattcccatgctggggagggtagcttggccctccgcttgcttcccagttcatacagatggtcctttgctccctctatttctcaccttgttctaatgcctgtttctcaattattttgcctgaagtttcctggagaatgagggtgaggggagacctggagtgggagacctgggtgtggattactgtagcactaaggcaaaacaggattcctgcggaatagccaagtgcacatcaaaggcacctccaactccagtgcctcttcccggtccatgtcctgctccacccaaccttcaatcagggaacacaaacaacagcgaagtttgccaaaagaattcgagtatcagtgagatgttctggccagggtacaggagggatgagtgaggcagaaactatcaaagaaaactcatttccccacacccaagaaggagctggatgacccaggtacagatataattttgagatgggaaaattaagggattttaaagaaacagttccagcctcaacaagaagctagagaatgtggtgctcagtgaggggttatcctacttggaggcccagctggtctcccaggttcagccaaacacggaaatctcagatcctcggatgtcatgtggggtggggcagggaagtctcacatgtcttcagccctgcacaaggccaggagggctgactggcaatcccctttcactgcatcctgcagacaagggaattcagtgttagaaagatccaccaccactatggcccaagtgctctctcccctcctttgggctggtccatcacagttcatctgggagggaagggtcctcccgggagctcagagtcctgcactacattaaccaaagactcctgggttttcttttttaagatggagtcttgccctgtcacccaggtgggagtgcagtggcacgatcttggctcactgcaacctctgccttctgggttcaagcgactctcctgcctcagcctcctgagtagctgggattacaggtgcacgccaccatgcctggctaatttttgtatttttagtagagacggggtttcaccatgttggtcagggtggtcttgaactcctgacctcgtgatccgcccacctcagcctctcaaagtgctgggattacaggcgtgagccactgtgcctggctaactactgggttttctatggggcaagaatatgctcagctgtgtgcagggagtgagggtggaggtgaggagtgaaggcctgaggctccaggctaagaagtagccaagtttcacctggagagaagagtagagggacttcccaaatttcttcctgaactcagctctgatactcagaaggtcagtctcacatcgagagataaggatgcgaatcaggacttggtaattgggctcagtttcctagtaggggaagaaagagatggggggtagttagtgagagtctcactgagagtaggggttgaatggcttggagggttattgtaggaaggggaggcaaggtgggagtcaagggataagagtgtacattatacattatctcgggacaaaagttatgtttgtccatcctcaaggaagatgacacagcaggaaagatcagtctctgtgggggcagcttgagtatttatttctttccacatgtctttcctgcccctaccattagcttagagctgtgtacctccagaatttggtggtgagcagctccaaagataggtacaccaggaaggctagaaaagatttggtgcatataaagactgccagcatgaaaaccaggaaaactgcttttaactttcaagttagtgaatatccaaggaggatatacctgccctatccctaaactgagctgatgaggctctgatagggttcaaggttgtgtgacttctagttctgattccaacccaatagggccatctcacagccccatctctgcatattagtttctccggttggacccttaggctgaaacattgctatcttcctcctgtacatgcagcaggcctgttttttggctaaagaaagtaatgaaaggttcagtttagaaataacaggccaggcacagtggctcatgcctgtaatcccagcactttgggaggatgaggcgcgtggatcatctgaggtaggagttcgagaccagcctgaccaaaatggtgaaaccccgtctctactaaaaatacatgaggcaggagaattgcttgancccaggaggtggaggttgcagtgagctgagatcgcgccactgcactccaacctgggcaagaagagcaaaactccgtctcaaaaaaaaaaaaaaaaaagaaagaaagaaaaaagaaataacaggccaggtgtggtggctcatgcctgtaatcccagaattttgggaggccaaggcaagcagatcatttatggtcaggagttcgagaccagcctggccaacatggtgaaacccccgtctctattaaaactacaaaaattagccaggtgtggtggtaggcgcctataatcccagctactgaggagggtgaggtaggagaattgcttgaacctgggaggcggacgttgcagtgagctgagatcacaccactgcactccagcctgggacagagcaagactccgtctcaaaaaaaaagaaaagaaaagaaataacacaggtacaagtcatcaaaatcctgaattataattgattatactaagtaatgtgttgttatgagagatttttaaataaaaacttttaattgtaa

SEQ ID NO: 285569 - DNA, 349 bp, Homo sapiens
tagctgctctattataagtatttgttaagtgaatgaatacagccaggtttcaagaaagggacgtcagaaggtgggactgaccccccggggcttttgacaggggctctctggatggtccttcctgttgtggaccttgaatttaagccaagtttcccccgactcgtccctttctggcaggcctgattgcagagcagttcctggagaccaccgcggcccagctgacctaccacggactgtgtgagctgacagcagctgctaaggagggtgaacttagcgtctttttccgaaacaaccactttagcaccatgactaagcataaggtaatgcgagtttgggggtggcgtgctgc

SEQ ID NO: 285570 - DNA, 499 bp, Homo sapiens
ggtaaggccgggactgcagaagcagtcatccctgaaaaccatgaggttctggcaggcccagatgagcaccctcaggacacagatgcaagagatgctgatggggaggctagagaacgggagccagcagaccaagctttgctgcctagccagtgtggggacaaccttgagtcccctctgcctgaagctagctcagctccaccggggccaacccttgggacactgcctgaagtagagacaataagggcatgctccatgccccaggagcttcctcagtcccccaggacccgacagcctgagccagatttctactgtgtcaagtggatcccttggaaaggagaacagacacccatcatcacccagagcactaacggcccttgccctctccttgccatcatgaacatcctctttcttcagtggaaggtaagagaacatgcagttaggggtgcaaaaaatatcagggagtactcttccctgacttacttccttgatcatcctgatg

SEQ ID NO: 285571 - DNA, 6000 bp, Homo sapiens
  misc_feature (2956)..(2956): n is a, c, g, or t
  misc_feature (5436)..(5436): n is a, c, g, or t
  misc_feature (5477)..(5477): n is a, c, g, or t
gcgctccgtcccttctagaggcaggcagagggaagagaaagggtctgttgtttttctctcctgtttctcgctccctctctgctgatcacaaagctgctgaccgggtcagaaagtcctgatggaaatccaccagcgctgggcaggcccctcctcctccagggagcttgtccttgcctaatttttcttcgtcctgatgagaacaaaaaagagagagagaagaaaagaaaaaccacaaacttcctttgaaaaccagcttgtagtcagggcccggagcgcatgccatagactcggcgactcaggaatcctgaagactctctgagcgacctggagcaccttggctgtgtccctgcctgccttcaccctcctccagtgcccccagtactgggcgtgagtccggaagtggccacaacccagcctggaccgtcgcttataaagctgtgtaaacctgtataagctcaggcgttgacagctggaaggcagctggcactggcagcccccttcattgcacctatctcccccatctcattgccacggctgaaccctccttctcaatcttggaacagcacccccttctttaagggaagctgactccacccatgtgttcaatcccaccagtcttccctcccaagtctggaagccccacgacctcttggtctcatctggtcacagcaagttagaggtggaaagagctcagcacggggcccttctgtttacacatatactgcccatagccaggagttactgcacaaacactagccagccttctacactacattccttttccaagacttttctgggttagtttgctttccagcccactgatttccttcttattggacaggtcactcttttgcatcccaagcctggcttaggcaagtccctgaggttagtaaacaccttcagtgcccctcagccgagtcccttttgaccatggaataccatcagcctgaggatccagcccctggtaaggccgggactgcagaagcagtcatccctgaaaaccatgaggttctggcaggcccagatgagcaccctcaggacacagatgcaagagatgctgatggggaggctagagaacgggagccagcagaccaagctttgctgcctagccagtgtggggacaaccttgagtcccctctgcctgaagctagctcagctccaccggggccaacccttgggacactgcctgaagtagagacaataagggcatgctccatgccccaggagcttcctcagtcccccaggacccgacagcctgagccagatttctactgtgtcaagtggatcccttggaaaggagaacagacacccatcatcacccagagcactaacggcccttgccctctccttgccatcatgaacatcctctttcttcagtggaaggtgaagctccccccgcagaaggaagtgatcacatcggatgagctcatggcccatcttggaaactgcctcctgtccatcaagccccaggagaagtcagagggacttcagcttaattttcagcagaatgtggatgatgcaatgacagtgctgcctaaactggccacaggtctggatgtcaatgtgcgattcacaggcgtctctgattttgagtatacacccgagtgcagtgtctttgacctgctaggcatacctctgtaccatggctggcttgttgatccacagagtcctgaggctgtgcgtgcagttgggaaactgagttacaaccagctggtggagaggatcatcacctgcaaacactccagtgacaccaacctcgtgacagaaggcctgattgcagagcagttcctggagaccaccgcggcccagctgacctaccacggactgtgtgagctgacagcagctgctaaggagggtgaacttagcgtctttttccgaaacaaccactttagcaccatgactaagcataagagtcacttatacctactggtcactgaccagggctttctacaggaggagcaagtcgtatgggagagcctgcacaatgtggatggagacagctgcttttgtgactctgactttcacctgagtcattccctgggcaaggggcctggagcagaaggtgggagtggctccccagaaaagcagctgcaggtagaccaggactacctgattgctctgtccctgcagcagcaacagccacgaggcccgctggggcttaccgacttggagctggcccagcagcttcagcaagaggagtatcaacagcagcaggcagcgcagccagtgcggatgcggacgcgggtcctgtcactgcaggggagaggagccacatctggacgcccagccggggagcgtcggcagaggccgaagcacgagtcagactgcattctgctgtagctctgccccagtgccaggctggcctgccccttcttccagaggctatggctagttggcttgctcccccgcctccacccctgagatgtgctggataacttatttatggactgttggggatgagagcaggcaacaaatgccaaggtcagacttggtaatgtccttgacctcacgtgctgctgccttctctgcctcccacccagggcaacactaggattggtgggtttctggttctcaactcccggtccctgaatagtcacacgtatgtacagactgaggctctggggtgaggtccctatccagaatgcatctcttctgcttcccatccctgctgcctggatgctcctgatcacctaggcaggcctgtctccagttgtttcagagcttaatttgggtttctatctcttatttgtaatgccttcctggggtttggaaataaaacttctggccgggcacggtggctcactcctgtaatctcaacaatttgagaggccaaggtgggcggatcacctgaggttaggagttcgagaccagcctgcccaaaaaggtgaaaccccgtctctactaaaaatacaagaaattactgggactacaggcatgcgccactgcgcccagctantttttgtatttttagtagagacggtttcgccactttggtcaggctagtcttgaattcctgacctcaagtaatccgcctgccttggcctcccgaagtgctggaattacaggcgtgagccactgcgcccagctacctgtcatttctaatatagcctgcagggggaaccaaagcctgactttttgtttttgtttctgtttttgtttttgttttctatgggaaatagtgctctcctgggaggtgggtttccaaatctctgcttggacacatgaatttgagggttgtgctctccactaacccaagaattcccatgctggggagggtagcttggccctccgcttgcttcccagttcatacagatggtcctttgctccctctatttctcaccttgttctaatgcctgtttctcaattattttgcctgaagtttcctggagaatgagggtgaggggagacctggagtgggagacctgggtgtggattactgtagcactaaggcaaaacaggattcctgcggaatagccaagtgcacatcaaaggcacctccaactccagtgcctcttcccggtccatgtcctgctccacccaaccttcaatcagggaacacaaacaacagcgaagtttgccaaaagaattcgagtatcagtgagatgttctggccagggtacaggagggatgagtgaggcagaaactatcaaagaaaactcatttccccacacccaagaaggagctggatgacccaggtacagatataattttgagatgggaaaattaagggattttaaagaaacagttccagcctcaacaagaagctagagaatgtggtgctcagtgaggggttatcctacttggaggcccagctggtctcccaggttcagccaaacacggaaatctcagatcctcggatgtcatgtggggtggggcagggaagtctcacatgtcttcagccctgcacaaggccaggagggctgactggcaatcccctttcactgcatcctgcagacaagggaattcagtgttagaaagatccaccaccactatggcccaagtgctctctcccctcctttgggctggtccatcacagttcatctgggagggaagggtcctcccgggagctcagagtcctgcactacattaaccaaagactcctgggttttcttttttaagatggagtcttgccctgtcacccaggtgggagtgcagtggcacgatcttggctcactgcaacctctgccttctgggttcaagcgactctcctgcctcagcctcctgagtagctgggattacaggtgcacgccaccatgcctggctaatttttgtatttttagtagagacggggtttcaccatgttggtcagggtggtcttgaactcctgacctcgtgatccgcccacctcagcctctcaaagtgctgggattacaggcgtgagccactgtgcctggctaactactgggttttctatggggcaagaatatgctcagctgtgtgcagggagtgagggtggaggtgaggagtgaaggcctgaggctccaggctaagaagtagccaagtttcacctggagagaagagtagagggacttcccaaatttcttcctgaactcagctctgatactcagaaggtcagtctcacatcgagagataaggatgcgaatcaggacttggtaattgggctcagtttcctagtaggggaagaaagagatggggggtagttagtgagagtctcactgagagtaggggttgaatggcttggagggttattgtaggaaggggaggcaaggtgggagtcaagggataagagtgtacattatacattatctcgggacaaaagttatgtttgtccatcctcaaggaagatgacacagcaggaaagatcagtctctgtgggggcagcttgagtatttatttctttccacatgtctttcctgcccctaccattagcttagagctgtgtacctccagaatttggtggtgagcagctccaaagataggtacaccaggaaggctagaaaagatttggtgcatataaagactgccagcatgaaaaccaggaaaactgcttttaactttcaagttagtgaatatccaaggaggatatacctgccctatccctaaactgagctgatgaggctctgatagggttcaaggttgtgtgacttctagttctgattccaacccaatagggccatctcacagccccatctctgcatattagtttctccggttggacccttaggctgaaacattgctatcttcctcctgtacatgcagcaggcctgttttttggctaaagaaagtaatgaaaggttcagtttagaaataacaggccaggcacagtggctcatgcctgtaatcccagcactttgggaggatgaggcgcgtggatcatctgaggtaggagttcgagaccagcctgaccaaaatggtgaaaccccgtctctactaaaaatacaaaaataagccaggcatggtggtgggtgcctgcantcccagctacttggaaggctgaggcaggagaattgcttgancccaggaggtggaggttgcagtgagctgagatcgcgccactgcactccaacctgggcaagaagagcaaaactccgtctcaaaaaaaaaaaaaaaaaagaaagaaagaaaaaagaaataacaggccaggtgtggtggctcatgcctgtaatcccagaattttgggaggccaaggcaagcagatcatttatggtcaggagttcgagaccagcctggccaacatggtgaaacccccgtctctattaaaactacaaaaattagccaggtgtggtggtaggcgcctataatcccagctactgaggagggtgaggtaggagaattgcttgaacctgggaggcggacgttgcagtgagctgagatcacaccactgcactccagcctgggacagagcaagactccgtctcaaaaaaaaagaaaagaaaagaaataacacaggtacaagtcatcaaaatcctgaattataattgattatactaagtaatgtgttgttatgagagatttttaaataaaaacttttaattgtaa

SEQ ID NO: 285572 - DNA, 6025 bp, Homo sapiens
  misc_feature (2981)..(2981): n is a, c, g, or t
  misc_feature (5461)..(5461): n is a, c, g, or t
  misc_feature (5502)..(5502): n is a, c, g, or t
ggccaagggggcgtggcgtggggcgacgtgggaaacgtagtcccgcaactccgcaatgtccctagcaaccgagggaaggattgttttctgagggatcagtcgttcggtaaacaaatgtctgctgaccgggtcagaaagtcctgatggaaatccaccagcgctgggcaggcccctcctcctccagggagcttgtccttgcctaatttttcttcgtcctgatgagaacaaaaaagagagagagaagaaaagaaaaaccacaaacttcctttgaaaaccagcttgtagtcagggcccggagcgcatgccatagactcggcgactcaggaatcctgaagactctctgagcgacctggagcaccttggctgtgtccctgcctgccttcaccctcctccagtgcccccagtactgggcgtgagtccggaagtggccacaacccagcctggaccgtcgcttataaagctgtgtaaacctgtataagctcaggcgttgacagctggaaggcagctggcactggcagcccccttcattgcacctatctcccccatctcattgccacggctgaaccctccttctcaatcttggaacagcacccccttctttaagggaagctgactccacccatgtgttcaatcccaccagtcttccctcccaagtctggaagccccacgacctcttggtctcatctggtcacagcaagttagaggtggaaagagctcagcacggggcccttctgtttacacatatactgcccatagccaggagttactgcacaaacactagccagccttctacactacattccttttccaagacttttctgggttagtttgctttccagcccactgatttccttcttattggacaggtcactcttttgcatcccaagcctggcttaggcaagtccctgaggttagtaaacaccttcagtgcccctcagccgagtcccttttgaccatggaataccatcagcctgaggatccagcccctggtaaggccgggactgcagaagcagtcatccctgaaaaccatgaggttctggcaggcccagatgagcaccctcaggacacagatgcaagagatgctgatggggaggctagagaacgggagccagcagaccaagctttgctgcctagccagtgtggggacaaccttgagtcccctctgcctgaagctagctcagctccaccggggccaacccttgggacactgcctgaagtagagacaataagggcatgctccatgccccaggagcttcctcagtcccccaggacccgacagcctgagccagatttctactgtgtcaagtggatcccttggaaaggagaacagacacccatcatcacccagagcactaacggcccttgccctctccttgccatcatgaacatcctctttcttcagtggaaggtgaagctccccccgcagaaggaagtgatcacatcggatgagctcatggcccatcttggaaactgcctcctgtccatcaagccccaggagaagtcagagggacttcagcttaattttcagcagaatgtggatgatgcaatgacagtgctgcctaaactggccacaggtctggatgtcaatgtgcgattcacaggcgtctctgattttgagtatacacccgagtgcagtgtctttgacctgctaggcatacctctgtaccatggctggcttgttgatccacagagtcctgaggctgtgcgtgcagttgggaaactgagttacaaccagctggtggagaggatcatcacctgcaaacactccagtgacaccaacctcgtgacagaaggcctgattgcagagcagttcctggagaccaccgcggcccagctgacctaccacggactgtgtgagctgacagcagctgctaaggagggtgaacttagcgtctttttccgaaacaaccactttagcaccatgactaagcataagagtcacttatacctactggtcactgaccagggctttctacaggaggagcaagtcgtatgggagagcctgcacaatgtggatggagacagctgcttttgtgactctgactttcacctgagtcattccctgggcaaggggcctggagcagaaggtgggagtggctccccagaaaagcagctgcaggtagaccaggactacctgattgctctgtccctgcagcagcaacagccacgaggcccgctggggcttaccgacttggagctggcccagcagcttcagcaagaggagtatcaacagcagcaggcagcgcagccagtgcggatgcggacgcgggtcctgtcactgcaggggagaggagccacatctggacgcccagccggggagcgtcggcagaggccgaagcacgagtcagactgcattctgctgtagctctgccccagtgccaggctggcctgccccttcttccagaggctatggctagttggcttgctcccccgcctccacccctgagatgtgctggataacttatttatggactgttggggatgagagcaggcaacaaatgccaaggtcagacttggtaatgtccttgacctcacgtgctgctgccttctctgcctcccacccagggcaacactaggattggtgggtttctggttctcaactcccggtccctgaatagtcacacgtatgtacagactgaggctctggggtgaggtccctatccagaatgcatctcttctgcttcccatccctgctgcctggatgctcctgatcacctaggcaggcctgtctccagttgtttcagagcttaatttgggtttctatctcttatttgtaatgccttcctggggtttggaaataaaacttctggccgggcacggtggctcactcctgtaatctcaacaatttgagaggccaaggtgggcggatcacctgaggttaggagttcgagaccagcctgcccaaaaaggtgaaaccccgtctctactaaaaatacaagaaattactgggactacaggcatgcgccactgcgcccagctantttttgtatttttagtagagacggtttcgccactttggtcaggctagtcttgaattcctgacctcaagtaatccgcctgccttggcctcccgaagtgctggaattacaggcgtgagccactgcgcccagctacctgtcatttctaatatagcctgcagggggaaccaaagcctgactttttgtttttgtttctgtttttgtttttgttttctatgggaaatagtgctctcctgggaggtgggtttccaaatctctgcttggacacatgaatttgagggttgtgctctccactaacccaagaattcccatgctggggagggtagcttggccctccgcttgcttcccagttcatacagatggtcctttgctccctctatttctcaccttgttctaatgcctgtttctcaattattttgcctgaagtttcctggagaatgagggtgaggggagacctggagtgggagacctgggtgtggattactgtagcactaaggcaaaacaggattcctgcggaatagccaagtgcacatcaaaggcacctccaactccagtgcctcttcccggtccatgtcctgctccacccaaccttcaatcagggaacacaaacaacagcgaagtttgccaaaagaattcgagtatcagtgagatgttctggccagggtacaggagggatgagtgaggcagaaactatcaaagaaaactcatttccccacacccaagaaggagctggatgacccaggtacagatataattttgagatgggaaaattaagggattttaaagaaacagttccagcctcaacaagaagctagagaatgtggtgctcagtgaggggttatcctacttggaggcccagctggtctcccaggttcagccaaacacggaaatctcagatcctcggatgtcatgtggggtggggcagggaagtctcacatgtcttcagccctgcacaaggccaggagggctgactggcaatcccctttcactgcatcctgcagacaagggaattcagtgttagaaagatccaccaccactatggcccaagtgctctctcccctcctttgggctggtccatcacagttcatctgggagggaagggtcctcccgggagctcagagtcctgcactacattaaccaaagactcctgggttttcttttttaagatggagtcttgccctgtcacccaggtgggagtgcagtggcacgatcttggctcactgcaacctctgccttctgggttcaagcgactctcctgcctcagcctcctgagtagctgggattacaggtgcacgccaccatgcctggctaatttttgtatttttagtagagacggggtttcaccatgttggtcagggtggtcttgaactcctgacctcgtgatccgcccacctcagcctctcaaagtgctgggattacaggcgtgagccactgtgcctggctaactactgggttttctatggggcaagaatatgctcagctgtgtgcagggagtgagggtggaggtgaggagtgaaggcctgaggctccaggctaagaagtagccaagtttcacctggagagaagagtagagggacttcccaaatttcttcctgaactcagctctgatactcagaaggtcagtctcacatcgagagataaggatgcgaatcaggacttggtaattgggctcagtttcctagtaggggaagaaagagatggggggtagttagtgagagtctcactgagagtaggggttgaatggcttggagggttattgtaggaaggggaggcaaggtgggagtcaagggataagagtgtacattatacattatctcgggacaaaagttatgtttgtccatcctcaaggaagatgacacagcaggaaagatcagtctctgtgggggcagcttgagtatttatttctttccacatgtctttcctgcccctaccattagcttagagctgtgtacctccagaatttggtggtgagcagctccaaagataggtacaccaggaaggctagaaaagatttggtgcatataaagactgccagcatgaaaaccaggaaaactgcttttaactttcaagttagtgaatatccaaggaggatatacctgccctatccctaaactgagctgatgaggctctgatagggttcaaggttgtgtgacttctagttctgattccaacccaatagggccatctcacagccccatctctgcatattagtttctccggttggacccttaggctgaaacattgctatcttcctcctgtacatgcagcaggcctgttttttggctaaagaaagtaatgaaaggttcagtttagaaataacaggccaggcacagtggctcatgcctgtaatcccagcactttgggaggatgaggcgcgtggatcatctgaggtaggagttcgagaccagcctgaccaaaatggtgaaaccccgtctctactaaaaatacaaaaataagccaggcatggtggtgggtgcctgcantcccagctacttggaaggctgaggcaggagaattgcttgancccaggaggtggaggttgcagtgagctgagatcgcgccactgcactccaacctgggcaagaagagcaaaactccgtctcaaaaaaaaaaaaaaaaaagaaagaaagaaaaaagaaataacaggccaggtgtggtggctcatgcctgtaatcccagaattttgggaggccaaggcaagcagatcatttatggtcaggagttcgagaccagcctggccaacatggtgaaacccccgtctctattaaaactacaaaaattagccaggtgtggtggtaggcgcctataatcccagctactgaggagggtgaggtaggagaattgcttgaacctgggaggcggacgttgcagtgagctgagatcacaccactgcactccagcctgggacagagcaagactccgtctcaaaaaaaaagaaaagaaaagaaataacacaggtacaagtcatcaaaatcctgaattataattgattatactaagtaatgtgttgttatgagagatttttaaataaaaacttttaattgtaa

SEQ ID NO: 285573 - DNA, 5685 bp, Homo sapiens
  misc_feature (2694)..(2694): n is a, c, g, or t
  misc_feature (5162)..(5162): n is a, c, g, or t
gcgctccgtcccttctagaggcaggcagagggaagagaaagggtctgttgtttttctctcctgtttctcgctccctctctgctgatcacaaagctgctgaccgggtcagaaagtcctgatggaaatccaccagcgctgggcaggcccctcctcctccagggagcttgtccttgcctaatttttcttcgtcctgatgagaacaaaaaagagagagagaagaaaagaaaaaccacaaacttcctttgaaaaccagcttgtagtcagggcccggagcgcatgccatagactcggcgactcaggaatcctgaagactctctgagcgacctggagcaccttggctgtgtccctgcctgccttcaccctcctccagtgcccccagtactgggcgtgagtccggaagtggccacaacccagcctggaccgtcgcttataaagctgtgtaaacctgtataagctcaggcgttgacagctggaaggcagctggcactggcagcccccttcattgcacctatctcccccatctcattgccacggctgaaccctccttctcaatcttggaacagcacccccttctttaaggtcactcttttgcatcccaagcctggcttaggcaagtccctgaggttagtaaacaccttcagtgcccctcagccgagtcccttttgaccatggaataccatcagcctgaggatccagcccctggtaaggccgggactgcagaagcagtcatccctgaaaaccatgaggttctggcaggcccagatgagcaccctcaggacacagatgcaagagatgctgatggggaggctagagaacgggagccagcagaccaagctttgctgcctagccagtgtggggacaaccttgagtcccctctgcctgaagctagctcagctccaccggggccaacccttgggacactgcctgaagtagagacaataagggcatgctccatgccccaggagcttcctcagtcccccaggacccgacagcctgagccagatttctactgtgtcaagtggatcccttggaaaggagaacagacacccatcatcacccagagcactaacggcccttgccctctccttgccatcatgaacatcctctttcttcagtggaaggtgaagctccccccgcagaaggaagtgatcacatcggatgagctcatggcccatcttggaaactgcctcctgtccatcaagccccaggagaagtcagagggacttcagcttaattttcagcagaatgtggatgatgcaatgacagtgctgcctaaactggccacaggtctggatgtcaatgtgcgattcacaggcgtctctgattttgagtatacacccgagtgcagtgtctttgacctgctaggcatacctctgtaccatggctggcttgttgatccacagagtcctgaggctgtgcgtgcagttgggaaactgagttacaaccagctggtggagaggatcatcacctgcaaacactccagtgacaccaacctcgtgacagaaggcctgattgcagagcagttcctggagaccaccgcggcccagctgacctaccacggactgtgtgagctgacagcagctgctaaggagggtgaacttagcgtctttttccgaaacaaccactttagcaccatgactaagcataagagtcacttatacctactggtcactgaccagggctttctacaggaggagcaagtcgtatgggagagcctgcacaatgtggatggagacagctgcttttgtgactctgactttcacctgagtcattccctgggcaaggggcctggagcagaaggtgggagtggctccccagaaaagcagctgcaggtagaccaggactacctgattgctctgtccctgcagcagcaacagccacgaggcccgctggggcttaccgacttggagctggcccagcagcttcagcaagaggagtatcaacagcagcaggcagcgcagccagtgcggatgcggacgcgggtcctgtcactgcaggggagaggagccacatctggacgcccagccggggagcgtcggcagaggccgaagcacgagtcagactgcattctgctgtagctctgccccagtgccaggctggcctgccccttcttccagaggctatggctagttggcttgctcccccgcctccacccctgagatgtgctggataacttatttatggactgttggggatgagagcaggcaacaaatgccaaggtcagacttggtaatgtccttgacctcacgtgctgctgccttctctgcctcccacccagggcaacactaggattggtgggtttctggttctcaactcccggtccctgaatagtcacacgtatgtacagactgaggctctggggtgaggtccctatccagaatgcatctcttctgcttcccatccctgctgcctggatgctcctgatcacctaggcaggcctgtctccagttgtttcagagcttaatttgggtttctatctcttatttgtaatgccttcctggggtttggaaataaaacttctggccgggcacggtggctcactcctgtaatctcaacaatttgagaggccaaggtgggcggatcacctgaggttaggagttcgagaccagcctgcccaaaaaggtgaaaccccgtctctactaaaaatacaagaaattactgggactacaggcatgcgccactgcgcccagctantttttgtatttttagtagagacggtttcgccactttggtcaggctagtcttgaattcctgacctcaagtaatccgcctgccttggcctcccgaagtgctggaattacaggcgtgagccactgcgcccagctacctgtcatttctaatatagcctgcagggggaaccaaagcctgactttttgtttttgtttctgtttttgtttttgttttctatgggaaatagtgctctcctgggaggtgggtttccaaatctctgcttggacacatgaatttgagggttgtgctctccactaacccaagaattcccatgctggggagggtagcttggccctccgcttgcttcccagttcatacagatggtcctttgctccctctatttctcaccttgttctaatgcctgtttctcaattattttgcctgaagtttcctggagaatgagggtgaggggagacctggagtgggagacctgggtgtggattactgtagcactaaggcaaaacaggattcctgcggaatagccaagtgcacatcaaaggcacctccaactccagtgcctcttcccggtccatgtcctgctccacccaaccttcaatcagggaacacaaacaacagcgaagtttgccaaaagaattcgagtatcagtgagatgttctggccagggtacaggagggatgagtgaggcagaaactatcaaagaaaactcatttccccacacccaagaaggagctggatgacccaggtacagatataattttgagatgggaaaattaagggattttaaagaaacagttccagcctcaacaagaagctagagaatgtggtgctcagtgaggggttatcctacttggaggcccagctggtctcccaggttcagccaaacacggaaatctcagatcctcggatgtcatgtggggtggggcagggaagtctcacatgtcttcagccctgcacaaggccaggagggctgactggcaatcccctttcactgcatcctgcagacaagggaattcagtgttagaaagatccaccaccactatggcccaagtgctctctcccctcctttgggctggtccatcacagttcatctgggagggaagggtcctcccgggagctcagagtcctgcactacattaaccaaagactcctgggttttcttttttaagatggagtcttgccctgtcacccaggtgggagtgcagtggcacgatcttggctcactgcaacctctgccttctgggttcaagcgactctcctgcctcagcctcctgagtagctgggattacaggtgcacgccaccatgcctggctaatttttgtatttttagtagagacggggtttcaccatgttggtcagggtggtcttgaactcctgacctcgtgatccgcccacctcagcctctcaaagtgctgggattacaggcgtgagccactgtgcctggctaactactgggttttctatggggcaagaatatgctcagctgtgtgcagggagtgagggtggaggtgaggagtgaaggcctgaggctccaggctaagaagtagccaagtttcacctggagagaagagtagagggacttcccaaatttcttcctgaactcagctctgatactcagaaggtcagtctcacatcgagagataaggatgcgaatcaggacttggtaattgggctcagtttcctagtaggggaagaaagagatggggggtagttagtgagagtctcactgagagtaggggttgaatggcttggagggttattgtaggaaggggaggcaaggtgggagtcaagggataagagtgtacattatacattatctcgggacaaaagttatgtttgtccatcctcaaggaagatgacacagcaggaaagatcagtctctgtgggggcagcttgagtatttatttctttccacatgtctttcctgcccctaccattagcttagagctgtgtacctccagaatttggtggtgagcagctccaaagataggtacaccaggaaggctagaaaagatttggtgcatataaagactgccagcatgaaaaccaggaaaactgcttttaactttcaagttagtgaatatccaaggaggatatacctgccctatccctaaactgagctgatgaggctctgatagggttcaaggttgtgtgacttctagttctgattccaacccaatagggccatctcacagccccatctctgcatattagtttctccggttggacccttaggctgaaacattgctatcttcctcctgtacatgcagcaggcctgttttttggctaaagaaagtaatgaaaggttcagtttagaaataacaggccaggcacagtggctcatgcctgtaatcccagcactttgggaggatgaggcgcgtggatcatctgaggtaggagttcgagaccagcctgaccaaaatggtgaaaccccgtctctactaaaaatacatgaggcaggagaattgcttgancccaggaggtggaggttgcagtgagctgagatcgcgccactgcactccaacctgggcaagaagagcaaaactccgtctcaaaaaaaaaaaaaaaaaagaaagaaagaaaaaagaaataacaggccaggtgtggtggctcatgcctgtaatcccagaattttgggaggccaaggcaagcagatcatttatggtcaggagttcgagaccagcctggccaacatggtgaaacccccgtctctattaaaactacaaaaattagccaggtgtggtggtaggcgcctataatcccagctactgaggagggtgaggtaggagaattgcttgaacctgggaggcggacgttgcagtgagctgagatcacaccactgcactccagcctgggacagagcaagactccgtctcaaaaaaaaagaaaagaaaagaaataacacaggtacaagtcatcaaaatcctgaattataattgattatactaagtaatgtgttgttatgagagatttttaaataaaaacttttaattgtaa

SEQ ID NO: 285574 - DNA, 4297 bp, Homo sapiens
  misc_feature (2694)..(2694): n is a, c, g, or t
gcgctccgtcccttctagaggcaggcagagggaagagaaagggtctgttgtttttctctcctgtttctcgctccctctctgctgatcacaaagctgctgaccgggtcagaaagtcctgatggaaatccaccagcgctgggcaggcccctcctcctccagggagcttgtccttgcctaatttttcttcgtcctgatgagaacaaaaaagagagagagaagaaaagaaaaaccacaaacttcctttgaaaaccagcttgtagtcagggcccggagcgcatgccatagactcggcgactcaggaatcctgaagactctctgagcgacctggagcaccttggctgtgtccctgcctgccttcaccctcctccagtgcccccagtactgggcgtgagtccggaagtggccacaacccagcctggaccgtcgcttataaagctgtgtaaacctgtataagctcaggcgttgacagctggaaggcagctggcactggcagcccccttcattgcacctatctcccccatctcattgccacggctgaaccctccttctcaatcttggaacagcacccccttctttaaggtcactcttttgcatcccaagcctggcttaggcaagtccctgaggttagtaaacaccttcagtgcccctcagccgagtcccttttgaccatggaataccatcagcctgaggatccagcccctggtaaggccgggactgcagaagcagtcatccctgaaaaccatgaggttctggcaggcccagatgagcaccctcaggacacagatgcaagagatgctgatggggaggctagagaacgggagccagcagaccaagctttgctgcctagccagtgtggggacaaccttgagtcccctctgcctgaagctagctcagctccaccggggccaacccttgggacactgcctgaagtagagacaataagggcatgctccatgccccaggagcttcctcagtcccccaggacccgacagcctgagccagatttctactgtgtcaagtggatcccttggaaaggagaacagacacccatcatcacccagagcactaacggcccttgccctctccttgccatcatgaacatcctctttcttcagtggaaggtgaagctccccccgcagaaggaagtgatcacatcggatgagctcatggcccatcttggaaactgcctcctgtccatcaagccccaggagaagtcagagggacttcagcttaattttcagcagaatgtggatgatgcaatgacagtgctgcctaaactggccacaggtctggatgtcaatgtgcgattcacaggcgtctctgattttgagtatacacccgagtgcagtgtctttgacctgctaggcatacctctgtaccatggctggcttgttgatccacagagtcctgaggctgtgcgtgcagttgggaaactgagttacaaccagctggtggagaggatcatcacctgcaaacactccagtgacaccaacctcgtgacagaaggcctgattgcagagcagttcctggagaccaccgcggcccagctgacctaccacggactgtgtgagctgacagcagctgctaaggagggtgaacttagcgtctttttccgaaacaaccactttagcaccatgactaagcataagagtcacttatacctactggtcactgaccagggctttctacaggaggagcaagtcgtatgggagagcctgcacaatgtggatggagacagctgcttttgtgactctgactttcacctgagtcattccctgggcaaggggcctggagcagaaggtgggagtggctccccagaaaagcagctgcaggtagaccaggactacctgattgctctgtccctgcagcagcaacagccacgaggcccgctggggcttaccgacttggagctggcccagcagcttcagcaagaggagtatcaacagcagcaggcagcgcagccagtgcggatgcggacgcgggtcctgtcactgcaggggagaggagccacatctggacgcccagccggggagcgtcggcagaggccgaagcacgagtcagactgcattctgctgtagctctgccccagtgccaggctggcctgccccttcttccagaggctatggctagttggcttgctcccccgcctccacccctgagatgtgctggataacttatttatggactgttggggatgagagcaggcaacaaatgccaaggtcagacttggtaatgtccttgacctcacgtgctgctgccttctctgcctcccacccagggcaacactaggattggtgggtttctggttctcaactcccggtccctgaatagtcacacgtatgtacagactgaggctctggggtgaggtccctatccagaatgcatctcttctgcttcccatccctgctgcctggatgctcctgatcacctaggcaggcctgtctccagttgtttcagagcttaatttgggtttctatctcttatttgtaatgccttcctggggtttggaaataaaacttctggccgggcacggtggctcactcctgtaatctcaacaatttgagaggccaaggtgggcggatcacctgaggttaggagttcgagaccagcctgcccaaaaaggtgaaaccccgtctctactaaaaatacaagaaattactgggactacaggcatgcgccactgcgcccagctantttttgtatttttagtagagacggtttcgccactttggtcaggctagtcttgaattcctgacctcaagtaatccgcctgccttggcctcccgaagtgctggaattacaggcgtgagccactgcgcccagctacctgtcatttctaatatagcctgcagggggaaccaaagcctgactttttgtttttgtttctgtttttgtttttgttttctatgggaaatagtgctctcctgggaggtgggtttccaaatctctgcttggacacatgaatttgagggttgtgctctccactaacccaagaattcccatgctggggagggtagcttggccctccgcttgcttcccagttcatacagatggtcctttgctccctctatttctcaccttgttctaatgcctgtttctcaattattttgcctgaagtttcctggagaatgagggtgaggggagacctggagtgggagacctgggtgtggattactgtagcactaaggcaaaacaggattcctgcggaatagccaagtgcacatcaaaggcacctccaactccagtgcctcttcccggtccatgtcctgctccacccaaccttcaatcagggaacacaaacaacagcgaagtttgccaaaagaattcgagtatcagtgagatgttctggccagggtacaggagggatgagtgaggcagaaactatcaaagaaaactcatttccccacacccaagaaggagctggatgacccaggtacagatataattttgagatgggaaaattaagggattttaaagaaacagttccagcctcaacaagaagctagagaatgtggtgctcagtgaggggttatcctacttggaggcccagctggtctcccaggttcagccaaacacggaaatctcagatcctcggatgtcatgtggggtggggcagggaagtctcacatgtcttcagccctgcacaaggccaggagggctgactggcaatcccctttcactgcatcctgcagacaagggaattcagtgttagaaagatccaccaccactatggcccaagtgctctctcccctcctttgggctggtccatcacagttcatctgggagggaagggtcctcccgggagctcagagtctgcactccaacctgggcaagaagagcaaaactccgtctcaaaaaaaaaaaaaaaaaagaaagaaagaaaaaagaaataacaggccaggtgtggtggctcatgcctgtaatcccagaattttgggaggccaaggcaagcagatcatttatggtcaggagttcgagaccagcctggccaacatggtgaaacccccgtctctattaaaactacaaaaattagccaggtgtggtggtaggcgcctataatcccagctactgaggagggtgaggtaggagaattgcttgaacctgggaggcggacgttgcagtgagctgagatcacaccactgcactccagcctgggacagagcaagactccgtctcaaaaaaaaagaaaagaaaagaaataacacaggtacaagtcatcaaaatcctgaattataattgattatactaagtaatgtgttgttatgagagatttttaaataaaaacttttaattgtaa

SEQ ID NO: 285575 - DNA, 2572 bp, Homo sapiens
  misc_feature (2563)..(2563): n is a, c, g, or t
gcgctccgtcccttctagaggcaggcagagggaagagaaagggtctgttgtttttctctcctgtttctcgctccctctctgctgatcacaaagctgctgaccgggtcagaaagtcctgatggaaatccaccagcgctgggcaggcccctcctcctccagggagcttgtccttgcctaatttttcttcgtcctgatgagaacaaaaaagagagagagaagaaaagaaaaaccacaaacttcctttgaaaaccagcttgtagtcagggcccggagcgcatgccatagactcggcgactcaggaatcctgaagactctctgagcgacctggagcaccttggctgtgtccctgcctgccttcaccctcctccagtgcccccagtactgggcgtgagtccggaagtggccacaacccagcctggaccgtcgcttataaagctgtgtaaacctgtataagctcaggcgttgacagctggaaggcagctggcactggcagcccccttcattgcacctatctcccccatctcattgccacggctgaaccctccttctcaatcttggaacagcacccccttctttaaggtcactcttttgcatcccaagcctggcttaggcaagtccctgaggttagtaaacaccttcagtgcccctcagccgagtcccttttgaccatggaataccatcagcctgaggatccagcccctggtaaggccgggactgcagaagcagtcatccctgaaaaccatgaggttctggcaggcccagatgagcaccctcaggacacagatgcaagagatgctgatggggaggctagagaacgggagccagcagaccaagctttgctgcctagccagtgtggggacaaccttgagtcccctctgcctgaagctagctcagctccaccggggccaacccttgggacactgcctgaagtagagacaataagggcatgctccatgccccaggagcttcctcagtcccccaggacccgacagcctgagccagatttctactgtgtcaagtggatcccttggaaaggagaacagacacccatcatcacccagagcactaacggcccttgccctctccttgccatcatgaacatcctctttcttcagtggaaggtgaagctccccccgcagaaggaagtgatcacatcggatgagctcatggcccatcttggaaactgcctcctgtccatcaagccccaggagaagtcagagggacttcagcttaattttcagcagaatgtggatgatgcaatgacagtgctgcctaaactggccacaggtctggatgtcaatgtgcgattcacaggcgtctctgattttgagtatacacccgagtgcagtgtctttgacctgctaggcatacctctgtaccatggctggcttgttgatccacagagtcctgaggctgtgcgtgcagttgggaaactgagttacaaccagctggtggagaggatcatcacctgcaaacactccagtgacaccaacctcgtgacagaaggcctgattgcagagcagttcctggagaccaccgcggcccagctgacctaccacggactgtgtgagctgacagcagctgctaaggagggtgaacttagcgtctttttccgaaacaaccactttagcaccatgactaagcataagagtcacttatacctactggtcactgaccagggctttctacaggaggagcaagtcgtatgggagagcctgcacaatgtggatggagacagctgcttttgtgactctgactttcacctgagtcattccctgggcaaggggcctggagcagaaggtgggagtggctccccagaaaagcagctgcaggtagaccaggactacctgattgctctgtccctgcagcagcaacagccacgaggcccgctggggcttaccgacttggagctggcccagcagcttcagcaagaggagtatcaacagcagcaggcagcgcagccagtgcggatgcggacgcgggtcctgtcactgcaggggagaggagccacatctggacgcccagccggggagcgtcggcagaggccgaagcacgagtcagactgcattctgctgtagctctgccccagtgccaggctggcctgccccttcttccagaggctatggctagttggcttgctcccccgcctccacccctgagatgtgctggataacttatttatggactgttggggatgagagcaggcaacaaatgccaaggtcagacttggtaatgtccttgacctcacgtgctgctgccttctctgcctcccacccagggcaacactaggattggtgggtttctggttctcaactcccggtccctgaatagtcacacgtatgtacagactgaggctctggggtgaggtccctatccagaatgcatctcttctgcttcccatccctgctgcctggatgctcctgatcacctaggcaggcctgtctccagttgtttcagagcttaatttgggtttctatctcttatttgtaatgccttcctggggtttggaaataaaacttctggccgggcacggtggctcactcctcccttccccccccaactnccccaacca

SEQ ID NO: 285576 - DNA, 2039 bp, Homo sapiens
gcgctccgtcccttctagaggcaggcagagggaagagaaagggtctgttgtttttctctcctgtttctcgctccctctctgctgatcacaaagctgctgaccgggtcagaaagtcctgatggaaatccaccagcgctgggcaggcccctcctcctccagggagcttgtccttgcctaatttttcttcgtcctgatgagaacaaaaaagagagagagaagaaaagaaaaaccacaaacttcctttgaaaaccagcttgtagtcagggcccggagcgcatgccatagactcggcgactcaggaatcctgaagactctctgagcgacctggagcaccttggctgtgtccctgcctgccttcaccctcctccagtgcccccagtactgggcgtgagtccggaagtggccacaacccagcctggaccgtcgcttataaagctgtgtaaacctgtataagctcaggcgttgacagctggaaggcagctggcactggcagcccccttcattgcacctatctcccccatctcattgccacggctgaaccctccttctcaatcttggaacagcacccccttctttaaggtcactcttttgcatcccaagcctggcttaggcaagtccctgaggttagtaaacaccttcagtgcccctcagccgagtcccttttgaccatggaataccatcagcctgaggatccagcccctggtaaggccgggactgcagaagcagtcatccctgaaaaccatgaggttctggcaggcccagatgagcaccctcaggacacagatgcaagagatgctgatggggaggctagagaacgggagccagcagaccaagctttgctgcctagccagtgtggggacaaccttgagtcccctctgcctgaagctagctcagctccaccggggccaacccttgggacactgcctgaagtagagacaataagggcatgctccatgccccaggagcttcctcagtcccccaggacccgacagcctgagccagatttctactgtgtcaagtggatcccttggaaaggagaacagacacccatcatcacccagagcactaacggcccttgccctctccttgccatcatgaacatcctctttcttcagtggaaggtgaagctccccccgcagaaggaagtgatcacatcggatgagctcatggcccatcttggaaactgcctcctgtccatcaagccccaggagaagtcagagggacttcagcttaattttcagcagaatgtggatgatgcaatgacagtgctgcctaaactggccacaggtctggatgtcaatgtgcgattcacaggcgtctctgattttgagtatacacccgagtgcagtgtctttgacctgctaggcatacctctgtaccatggctggcttgttgatccacagagtcctgaggctgtgcgtgcagttgggaaactgagttacaaccagctggtggagaggatcatcacctgcaaacactccagtgacaccaacctcgtgacagaaggcctgattgcagagcagttcctggagaccaccgcggcccagctgacctaccacggactgtgtgagctgacagcagctgctaaggagggtgaacttagcgtctttttccgaaacaaccactttagcaccatgactaagcataagagtcacttatacctactggtcactgaccagggctttctacaggaggagcaagtcgtatgggagagcctgcacaatgtggatggagacagctgcttttgtgactctgactttcacctgagtcattccctgggcaaggggcctggagcagaaggtgggagtggctccccagaaaagcagctgcaggtagaccaggactacctgattgctctgtccctgcagcagcaacagccacgaggcccgctggggcttaccgacttggagctggcccagcagcttcagcaagaggagtatcaacagcagcaggcagcgcagccagtgcggatgcggacgcgggtcctgtcactgcaggggagaggagccacatctgacgcccaccgggaattccgaatt

SEQ ID NO: 285577 - DNA, 1363 bp, Homo sapiens
gcgctccgtcccttctagaggcaggcagagggaagagaaagggtctgttgtttttctctcctgtttctcgctccctctctgctgatcacaaagctgctgaccgggtcagaaagtcctgatggaaatccaccagcgctgggcaggcccctcctcctccagggagcttgtccttgcctaatttttcttcgtcctgatgagaacaaaaaagagagagagaagaaaagaaaaaccacaaacttcctttgaaaaccagcttgtagtcagggcccggagcgcatgccatagactcggcgactcaggaatcctgaagactctctgagcgacctggagcaccttggctgtgtccctgcctgccttcaccctcctccagtgcccccagtactgggcgtgagtccggaagtggccacaacccagcctggaccgtcgcttataaagctgtgtaaacctgtataagctcaggcgttgacagctggaaggcagctggcactggcagcccccttcattgcacctatctcccccatctcattgccacggctgaaccctccttctcaatcttggaacagcacccccttctttaaggtcactcttttgcatcccaagcctggcttaggcaagtccctgaggttagtaaacaccttcagtgcccctcagccgagtcccttttgaccatggaataccatcagcctgaggatccagcccctggtaaggccgggactgcagaagcagtcatccctgaaaaccatgaggttctggcaggcccagatgagcaccctcaggacacagatgcaagagatgctgatggggaggctagagaacgggagccagcagaccaagctttgctgcctagccagtgtggggacaaccttgagtcccctctgcctgaagctagctcagctccaccggggccaacccttgggacactgcctgaagtagagacaataagggcatgctccatgccccaggagcttcctcagtcccccaggacccgacagcctgagccagatttctactgtgtcaagtggatcccttggaaaggagaacagacacccatcatcacccagagcactaacggcccttgccctctccttgccatcatgaacatcctctttcttcagtggaaggtgaagctccccccgcagaaggaagtgatcacatcggatgagctcatggcccatcttggaaactgcctcctgtccatcaagccccaggagaagtcagagggacttcagcttaattttcagcagaatgtggatgatgcaatgacagtgctgcctaaactggccacaggccacagttatccaagtaggagaggggctctcaaaagctggaggagtggggtctcaagaggagaggggctctcaaa

SEQ ID NO: 285578 - DNA, 776 bp, Homo sapiens
agcggctttctccccgccgcattcccggtgtcgacttactagctgcaagcctctgcctgccttcctgcgcgccgttccccgctagtcgctgctgctggcgcgcactcgccgggtttttcctcccacggcctcgagatggtggtgaatgtggcacggaggagccgggccttccaacccggtgggcccgagctccgaaaggccccctcggcagtgagaggggcgggagcccgcgggggccgcgcccttctctcgcttcggactgcgcaacgctgcgctctgggctgacaggcggataaaacggtcccatcaagactgagaaaaagcacaccagctattggcacagcgtgggcagtggggcctacaggatgactgacttagtctacagagatcccggcgtacttaagcaggtagtaaatgaagactcttaagatgacagaaggtgatttttctggtgatcgaggacttccggggtaatgacagtgatgaaatgcaggggacctggttgcccccaagtttcctggcagtgtgtgatactgaggaggtgagcttgtttctggagctgtgctttaagattcatgttacatgtaaagctgtcctcatttgtgactatggacctatggagttgggacaatctctatgggaagcagaaggcaaggaccccggtcattttaggtagaaacaacagcatgctaatgcaaaaaattatgcagtgtgctactgaacttcagaggtgatcaataaaagaagaataaaaagactaataaaagtaaaaaaat

SEQ ID NO: 285579 - DNA, 838 bp, Homo sapiens
agcggctttctccccgccgcattcccggtgtcgacttactagctgcaagcctctgcctgccttcctgcgcgccgttccccgctagtcgctgctgctggcgcgcactcgccgggtttttcctcccacggcctcgagatggtggtgaatgtggcacggaggagccgggccttccaacccggtgggcccgagctccgaaaggccccctcggcagtgagaggggcgggagcccgcgggggccgcgcccttctctcgcttcggactgcgcaacgctgcgctctgggctgacaggcggataaaacggtcccatcaagactgagaaaaagcacaccagctattggcacagcgtgggcagtggggcctacaggatgactgacttagtctacagagatcccggcgtacttaagcaggtagtaaatgaagactcttaagatgacagaaggtgatttttctggtgatcgaggacttccggggtaatgacagtgatgaaatgcaggggacctggtaggtttcttttggagactaactgggggctgcctggtgggacagaacagcatgtttccaagggctgtggctggtcatagccatgggatctccaactgcatgcaagagcaacctggaaagactttgacagcgcaggtcagtacaatacctgcaagctgccactcagctttcctataatgtttcaggaccagggctggaagccttccatgtgtcaacttcaatgtagatgggtttttttttttttttttttttgagacggagtcttgctctgtcacccaggctgctggagtgcagtggcatgatctcggctcatggcaacctctgcctcctgggttca

SEQ ID NO: 285580 - DNA, 420 bp, Homo sapiens
gccacaaatgttcagtggtggctggagctcatgatgcattctttggtgggacgtctctcagcattagggagagttgagagtggggtagaaacaaggggttccatgtagcacacactgtatttagaatgactggtccaggatgaaacctaatttgagtggacatccatggatgagaaatgcggatatgggactgagaccagctcctaggaaaatgtctgggtgggggaaatctgggaattagtaacacaatggcttacacttcctttgcaggacaatctctatgggaagcagaaggcaaggaccccggtcattttaggtagaaacaacagcatgctaatgcaaaaaattatgcagtgtgctactgaacttcagaggtgatcaataaaagaagaataaaaagactaataaaagtaaaaaaat

SEQ ID NO: 285581 - DNA, 278 bp, Homo sapiens
aggctggagtgcagtggcacaatcttggctaattgcctcccaggttcaagtgattctcctgcctcagcctcctgagtagctgggactataagcacgcaccactatgtctggttacacttcctttgcaggacaatctctatgggaagcagaaggcaaggaccccggtcattttaggtagaaacaacagcatgctaatgcaaaaaattatgcagtgtgctactgaacttcagaggtgatcaataaaagaagaataaaaagactaataaaagtaaaaaaat

SEQ ID NO: 285582 - DNA, 1100 bp, Homo sapiens
agcggctttctccccgccgcattcccggtgtcgacttactagctgcaagcctctgcctgccttcctgcgcgccgttccccgctagtcgctgctgctggcgcgcactcgccgggtttttcctcccacggcctcgagatggtggtgaatgtggcacggaggagccgggccttccaacccggtgggcccgagctccgaaaggccccctcggcagtgagaggggcgggagcccgcgggggccgcgcccttctctcgcttcggactgcgcaacgctgcgctctgggctgacaggcggataaaacggtcccatcaagactgagaaaaagcacaccagctattggcacagcgtgggcagtggggcctacaggatgactgacttagtctacagagatcccggcgtacttaagcaggtagtaaatgaagactcttaagatgacagaaggtgatttttctggtgatcgaggacttccggggtaatgacagtgatgaaatgcaggggacctggttgcccccaagtttcctggcagtgtgtgatactgaggaggtgagcttgtttctggagctgtgctttaaggtaaagttgatcagcttaatcctcctgatccctttcccatcggatctgaacactggtcttggtggtcgtaaaaggaggaaaagtaatagtgaagctggcctaaatgttgtaatctggtatatggcatgtgggctagtttcagacaggtttcagagatggttggatctctgaaattgtaaaatgaagtataatcttaggctaagggaaggatgcgtgtgaagctctggaggttggtatagtaatagctgacctattactgcatttgggagggatctgtcatagcttccttgcctcttaattaagggtggtgtttttttcttttagattcatgttacatgtaaagctgtcctcatttgtgactatggacctatggagttgggacaatctctatgggaagcagaaggcaaggaccccggtcattttaggtagaaacaacagcatgctaatgcaaaaaattatgcagtgtgctactgaacttcagaggtgatcaataaaagaagaataaaaagactaataaaagtaaaaaaat

SEQ ID NO: 285583 - DNA, 803 bp, Homo sapiens
ttacaggtgcccaccatcacacccagctaattttcttgtatttttagtagagatggttttcaccatgttggctagatgggtctcgaacttctgacctcgggtgatccgcccgactcggcctccccttccaaagtgctgggattacaggcatgagccaccgctcctggccagtttagttttcacgctaagctttttgttctgcaggttgcccccaagtttcctggcagtgtgtgatactgaggaggtgagcttgtttctggagctgtgctttaaggtaaagttgatcagcttaatcctcctgatccctttcccatcggatctgaacactggtcttggtggtcgtaaaaggaggaaaagtaatagtgaagctggcctaaatgttgtaatctggtatatggcatgtgggctagtttcagacaggtttcagagatggttggatctctgaaattgtaaaatgaagtataatcttaggctaagggaaggatgcgtgtgaagctctggaggttggtatagtaatagctgacctattactgcatttgggagggatctgtcatagcttccttgcctcttaattaagggtggtgtttttttcttttagattcatgttacatgtaaagctgtcctcatttgtgactatggacctatggagttgggacaatctctatgggaagcagaaggcaaggaccccggtcattttaggtagaaacaacagcatgctaatgcaaaaaattatgcagtgtgctactgaacttcagaggtgatcaataaaagaagaataaaaagactaataaaagtaaaaaaat

SEQ ID NO: 285584 - DNA, 1296 bp, Homo sapiens
agcggctttctccccgccgcattcccggtgtcgacttactagctgcaagcctctgcctgccttcctgcgcgccgttccccgctagtcgctgctgctggcgcgcactcgccgggtttttcctcccacggcctcgagatggtggtgaatgtggcacggaggagccgggccttccaacccggtgggcccgagctccgaaaggccccctcggcagtgagaggggcgggagcccgcgggggccgcgcccttctctcgcttcggactgcgcaacgctgcgctctgggctgacaggcggataaaacggtcccatcaagactgagaaaaagcacaccagctattggcacagcgtgggcagtggggcctacaggatgactgacttagtctacagagatcccggcgtacttaagcaggtagtaatgatggacaggtgaggctttaggcggccgccctgggatctgaattgccccttggcccttatcgaagctgcagctgcttccgcatagctgctgtggtcaaaaaggagcccagagtgacagttttccttgacggtcgccgttctgtttgttgtaactgatctgcaacattttgggaaaatacagttccattgtacctgccacctttcagctgtagccagagacctttatcaaaatgggcttgtttccacagaacagcagaacggttgggggtttgcatgtacagttaaccagcataagactcgtactgggaaaatccagctgggatgtgacacagcttaactgatagcttaaggcatcagtattgggaccaaaggctggtcagatttgtatcattctgaggaccaaatgatgggaacaataaaattgttcatgacagttgttctcattttgctgtccagaatgaagactcttaagatgacagaaggtgatttttctggtgatcgaggacttccggggtaatgacagtgatgaaatgcaggggacctggtaggtttcttttggagactaactgggggctgcctggtgggacagaacagcatgtttccaagggctgtggctggtcatagccatgggatctccaactgcatgcaagagcaacctggaaagactttgacagcgcaggtcagtacaatacctgcaagctgccactcagctttcctataatgtttcaggaccagggctggaagccttccatgtgtcaacttcaatgtagatgggtttttttttttttttttttttgagacggagtcttgctctgtcacccaggctgctggagtgcagtggcatgatctcggctcatggcaacctctgcctcctgggttca

SEQ ID NO: 285585 - DNA, 1017 bp, Homo sapiens
agcggctttctccccgccgcattcccggtgtcgacttactagctgcaagcctctgcctgccttcctgcgcgccgttccccgctagtcgctgctgctggcgcgcactcgccgggtttttcctcccacggcctcgagatggtggtgaatgtggcacggaggagccgggccttccaacccggtgggcccgagctccgaaaggccccctcggcagtgagaggggcgggagcccgcgggggccgcgcccttctctcgcttcggactgcgcaacgctgcgctctgggctgacaggtgagtgttgcaggcaggcggccgggtttacggaaggggtgggggtttgggaaccggtctcctgggggatgcggggatgaatccctgggcctgaagtgtcttaattcagggggaggccgcatgctggtgtcaggatggcctccagttgaatctgtgacatttaccagctaggtgattttgggactggtgactacgcgcgagacctctggaggtcgccctggtagacacggttttcagaaggacgggttttaggcattcagacccttgcgtgcatcccagcttgttgctttcagcctcgctaagtgactaagcgaccttcaggaagtaacttaatcggtctaaacctcttacctgtaataggcggataaaacggtcccatcaagactgagaaaaagcacaccagctattggcacagcgtgggcagtggggcctacaggatgactgacttagtctacagagatcccggcgtacttaagcaggtagtaaatgaagactcttaagatgacagaaggtgatttttctggtgatcgaggacttccggggtaatgacagtgatgaaatgcaggggacctggttgcccccaagtttcctggcagtgtgtgatactgaggaggtgagcttgtttctggagctgtgctttaagattcatgttacatgtaaagctgtcctcatttgtgactatggacctatggagttgggacctctctatagatacctagtagaggctcc

SEQ ID NO: 285586 - DNA, 1194 bp, Homo sapiens
agcggctttctccccgccgcattcccggtgtcgacttactagctgcaagcctctgcctgccttcctgcgcgccgttccccgctagtcgctgctgctggcgcgcactcgccgggtttttcctcccacggcctcgagatggtggtgaatgtggcacggaggagccgggccttccaacccggtgggcccgagctccgaaaggccccctcggcagtgagaggggcgggagcccgcgggggccgcgcccttctctcgcttcggactgcgcaacgctgcgctctgggctgacaggcggataaaacggtcccatcaagactgagaaaaagcacaccagctattggcacagcgtgggcagtggggcctacaggatgactgacttagtctacagagatcccggcgtacttaagcaggtagtaatgatggacaggtgaggctttaggcggccgccctgggatctgaattgccccttggcccttatcgaagctgcagctgcttccgcatagctgctgtggtcaaaaaggagcccagagtgacagttttccttgacggtcgccgttctgtttgttgtaactgatctgcaacattttgggaaaatacagttccattgtacctgccacctttcagctgtagccagagacctttatcaaaatgggcttgtttccacagaacagcagaacggttgggggtttgcatgtacagttaaccagcataagactcgtactgggaaaatccagctgggatgtgacacagcttaactgatagcttaaggcatcagtattgggaccaaaggctggtcagatttgtatcattctgaggaccaaatgatgggaacaatatgaagactcttaagatgacagaaggtgatttttctggtgatcgaggacttccggggtaatgacagtgatgaaatgcaggggacctggttgcccccaagtttcctggcagtgtgtgatactgaggaggtgagcttgtttctggagctgtgctttaagattcatgttacatgtaaagctgtcctcatttgtgactatggacctatggagttgggacaatctctatgggaagcagaaggcaaggaccccggtcattttaggtagaaacaacagcatgctaatgcaaaaaattatgcagtgtgctactgaacttcagaggtgatcaataaaagaagaataaaaagactaataaaagtaaaaaaat

SEQ ID NO: 285587 - DNA, 449 bp, Homo sapiens
ttacaggtgcccaccatcacacccagctaattttcttgtatttttagtagagatggttttcaccatgttggctagatgggtctcgaacttctgacctcgggtgatccgcccgactcggcctccccttccaaagtgctgggattacaggcatgagccaccgctcctggccagtttagttttcacgctaagctttttgttctgcaggttgcccccaagtttcctggcagtgtgtgatactgaggagattcatgttacatgtaaagctgtcctcatttgtgactatggacctatggagttgggacaatctctatgggaagcagaaggcaaggaccccggtcattttaggtagaaacaacagcatgctaatgcaaaaaattatgcagtgtgctactgaacttcagaggtgatcaataaaagaagaataaaaagactaataaaagtaaaaaaat

SEQ ID NO: 285588 - DNA, 746 bp, Homo sapiens
agcggctttctccccgccgcattcccggtgtcgacttactagctgcaagcctctgcctgccttcctgcgcgccgttccccgctagtcgctgctgctggcgcgcactcgccgggtttttcctcccacggcctcgagatggtggtgaatgtggcacggaggagccgggccttccaacccggtgggcccgagctccgaaaggccccctcggcagtgagaggggcgggagcccgcgggggccgcgcccttctctcgcttcggactgcgcaacgctgcgctctgggctgacaggcggataaaacggtcccatcaagactgagaaaaagcacaccagctattggcacagcgtgggcagtggggcctacaggatgactgacttagtctacagagatcccggcgtacttaagcaggtagtaaatgaagactcttaagatgacagaaggtgatttttctggtgatcgaggacttccggggtaatgacagtgatgaaatgcaggggacctggttgcccccaagtttcctggcagtgtgtgatactgaggagattcatgttacatgtaaagctgtcctcatttgtgactatggacctatggagttgggacaatctctatgggaagcagaaggcaaggaccccggtcattttaggtagaaacaacagcatgctaatgcaaaaaattatgcagtgtgctactgaacttcagaggtgatcaataaaagaagaataaaaagactaataaaagtaaaaaaat

SEQ ID NO: 285589 - DNA, 1558 bp, Homo sapiens
agcggctttctccccgccgcattcccggtgtcgacttactagctgcaagcctctgcctgccttcctgcgcgccgttccccgctagtcgctgctgctggcgcgcactcgccgggtttttcctcccacggcctcgagatggtggtgaatgtggcacggaggagccgggccttccaacccggtgggcccgagctccgaaaggccccctcggcagtgagaggggcgggagcccgcgggggccgcgcccttctctcgcttcggactgcgcaacgctgcgctctgggctgacaggcggataaaacggtcccatcaagactgagaaaaagcacaccagctattggcacagcgtgggcagtggggcctacaggatgactgacttagtctacagagatcccggcgtacttaagcaggtagtaatgatggacaggtgaggctttaggcggccgccctgggatctgaattgccccttggcccttatcgaagctgcagctgcttccgcatagctgctgtggtcaaaaaggagcccagagtgacagttttccttgacggtcgccgttctgtttgttgtaactgatctgcaacattttgggaaaatacagttccattgtacctgccacctttcagctgtagccagagacctttatcaaaatgggcttgtttccacagaacagcagaacggttgggggtttgcatgtacagttaaccagcataagactcgtactgggaaaatccagctgggatgtgacacagcttaactgatagcttaaggcatcagtattgggaccaaaggctggtcagatttgtatcattctgaggaccaaatgatgggaacaataaaattgttcatgacagttgttctcattttgctgtccagaatgaagactcttaagatgacagaaggtgatttttctggtgatcgaggacttccggggtaatgacagtgatgaaatgcaggggacctggttgcccccaagtttcctggcagtgtgtgatactgaggaggtgagcttgtttctggagctgtgctttaaggtaaagttgatcagcttaatcctcctgatccctttcccatcggatctgaacactggtcttggtggtcgtaaaaggaggaaaagtaatagtgaagctggcctaaatgttgtaatctggtatatggcatgtgggctagtttcagacaggtttcagagatggttggatctctgaaattgtaaaatgaagtataatcttaggctaagggaaggatgcgtgtgaagctctggaggttggtatagtaatagctgacctattactgcatttgggagggatctgtcatagcttccttgcctcttaattaagggtggtgtttttttcttttagattcatgttacatgtaaagctgtcctcatttgtgactatggacctatggagttgggacaatctctatgggaagcagaaggcaaggaccccggtcattttaggtagaaacaacagcatgctaatgcaaaaaattatgcagtgtgctactgaacttcagaggtgatcaataaaagaagaataaaaagactaataaaagtaaaaaaat

SEQ ID NO: 285590 - DNA, 1460 bp, Homo sapiens
agcggctttctccccgccgcattcccggtgtcgacttactagctgcaagcctctgcctgccttcctgcgcgccgttccccgctagtcgctgctgctggcgcgcactcgccgggtttttcctcccacggcctcgagatggtggtgaatgtggcacggaggagccgggccttccaacccggtgggcccgagctccgaaaggccccctcggcagtgagaggggcgggagcccgcgggggccgcgcccttctctcgcttcggactgcgcaacgctgcgctctgggctgacaggtgagtgttgcaggcaggcggccgggtttacggaaggggtgggggtttgggaaccggtctcctgggggatgcggggatgaatccctgggcctgaagtgtcttaattcagggggaggccgcatgctggtgtcaggatggcctccagttgaatctgtgacatttaccagctaggtgattttgggactggtgactacgcgcgagacctctggaggtcgccctggtagacacggttttcagaaggacgggttttaggcattcagacccttgcgtgcatcccagcttgttgctttcagcctcgctaagtgactaagcgaccttcaggaagtaacttaatcggtctaaacctcttacctgtaataggcggataaaacggtcccatcaagactgagaaaaagcacaccagctattggcacagcgtgggcagtggggcctacaggatgactgacttagtctacagagatcccggcgtacttaagcaggtagtaaatgaagactcttaagatgacagaaggtgatttttctggtgatcgaggacttccggggtaatgacagtgatgaaatgcaggggacctggttgcccccaagtttcctggcagtgtgtgatactgaggaggtgagcttgtttctggagctgtgctttaaggtaaagttgatcagcttaatcctcctgatccctttcccatcggatctgaacactggtcttggtggtcgtaaaaggaggaaaagtaatagtgaagctggcctaaatgttgtaatctggtatatggcatgtgggctagtttcagacaggtttcagagatggttggatctctgaaattgtaaaatgaagtataatcttaggctaagggaaggatgcgtgtgaagctctggaggttggtatagtaatagctgacctattactgcatttgggagggatctgtcatagcttccttgcctcttaattaagggtggtgtttttttcttttagattcatgttacatgtaaagctgtcctcatttgtgactatggacctatggagttgggacaatctctatgggaagcagaaggcaaggaccccggtcattttaggtagaaacaacagcatgctaatgcaaaaaattatgcagtgtgctactgaacttcagaggtgatcaataaaagaagaataaaaagactaataaaagtaaaaaaat

SEQ ID NO: 285591 - DNA, 1204 bp, Homo sapiens
agcggctttctccccgccgcattcccggtgtcgacttactagctgcaagcctctgcctgccttcctgcgcgccgttccccgctagtcgctgctgctggcgcgcactcgccgggtttttcctcccacggcctcgagatggtggtgaatgtggcacggaggagccgggccttccaacccggtgggcccgagctccgaaaggccccctcggcagtgagaggggcgggagcccgcgggggccgcgcccttctctcgcttcggactgcgcaacgctgcgctctgggctgacaggcggataaaacggtcccatcaagactgagaaaaagcacaccagctattggcacagcgtgggcagtggggcctacaggatgactgacttagtctacagagatcccggcgtacttaagcaggtagtaatgatggacaggtgaggctttaggcggccgccctgggatctgaattgccccttggcccttatcgaagctgcagctgcttccgcatagctgctgtggtcaaaaaggagcccagagtgacagttttccttgacggtcgccgttctgtttgttgtaactgatctgcaacattttgggaaaatacagttccattgtacctgccacctttcagctgtagccagagacctttatcaaaatgggcttgtttccacagaacagcagaacggttgggggtttgcatgtacagttaaccagcataagactcgtactgggaaaatccagctgggatgtgacacagcttaactgatagcttaaggcatcagtattgggaccaaaggctggtcagatttgtatcattctgaggaccaaatgatgggaacaataaaattgttcatgacagttgttctcattttgctgtccagaatgaagactcttaagatgacagaaggtgatttttctggtgatcgaggacttccggggtaatgacagtgatgaaatgcaggggacctggttgcccccaagtttcctggcagtgtgtgatactgaggagattcatgttacatgtaaagctgtcctcatttgtgactatggacctatggagttgggacaatctctatgggaagcagaaggcaaggaccccggtcattttaggtagaaacaacagcatgctaatgcaaaaaattatgcagtgtgctactgaacttcagaggtgatcaataaaagaagaataaaaagactaataaaagtaaaaaaat

SEQ ID NO: 285592 - DNA, 908 bp, Homo sapiens
cttcctggagacctgagctcctgttctccatggtgatccattcagtgacttctccaaactatctggtaacagtattggctcagaccacggaactgccctttgataccaattgcaagttctctgacccactgtggatccatgctcagtctgcatacaacactcaggacagatcatcgagagagaaggaatctacattccctcgccaaatgcaacactagaagtgaacacagacttggaagttggcaacgtgcttgagaaatgctagggtgacttatctgggctgcaggcaagggagcaaagtgacccatggggccaatcaccaacacaggatccaccaagtattgaatgaccattcttggtcatcgctattcagagaggcagaagtaatttttactggaaagcccacaagcatgacttttccatcccttcagtttgcaagttcgtgcagatgataggagaaaaaatagcccagcacatttgcatttaagtcttgaaatctaaatatttccatgagtcattcattattcccgtataactcagtgtttgcatgcaaataactttaatgacataaatgcttataaaataagtctcttaccatatgaacgcggtaaagaatgctaattcccagagtcatgaatggcttagagaaatcaatcaccttctcccgttcagctgtaatggtgaggcctgccacagccagatctgctttctgaaaagaacagagacagcccgtcagtggggtggccataggagaagaggcacagagacttgcgaccagcaaccgtcactgctattggagatgtgatgctggtctggcttcttgcttgaggagtggctctaagtcaacactgcatacagatctgaatgatcactcataaaagtacatggatattgaagctataaaaaaa

SEQ ID NO: 285593 - DNA, 2135 bp, Homo sapiens
aagcacatgaggagaagccttagcaacctcaataccgaagttcttcgcgcgctcgctctttctgcctccgcccgaactatgcctgagtccctcacaggagttggatagtagaggcgagagaaggaagtctttgcaggccaaaattgggacaacctgcttggacttccgcctcccggcctccggaaggcagtgcgcacgcgctcgctgcgactccggcgcggttgacttccgctcccactgtgctctgcgagccgaatcatggatcacactgacaatgagttacaaggcactaatagttctggatccttgggtggtcttgatgttcgcagacgaattcctataaagctcatctccaaacaagcaaacaaagcgaaacctgcaccgcgaactcaaagaactataaacaggatgcctgcaaaggctccacctggtgatgaagaaggatttgattataatgaagaagaacggtatgactgtaaagggggtgagctgtttgcaaatcagcgaagatttcctggacaccttttttgggactttcagataaacatcttaggtgaaaaggatgatacaccagttcatttctgtgacaagtgtggattgcctattaaaatctatgggagaatgattccatgcaagcatgttttttgctatgactgtgctattttacatgaaaaaaagggagataagatgtgtccaggctgtagtgatcctgtgcagcgaattgagcagtgtacacgaggttctctcttcatgtgtagcattgttcaagggtgcaagagaacatatttgtctcagagagacttacaggctcatatcaaccatcgccatatgagagctggaaaacctgttacccgtgcttcacttgaaaatgttcatcctcctattgccccaccaccaactgaaatccctgagcgttttataatgccaccagacaagcaccatatgagccatattccgccaaagcagcacatcatgatgccaccacctcctttgcaacatgtgccacatgagcactataatcagccacatgaggatattcgtgctcctccagcagaattgtccatggctccacctccacctcgatcggtcagtcaggaaacctttcgtatttcaacaagaaaacacagcaatttaataaccgtccctattcaggatgactcaaattcaggtgctagagaaccaccacctcctgccccagcacctgctcaccatcatcctgaatatcagggtcaaccagtggtatcgcaccctcatcatattatgcctccacagcaacattatgcaccacccccacctcctccaccaccaataagccatccaatgccacatcctccccaggctgcaggtactcctcacttggtatatagccaagctccacctccaccaatgacctctgctccaccaccaataacccctccccctggacatattattgcccagatgccaccttatatgaatcatcctcctccaggacctcccccacctcaacatggtggtccacctgtaactgcaccccctcctcaccattataatcctaactcattaccccagttcactgaagatcaaggaactctgagccctccatttacacaaccagggggaatgagtcctggtatatggcctgcaccaagagggccaccaccacctccacgattgcagggtccgccttctcaaaccccacttcctggaccacatcatccagatcagacaagatatagaccgtattaccaatgataatagtattttgaatggaagatatgagggggaaaaaaacttatgtgtagtcaatcttttaagctttgactgttttgggaaggaagagtacctcttatcgaggtagtataaaacacatagggtcttgtttcttaaaatggttttaaatcttgaccttaagattgatttcaagtaccatactgtagtacagataagtggctcagttgagcacagctatattttaacatctctttgttcccctagtttagtaaattgacccagaggtgaccatttgtaaaaaatttgaaaaaatttttcattgttttacttcagaagtattgttttgttaaacccaacgtttagtttttcttgtgatacattttgttaacctgtgtaaaaggattaaatttcaatatggttgt

SEQ ID NO: 285594 - DNA, 571 bp, Homo sapiens
ttcgactcacagatcttgggagtagtccaataacttcatcaatttattaaaggattctgtatctcaaaaggggttaaaaagcattgccttaagtgttgatccaaaataaataaaattagcagttaaacttaatgtaatattgaaaatcagaacccagatctttaaccttgataatgttaggtatggtgttttaatacctgtggcagaataatctttaaaaagaaaaactaaaagaaattacaacttttttttcctaacacagacaatgagttacaaggcactaatagttctggatccttgggtggtcttgatgttcgcagacgaattcctataaagctcatctccaaacaagcaaacaaagcgaaacctgcaccgcgaactcaaagaactataaacaggatgcctgcaaaggctccacctggtgatgaaggtaatttgtttaactaataggtccaacactctttctgttttatctgattgcttcggacagtctgtgtgatcttatagctacctctttttgtcttacatattctattcattcttcaaccttcttgtttgacttctcattgta

SEQ ID NO: 285595 - DNA, 4230 bp, Homo sapiens
aagcacatgaggagaagccttagcaacctcaataccgaagttcttcgcgcgctcgctctttctgcctccgcccgaactatgcctgagtccctcacaggagttggatagtagaggcgagagaaggaagtctttgcaggccaaaattgggacaacctgcttggacttccgcctcccggcctccggaaggcagtgcgcacgcgctcgctgcgactccggcgcggttgacttccgctcccactgtgctctgcgagccgaatcatggatcacactgacaatgagttacaaggcactaatagttctggatccttgggtggtcttgatgttcgcagacgaattcctataaagctcatctccaaacaagcaaacaaagcgaaacctgcaccgcgaactcaaagaactataaacaggatgcctgcaaaggctccacctggtgatgaagaaggatttgattataatgaagaagaacggtatgactgtaaagggggtgagctgtttgcaaatcagcgaagatttcctggacaccttttttgggactttcagataaacatcttaggtgaaaaggatgatacaccagttcatttctgtgacaagtgtggattgcctattaaaatctatgggagaatgattccatgcaagcatgttttttgctatgactgtgctattttacatgaaaaaaagggagataagatgtgtccaggctgtagtgatcctgtgcagcgaattgagcagtgtacacgaggttctctcttcatgtgtagcattgttcaagggtgcaagagaacatatttgtctcagagagacttacaggctcatatcaaccatcgccatatgagagctggaaaacctgttacccgtgcttcacttgaaaatgttcatcctcctattgccccaccaccaactgaaatccctgagcgttttataatgccaccagacaagcaccatatgagccatattccgccaaagcagcacatcatgatgccaccacctcctttgcaacatgtgccacatgagcactataatcagccacatgaggatattcgtgctcctccagcagaattgtccatggctccacctccacctcgatcggtcagtcaggaaacctttcgtatttcaacaagaaaacacagcaatttaataaccgtccctattcaggatgactcaaattcaggtgctagagaaccaccacctcctgccccagcacctgctcaccatcatcctgaatatcagggtcaaccagtggtatcgcaccctcatcatattatgcctccacagcaacattatgcaccacccccacctcctccaccaccaataagccatccaatgccacatcctccccaggctgcaggtactcctcacttggtatatagccaagctccacctccaccaatgacctctgctccaccaccaataacccctccccctggacatattattgcccagatgccaccttatatgaatcatcctcctccaggacctcccccacctcaacatggtggtccacctgtaactgcaccccctcctcaccattataatcctaactcattaccccagttcactgaagatcaaggaactctgagccctccatttacacaaccagggggaatgagtcctggtatatggcctgcaccaagagggccaccaccacctccacgattgcagggtccgccttctcaaaccccacttcctggaccacatcatccagatcagacaagatatagaccgtattaccaatgataatagtattttgaatggaagatatgagggggaaaaaaacttatgtgtagtcaatcttttaagctttgactgttttgggaaggaagagtacctcttatcgaggtagtataaaacacatagggtcttgtttcttaaaatggttttaaatcttgaccttaagattgatttcaagtaccatactgtagtacagataagtggctcagttgagcacagctatattttaacatctctttgttcccctagtttagtaaattgacccagaggtgaccatttgtaaaaaatttgaaaaaatttttcattgttttacttcagaagtattgttttgttaaacccaacgtttagtttttcttgtgatacattttgttaacctgtgtaaaaggattaaatttcaatatggttgtaaaaatgctatttttatgtgaatttaagtgcagccacatactgttttttaaaccatatgttttaccactaatttcccaaagttataataaaatcctgaaagtaaaaatctactagaatttgctgtaaggcagactgttaaatgatagagaattatttcacattttaggcactgaaatgttgaggtttcgaggtatagtaagtatacaatgcacttcacttggatgccttttcatttttaggcagcctcaggagcaccaaaatacattggaattctagtactaagatatatttgttcgtaatgttaaaagacattactaattatttggaaagagatggccaaaataatcaactctacaggcttcaagctggtgggggaatgctgttactcattaatgcttttttactgaatggtcggaatcacatatgcaccacacatactgatcttaagtaacattattttatagaactgtttaaatgggtttaaatggtgttctttagatgaaatgtgttctgtttgttcattgtcttaaactgaatagggctgaataggctttatgtaattcttcatttcatggtagagtttgatgctgtgtttaagtgggttcttgtttataggattttcaactacagtttgaatgccatggaggaatttgaataatatattaatgaaggacatattcttgtaatcacaaatttgcatttgctcaggtttcattgctgtgtgataggatttttcctctaacttgaaatttaaaaacttttatttcctattccttttgtcggtaaagcagtctgaatttggaacattttatcatggagtcaacagtgaagactaccagataattttgtattggagaagaggaaataacagctaaattgtggatttcagtgctttacatggtgcctttcgagtcagcttttacattataggggcttgttatagtttagctaagatgaccacttaacagtttatacagaactcatatgtataaatcaacattcttaggatattatttatatcctttgaataaatccctgtgaagtttttcctccccactaaaatggtgcataataaaacatgaaatatgtagtatgcagatatcatttattagatagtttgtagtgtatacatttagaacatacttcttttgacaaagggtgatctgattgctaatttaccattttattctgtcaggtacaggtgaaacaaattctcatcttgaatgatcagatgcaaaatcatttctgaaccctagagcagaagttagaaataacaaaatggccgtttcaaccttgactggccaaaaataactaataaacttttttgttttaagtcaggcaagtgattttctacatttagcagtttgaaagtccagtgttaatgcaatatttctagtgagaaatgcttgttattaaaagcatgggagtgatagtgtgaaatggtggtgagtgcttctatcatattactgtaggtacttggactggtgcaaacttgattccttttcatccccctgtttaggagctattaaaatattactgttaaaaatccaaaccattctttgttccatgtaataagaaaatagccaaaatcactttagagcttctcaactatttatgaagagctatcctgcttttattgaaagtcactagagttgaatgtggtaagaaaccacttagcctatgtattggacgagaaaatcagtatcatgataaaattttgaattaagagaacccttgtagagtttttaaaaaatgatttattttcaattaggtttaagaaatctatgttatgcagggaggcatatcagatgaatgttgtagcagacaaaagttttaaatcgtgttagacttgaattcatcaattgtttgaatgagggtgggtgggtagaaggataacaaaattactgttagtgtttctttccttacggaaaaagatgtgaatcccagccttatttcagggaagcctttgaagctatgatggacataagtctaaattaaatgtatgtatgtttcattatattgctcttaagactactgaggtggcagtttaattcttaaaaacaataaaatggaagcataaatactaaaaaacta

SEQ ID NO: 285596 - DNA, 3871 bp, Homo sapiens
ttaccagttctagggccaaaagagtcgtgagaagcctggctccttggagggatatatttgtctgctcagctttactttagaaggatttgattataatgaagaagaacggtatgactgtaaagggggtgagctgtttgcaaatcagcgaagatttcctggacaccttttttgggactttcagataaacatcttaggtgaaaaggatgatacaccagttcatttctgtgacaagtgtggattgcctattaaaatctatgggagaatgattccatgcaagcatgttttttgctatgactgtgctattttacatgaaaaaaagggagataagatgtgtccaggctgtagtgatcctgtgcagcgaattgagcagtgtacacgaggttctctcttcatgtgtagcattgttcaagggtgcaagagaacatatttgtctcagagagacttacaggctcatatcaaccatcgccatatgagagctggaaaacctgttacccgtgcttcacttgaaaatgttcatcctcctattgccccaccaccaactgaaatccctgagcgttttataatgccaccagacaagcaccatatgagccatattccgccaaagcagcacatcatgatgccaccacctcctttgcaacatgtgccacatgagcactataatcagccacatgaggatattcgtgctcctccagcagaattgtccatggctccacctccacctcgatcggtcagtcaggaaacctttcgtatttcaacaagaaaacacagcaatttaataaccgtccctattcaggatgactcaaattcaggtgctagagaaccaccacctcctgccccagcacctgctcaccatcatcctgaatatcagggtcaaccagtggtatcgcaccctcatcatattatgcctccacagcaacattatgcaccacccccacctcctccaccaccaataagccatccaatgccacatcctccccaggctgcaggtactcctcacttggtatatagccaagctccacctccaccaatgacctctgctccaccaccaataacccctccccctggacatattattgcccagatgccaccttatatgaatcatcctcctccaggacctcccccacctcaacatggtggtccacctgtaactgcaccccctcctcaccattataatcctaactcattaccccagttcactgaagatcaaggaactctgagccctccatttacacaaccagggggaatgagtcctggtatatggcctgcaccaagagggccaccaccacctccacgattgcagggtccgccttctcaaaccccacttcctggaccacatcatccagatcagacaagatatagaccgtattaccaatgataatagtattttgaatggaagatatgagggggaaaaaaacttatgtgtagtcaatcttttaagctttgactgttttgggaaggaagagtacctcttatcgaggtagtataaaacacatagggtcttgtttcttaaaatggttttaaatcttgaccttaagattgatttcaagtaccatactgtagtacagataagtggctcagttgagcacagctatattttaacatctctttgttcccctagtttagtaaattgacccagaggtgaccatttgtaaaaaatttgaaaaaatttttcattgttttacttcagaagtattgttttgttaaacccaacgtttagtttttcttgtgatacattttgttaacctgtgtaaaaggattaaatttcaatatggttgtaaaaatgctatttttatgtgaatttaagtgcagccacatactgttttttaaaccatatgttttaccactaatttcccaaagttataataaaatcctgaaagtaaaaatctactagaatttgctgtaaggcagactgttaaatgatagagaattatttcacattttaggcactgaaatgttgaggtttcgaggtatagtaagtatacaatgcacttcacttggatgccttttcatttttaggcagcctcaggagcaccaaaatacattggaattctagtactaagatatatttgttcgtaatgttaaaagacattactaattatttggaaagagatggccaaaataatcaactctacaggcttcaagctggtgggggaatgctgttactcattaatgcttttttactgaatggtcggaatcacatatgcaccacacatactgatcttaagtaacattattttatagaactgtttaaatgggtttaaatggtgttctttagatgaaatgtgttctgtttgttcattgtcttaaactgaatagggctgaataggctttatgtaattcttcatttcatggtagagtttgatgctgtgtttaagtgggttcttgtttataggattttcaactacagtttgaatgccatggaggaatttgaataatatattaatgaaggacatattcttgtaatcacaaatttgcatttgctcaggtttcattgctgtgtgataggatttttcctctaacttgaaatttaaaaacttttatttcctattccttttgtcggtaaagcagtctgaatttggaacattttatcatggagtcaacagtgaagactaccagataattttgtattggagaagaggaaataacagctaaattgtggatttcagtgctttacatggtgcctttcgagtcagcttttacattataggggcttgttatagtttagctaagatgaccacttaacagtttatacagaactcatatgtataaatcaacattcttaggatattatttatatcctttgaataaatccctgtgaagtttttcctccccactaaaatggtgcataataaaacatgaaatatgtagtatgcagatatcatttattagatagtttgtagtgtatacatttagaacatacttcttttgacaaagggtgatctgattgctaatttaccattttattctgtcaggtacaggtgaaacaaattctcatcttgaatgatcagatgcaaaatcatttctgaaccctagagcagaagttagaaataacaaaatggccgtttcaaccttgactggccaaaaataactaataaacttttttgttttaagtcaggcaagtgattttctacatttagcagtttgaaagtccagtgttaatgcaatatttctagtgagaaatgcttgttattaaaagcatgggagtgatagtgtgaaatggtggtgagtgcttctatcatattactgtaggtacttggactggtgcaaacttgattccttttcatccccctgtttaggagctattaaaatattactgttaaaaatccaaaccattctttgttccatgtaataagaaaatagccaaaatcactttagagcttctcaactatttatgaagagctatcctgcttttattgaaagtcactagagttgaatgtggtaagaaaccacttagcctatgtattggacgagaaaatcagtatcatgataaaattttgaattaagagaacccttgtagagtttttaaaaaatgatttattttcaattaggtttaagaaatctatgttatgcagggaggcatatcagatgaatgttgtagcagacaaaagttttaaatcgtgttagacttgaattcatcaattgtttgaatgagggtgggtgggtagaaggataacaaaattactgttagtgtttctttccttacggaaaaagatgtgaatcccagccttatttcagggaagcctttgaagctatgatggacataagtctaaattaaatgtatgtatgtttcattatattgctcttaagactactgaggtggcagtttaattcttaaaaacaataaaatggaagcataaatactaaaaaacta

SEQ ID NO: 285597 - DNA, 4221 bp, Homo sapiens
ttcgactcacagatcttgggagtagtccaataacttcatcaatttattaaaggattctgtatctcaaaaggggttaaaaagcattgccttaagtgttgatccaaaataaataaaattagcagttaaacttaatgtaatattgaaaatcagaacccagatctttaaccttgataatgttaggtatggtgttttaatacctgtggcagaataatctttaaaaagaaaaactaaaagaaattacaacttttttttcctaacacagacaatgagttacaaggcactaatagttctggatccttgggtggtcttgatgttcgcagacgaattcctataaagctcatctccaaacaagcaaacaaagcgaaacctgcaccgcgaactcaaagaactataaacaggatgcctgcaaaggctccacctggtgatgaagaaggatttgattataatgaagaagaacggtatgactgtaaagggggtgagctgtttgcaaatcagcgaagatttcctggacaccttttttgggactttcagataaacatcttaggtgaaaaggatgatacaccagttcatttctgtgacaagtgtggattgcctattaaaatctatgggagaatgattccatgcaagcatgttttttgctatgactgtgctattttacatgaaaaaaagggagataagatgtgtccaggctgtagtgatcctgtgcagcgaattgagcagtgtacacgaggttctctcttcatgtgtagcattgttcaagggtgcaagagaacatatttgtctcagagagacttacaggctcatatcaaccatcgccatatgagagctggaaaacctgttacccgtgcttcacttgaaaatgttcatcctcctattgccccaccaccaactgaaatccctgagcgttttataatgccaccagacaagcaccatatgagccatattccgccaaagcagcacatcatgatgccaccacctcctttgcaacatgtgccacatgagcactataatcagccacatgaggatattcgtgctcctccagcagaattgtccatggctccacctccacctcgatcggtcagtcaggaaacctttcgtatttcaacaagaaaacacagcaatttaataaccgtccctattcaggatgactcaaattcaggtgctagagaaccaccacctcctgccccagcacctgctcaccatcatcctgaatatcagggtcaaccagtggtatcgcaccctcatcatattatgcctccacagcaacattatgcaccacccccacctcctccaccaccaataagccatccaatgccacatcctccccaggctgcaggtactcctcacttggtatatagccaagctccacctccaccaatgacctctgctccaccaccaataacccctccccctggacatattattgcccagatgccaccttatatgaatcatcctcctccaggacctcccccacctcaacatggtggtccacctgtaactgcaccccctcctcaccattataatcctaactcattaccccagttcactgaagatcaaggaactctgagccctccatttacacaaccagggggaatgagtcctggtatatggcctgcaccaagagggccaccaccacctccacgattgcagggtccgccttctcaaaccccacttcctggaccacatcatccagatcagacaagatatagaccgtattaccaatgataatagtattttgaatggaagatatgagggggaaaaaaacttatgtgtagtcaatcttttaagctttgactgttttgggaaggaagagtacctcttatcgaggtagtataaaacacatagggtcttgtttcttaaaatggttttaaatcttgaccttaagattgatttcaagtaccatactgtagtacagataagtggctcagttgagcacagctatattttaacatctctttgttcccctagtttagtaaattgacccagaggtgaccatttgtaaaaaatttgaaaaaatttttcattgttttacttcagaagtattgttttgttaaacccaacgtttagtttttcttgtgatacattttgttaacctgtgtaaaaggattaaatttcaatatggttgtaaaaatgctatttttatgtgaatttaagtgcagccacatactgttttttaaaccatatgttttaccactaatttcccaaagttataataaaatcctgaaagtaaaaatctactagaatttgctgtaaggcagactgttaaatgatagagaattatttcacattttaggcactgaaatgttgaggtttcgaggtatagtaagtatacaatgcacttcacttggatgccttttcatttttaggcagcctcaggagcaccaaaatacattggaattctagtactaagatatatttgttcgtaatgttaaaagacattactaattatttggaaagagatggccaaaataatcaactctacaggcttcaagctggtgggggaatgctgttactcattaatgcttttttactgaatggtcggaatcacatatgcaccacacatactgatcttaagtaacattattttatagaactgtttaaatgggtttaaatggtgttctttagatgaaatgtgttctgtttgttcattgtcttaaactgaatagggctgaataggctttatgtaattcttcatttcatggtagagtttgatgctgtgtttaagtgggttcttgtttataggattttcaactacagtttgaatgccatggaggaatttgaataatatattaatgaaggacatattcttgtaatcacaaatttgcatttgctcaggtttcattgctgtgtgataggatttttcctctaacttgaaatttaaaaacttttatttcctattccttttgtcggtaaagcagtctgaatttggaacattttatcatggagtcaacagtgaagactaccagataattttgtattggagaagaggaaataacagctaaattgtggatttcagtgctttacatggtgcctttcgagtcagcttttacattataggggcttgttatagtttagctaagatgaccacttaacagtttatacagaactcatatgtataaatcaacattcttaggatattatttatatcctttgaataaatccctgtgaagtttttcctccccactaaaatggtgcataataaaacatgaaatatgtagtatgcagatatcatttattagatagtttgtagtgtatacatttagaacatacttcttttgacaaagggtgatctgattgctaatttaccattttattctgtcaggtacaggtgaaacaaattctcatcttgaatgatcagatgcaaaatcatttctgaaccctagagcagaagttagaaataacaaaatggccgtttcaaccttgactggccaaaaataactaataaacttttttgttttaagtcaggcaagtgattttctacatttagcagtttgaaagtccagtgttaatgcaatatttctagtgagaaatgcttgttattaaaagcatgggagtgatagtgtgaaatggtggtgagtgcttctatcatattactgtaggtacttggactggtgcaaacttgattccttttcatccccctgtttaggagctattaaaatattactgttaaaaatccaaaccattctttgttccatgtaataagaaaatagccaaaatcactttagagcttctcaactatttatgaagagctatcctgcttttattgaaagtcactagagttgaatgtggtaagaaaccacttagcctatgtattggacgagaaaatcagtatcatgataaaattttgaattaagagaacccttgtagagtttttaaaaaatgatttattttcaattaggtttaagaaatctatgttatgcagggaggcatatcagatgaatgttgtagcagacaaaagttttaaatcgtgttagacttgaattcatcaattgtttgaatgagggtgggtgggtagaaggataacaaaattactgttagtgtttctttccttacggaaaaagatgtgaatcccagccttatttcagggaagcctttgaagctatgatggacataagtctaaattaaatgtatgtatgtttcattatattgctcttaagactactgaggtggcagtttaattcttaaaaacaataaaatggaagcataaatactaaaaaacta

SEQ ID NO: 285598 - DNA, 951 bp, Homo sapiens
tgactcctgttgatccatatagatcgttgaccattggtgttcgagacatagtacaggtcatgatgaaattctcatcttgaatgatcagatgcaaaatcatttctgaaccctagagcagaagttagaaataacaaaatggccgtttcaaccttgactggccaaaaataactaataaacttttttgttttaagtcaggcaagtgattttctacatttagcagtttgaaagtccagtgttaatgcaatatttctagtgagaaatgcttgttattaaaagcatgggagtgatagtgtgaaatggtggtgagtgcttctatcatattactgtaggtacttggactggtgcaaacttgattccttttcatccccctgtttaggagctattaaaatattactgttaaaaatccaaaccattctttgttccatgtaataagaaaatagccaaaatcactttagagcttctcaactatttatgaagagctatcctgcttttattgaaagtcactagagttgaatgtggtaagaaaccacttagcctatgtattggacgagaaaatcagtatcatgataaaattttgaattaagagaacccttgtagagtttttaaaaaatgatttattttcaattaggtttaagaaatctatgttatgcagggaggcatatcagatgaatgttgtagcagacaaaagttttaaatcgtgttagacttgaattcatcaattgtttgaatgagggtgggtgggtagaaggataacaaaattactgttagtgtttctttccttacggaaaaagatgtgaatcccagccttatttcagggaagcctttgaagctatgatggacataagtctaaattaaatgtatgtatgtttcattatattgctcttaagactactgaggtggcagtttaattcttaaaaacaataaaatggaagcataaatactaaaaaacta

SEQ ID NO: 285599 - DNA, 2960 bp, Homo sapiens
aagcacatgaggagaagccttagcaacctcaataccgaagttcttcgcgcgctcgctctttctgcctccgcccgaactatgcctgagtccctcacaggagttggatagtagaggcgagagaaggaagtctttgcaggccaaaattgggacaacctgcttggacttccgcctcccggcctccggaaggcagtgcgcacgcgctcgctgcgactccggcgcggttgacttccgctcccactgtgctctgcgagccgaatcatggatcacactgacaatgagttacaaggcactaatagttctggatccttgggtggtcttgatgttcgcagacgaattcctataaagctcatctccaaacaagcaaacaaagcgaaacctgcaccgcgaactcaaagaactataaacaggatgcctgcaaaggctccacctggtgatgaagaaggatttgattataatgaagaagaacggtatgactgtaaagggggtgagctgtttgcaaatcagcgaagatttcctggacaccttttttgggactttcagataaacatcttaggtgaaaaggatgatacaccagttcatttctgtgacaagtgtggattgcctattaaaatctatgggagaatgattccatgcaagcatgttttttgctatgactgtgctattttacatgaaaaaaagggagataagatgtgtccaggctgtagtgatcctgtgcagcgaattgagcagtgtacacgaggttctctcttcatgtgtagcattgttcaagggtgcaagagaacatatttgtctcagagagacttacaggctcatatcaaccatcgccatatgagagctggaaaacctgttacccgtgcttcacttgaaaatgttcatcctcctattgccccaccaccaactgaaatccctgagcgttttataatgccaccagacaagcaccatatgagccatattccgccaaagcagcacatcatgatgccaccacctcctttgcaacatgtgccacatgagcactataatcagccacatgaggatattcgtgctcctccagcagaattgtccatggctccacctccacctcgatcggtcagtcaggaaacctttcgtatttcaacaagaaaacacagcaatttaataaccgtccctattcaggatgactcaaattcaggtgctagagaaccaccacctcctgccccagcacctgctcaccatcatcctgaatatcagggtcaaccagtggtatcgcaccctcatcatattatgcctccacagcaacattatgcaccacccccacctcctccaccaccaataagccatccaatgccacatcctccccaggctgcaggtactcctcacttggtatatagccaagctccacctccaccaatgacctctgctccaccaccaataacccctccccctggacatattattgcccagatgccaccttatatgaatcatcctcctccaggacctcccccacctcaacatggtggtccacctgtaactgcaccccctcctcaccattataatcctaactcattaccccagttcactgaagatcaaggaactctgagccctccatttacacaaccagggggaatgagtcctggtatatggcctgcaccaagagggccaccaccacctccacgattgcagggtccgccttctcaaaccccacttcctggaccacatcatccagatcagacaagatatagaccgtattaccaatgataatagtattttgaatggaagatatgagggggaaaaaaacttatgtgtagtcaatcttttaagctttgactgttttgggaaggaagagtacctcttatcgaggtagtataaaacacatagggtcttgtttcttaaaatggttttaaatcttgaccttaagattgatttcaagtaccatactgtagtacagataagtggctcagttgagcacagctatattttaacatctctttgttcccctagtttagtaaattgacccagaggtgaccatttgtaaaaaatttgaaaaaatttttcattgttttacttcagaagtattgttttgttaaacccaacgtttagtttttcttgtgatacattttgttaacctgtgtaaaaggattaaatttcaatatggttgtaaaaatgctatttttatgtgaatttaagtgcagccacatactgttttttaaaccatatgttttaccactaatttcccaaagttataataaaatcctgaaagtaaaaatctactagaatttgctgtaaggcagactgttaaatgatagagaattatttcacattttaggcactgaaatgttgaggtttcgaggtatagtaagtatacaatgcacttcacttggatgccttttcatttttaggcagcctcaggagcaccaaaatacattggaattctagtactaagatatatttgttcgtaatgttaaaagacattactaattatttggaaagagatggccaaaataatcaactctacaggcttcaagctggtgggggaatgctgttactcattaatgcttttttactgaatggtcggaatcacatatgcaccacacatactgatcttaagtaacattattttatagaactgtttaaatgggtttaaatggtgttctttagatgaaatgtgttctgtttgttcattgtcttaaactgaatagggctgaataggctttatgtaattcttcatttcatggtagagtttgatgctgtgtttaagtgggttcttgtttataggattttcaactacagtttgaatgccatggaggaatttgaataatcttttatgacgggcttttctgttattcccaaaaaaaaaaaaaaaaaatttgggccccccccgaaatttaaaccctttgggcggccaggaataacggttaacttccaagacggcacaggtggttccacaaccggaccgcgaaccagggtgttgtcatcaaccccgg

SEQ ID NO: 285600 - DNA, 402 bp, Homo sapiens
attccatgcaagcatgttttttgctatgactgtgctattttacatgaaaaaaagggagataagatgtgtccagggtaagataagattatcattaccttttttaaataataaagttttagtgcaatgatttataagttggattaaaggttagggagtgatgtaaatcaggcaggagatgaaacatacagacatggctaatctttttctgtgagcccagcttgtgttaggtttctctttaatatagggcaaggtagccactatcagtcaactcaaattggtcaaaatgaaatctgtttgccattatagaagtattattataaacaaaaaagttactttttttaatgggacattaaagaagtattaagatatattgagagcaaagactccagaattagaattcct

SEQ ID NO: 285601 - DNA, 773 bp, Homo sapiens
tggatatatgctgcatctataccatgtgtattcttggcaaaacaggtaaatggatgtttataaaatctactttcaatttccgatatattaagcactgtgatgagggtactccttcttttgtttgcaggattttccacactattcgagagagagagtaaataaacttgtgtaagttaattgcatcaactacaaataagacctgtataccctgtgtatttccttatttgtgacaaaattgccactgaaataatcaccctgcccaatcacagtcacaacattcagactgctggcaacactaatctgagattttataaccccaagaccactgtcagtaacaggcctcagtagccagagaaagcaaaaaaattaccacttccaagaagaaaaatgtagacaaatgcattgtgttctcccatggggcacagaggagacactaaacaagaggagattggggcagatgacaaagtgctttgcaggtgttgtgaaggagaggtcatgggaagccaggagatccttgtcccatagatgagcagtaggaaaccagtagaggctttcgagagcagtggattgcctgattcttgagctcattaatgagtctcttctaagctacttgaggaatatgaagaataatgaaagataattgcttcgttgaaatgttgcaacatgtataacgtaagagaaaggcttctaagtggtctgtaatttgcaccacaatgacaagtattttttaccttaaatgtacaagatcttataaattctacttagcttagcaa

SEQ ID NO: 285602 - DNA, 951 bp, Homo sapiens
ggtaaattaatctctcaactggttgaacacagctttagagatgtcaacagcctcctatgagtctagagtcaggtggtacaggctcaactggtctaacagctgcaaattttgagagactgctgtgctaatgtttggggctcagatttaaggtataggtatgatttacgtactttgagcagccaagccttcttcagaagaaacctgagcggcatgtgctcctccccacctgcttccccacaacaggaagaactctctgcagaaggtctcctcaccttgttgaggcctgggaatgtgcaaatgtgcaggattttccacactattcgagagagagagtaaataaacttgtgtaagttaattgcatcaactacaaataagacctgtataccctgtgtatttccttatttgtgacaaaattgccactgaaataatcaccctgcccaatcacagtcacaacattcagactgctggcaacactaatctgagattttataaccccaagaccactgtcagtaacaggcctcagtagccagagaaagcaaaaaaattaccacttccaagaagaaaaatgtagacaaatgcattgtgttctcccatggggcacagaggagacactaaacaagaggagattggggcagatgacaaagtgctttgcaggtgttgtgaaggagaggtcatgggaagccaggagatccttgtcccatagatgagcagtaggaaaccagtagaggctttcgagagcagtggattgcctgattcttgagctcattaatgagtctcttctaagctacttgaggaatatgaagaataatgaaagataattgcttcgttgaaatgttgcaacatgtataacgtaagagaaaggcttctaagtggtctgtaatttgcaccacaatgacaagtattttttaccttaaatgtacaagatcttataaattctacttagcttagcaa

SEQ ID NO: 285603 - DNA, 4750 bp, Homo sapiens
  misc_feature (2895)..(2895): n is a, c, g, or t
aacgtgcagaaagggactgtactactcaaaaccaccaaggaagtggcagaggtaagtcaacatctaatcctgccactctgtgtggcaaagaacgctgggagcaaattacttctgctgctctttgaaggctgtgccagcgtcacctggatggtgtaaaggaaacaagagacaggaacagagcccctcatctcacctctgggctaccatacagaaaagcagaattggcaggaactgaaaatgactaggaagaggacatactgggtgcccaactcttctggtggcctcgtgaatcgtggcatcgacataggcgatgacatggtttcaggacttatttataaaacctatactctccaagatggcccctggagtcagcaagagagaaatcctgaggctccagggagggcagctgtcccaccgtgggggaagtatgatgctgccttgagaaccatgattcccttccgtcccaagccgaggtttcctgccccccagcccctggacaatgctggcctgttctcctacctcaccgtgtcatggctcaccccgctcatgatccaaagcttacggagtcgcttagatgagaacaccatccctccactgtcagtccatgatgcctcagacaaaaatgtccaaaggcttcaccgcctttgggaagaagaagtctcaaggcgagggattgaaaaagcttcagtgcttctggtgatgctgaggttccagagaacaaggttgattttcgatgcacttctgggcatctgcttctgcattgccagtgtactcgggccaatattgattataccaaagatcctggaatattcagaagagcagttggggaatgttgtccatggagtgggactctgctttgccctttttctctccgaatgtgtgaagtctctgagtttctcctccagttggatcatcaaccaacgcacagccatcaggttccgagcagctgtttcctcctttgcctttgagaagctcatccaatttaagtctgtaatacacatcacctcaggagaggccatcagcttcttcaccggtgatgtaaactacctgtttgaaggggtgtgctatggacccctagtactgatcacctgcgcatcgctggtcatctgcagcatttcttcctacttcattattggatacactgcatttattgccatcttatgctatctcctggttttcccactggcggtattcatgacaagaatggctgtgaaggctcagcatcacacatctgaggtcagcgaccagcgcatccgtgtgaccagtgaagttctcacttgcattaagctgattaaaatgtacacatgggagaaaccatttgcaaaaatcattgaagacctaagaaggaaggaaaggaaactattggagaagtgcgggcttgtccagagcctgacaagtataaccttgttcatcatccccacagtggccacagcggtctgggttctcatccacacatccttaaagctgaaactcacagcgtcaatggccttcagcatgctggcctccttgaatctccttcggctgtcagtgttctttgtgcctattgcagtcaaaggtctcacgaattccaagtctgcagtgatgaggttcaagaagtttttcctccaggagagccctgttttctatgtccagacattacaagaccccagcaaagctctggtctttgaggaggccaccttgtcatggcaacagacctgtcccgggatcgtcaatggggcactggagctggagaggaacgggcatgcttctgaggggatgaccaggcctagagatgccctcgggccagaggaagaagggaacagcctgggcccagagttgcacaagatcaacctggtggtgtccaaggggatgatgttaggggtctgcggcaacacggggagtggtaagagcagcctgttgtcagccatcctggaggagatgcacttgctcgagggctcggtgggggtgcagggaagcctggcctatgtcccccagcaggcctggatcgtcagcgggaacatcagggagaacatcctcatgggaggcgcatatgacaaggcccgatacctccaggtgctccactgctgctccctgaatcgggacctggaacttctgccctttggagacatgacagagattggagagcggggcctcaacctctctggggggcagaaacagaggatcagcctggcccgcgccgtctattccgaccgtcagatctacctgctggacgaccccctgtctgctgtggacgcccacgtggggaagcacatttttgaggagtgcattaagaagacactcagggggaagacggtcgtcctggtgacccaccagctgcagtacttagaattttgtggccagatcattttgttggaaaatgggaaaatctgtgaaaatggaactcacagtgagttaatgcagaaaaaggggaaatatgcccaacttatccagaagatgcacaaggaagccacttcggacatgttgcaggacacagcaaagatagcagagaagccaaaggtagaaagtcaggctctggccacctccctggaagagtctctcaacggaaatgctgtgccggagcatcagctcacacaggaggaggagatggaagaaggctccttgagttggagggtctaccaccactacatccaggcagctggaggttacatggtctcttgcataattttcttcttcgtggtgctgatcgtcttcttaacgatcttcagcttctggtggctgagctactggttggagcagggctcggggaccaatagcagccgagagagcaatggaaccatggcagacctgggcaacattgcagacaatcctcaactgtccttctaccagctggtgtacgggctcaacgccctgctcctcatctgtgtgggggtctgctcctcagggattttcaccaangtcacgaggaaggcatccacggccctgcacaacaagctcttcaacaaggttttccgctgccccatgagtttctttgacaccatcccaataggccggcttttgaactgcttcgcaggggacttggaacagctggaccagctcttgcccatcttttcagagcagttcctggtcctgtccttaatggtgatcgccgtcctgttgattgtcagtgtgctgtctccatatatcctgttaatgggagccataatcatggttatttgcttcatttattatatgatgttcaagaaggccatcggtgtgttcaagagactggagaactatagccggtctcctttattctcccacatcctcaattctctgcaaggcctgagctccatccatgtctatggaaaaactgaagacttcatcagccagtttaagaggctgactgatgcgcagaataactacctgctgttgtttctatcttccacacgatggatggcattgaggctggagatcatgaccaaccttgtgaccttggctgttgccctgttcgtggcttttggcatttcctccaccccctactcctttaaagtcatggctgtcaacatcgtgctgcagctggcgtccagcttccaggccactgcccggattggcttggagacagaggcacagttcacggctgtagagaggatactgcagtacatgaagatgtgtgtctcggaagctcctttacacatggaaggcacaagttgtccccaggggtggccacagcatggggaaatcatatttcaggattatcacatgaaatacagagacaacacacccaccgtgcttcacggcatcaacctgaccatccgcggccacgaagtggtgggcatcgtgggaaggacgggctctgggaagtcctccttgggcatggctctcttccgcctggtggagcccatggcaggccggattctcattgacggcgtggacatttgcagcatcggcctggaggacttgcggtccaagctctcagtgatccctcaagatccagtgctgctctcaggaaccatcagattcaacctagatccctttgaccgtcacactgaccagcagatctgggatgccttggagaggacattcctgaccaaggccatctcaaagttccccaaaaagctgcatacagatgtggtggaaaacggtggaaacttctctgtgggggagaggcagctgctctgcattgccagggctgtgcttcgcaactccaagatcatccttatcgatgaagccacagcctccattgacatggagacagacaccctgatccagcgcacaatccgtgaagccttccagggctgcaccgtgctcgtcattgcccaccgtgtcaccactgtgctgaactgtgaccacatcctggttatgggcaatgggaaggtggtagaatttgatcggccggaggtactgcggaagaagcctgggtcattgttcgcagccctcatggccacagccacttcttcactgagataaggagatgtggagacttcatggaggctggcagctgagctcagaggttcacacaggtgcagcttcgaggcccacagtctgcgaccttcttgtttggagatgagaacttctcctggaagcaggggtaaatgtagggggggtggggattgctggatggaaaccctggaataggctacttgatggctctcaagaccttagaaccccagaaccatctaagacatgggattcagtgatcatgtggttctccttttaacttacatgctgaataattttataataaggtaaaagcttatagttttctgatctgtgttagaagtgttgcaaatgctgtactgactttgtaaaatataaaactaaggaaaactca

SEQ ID NO: 285604 - DNA, 4591 bp, Homo sapiens
  misc_feature (2)..(9): n is a, c, g, or t
  misc_feature (11)..(11): n is a, c, g, or t
  misc_feature (13)..(13): n is a, c, g, or t
  misc_feature (2736)..(2736): n is a, c, g, or t
annnnnnnntncnggtgtatttgaataaaccaggttggcaaatcatactatagctgaaagaattggcaggaactgaaaatgactaggaagaggacatactgggtgcccaactcttctggtggcctcgtgaatcgtggcatcgacataggcgatgacatggtttcaggacttatttataaaacctatactctccaagatggcccctggagtcagcaagagagaaatcctgaggctccagggagggcagctgtcccaccgtgggggaagtatgatgctgccttgagaaccatgattcccttccgtcccaagccgaggtttcctgccccccagcccctggacaatgctggcctgttctcctacctcaccgtgtcatggctcaccccgctcatgatccaaagcttacggagtcgcttagatgagaacaccatccctccactgtcagtccatgatgcctcagacaaaaatgtccaaaggcttcaccgcctttgggaagaagaagtctcaaggcgagggattgaaaaagcttcagtgcttctggtgatgctgaggttccagagaacaaggttgattttcgatgcacttctgggcatctgcttctgcattgccagtgtactcgggccaatattgattataccaaagatcctggaatattcagaagagcagttggggaatgttgtccatggagtgggactctgctttgccctttttctctccgaatgtgtgaagtctctgagtttctcctccagttggatcatcaaccaacgcacagccatcaggttccgagcagctgtttcctcctttgcctttgagaagctcatccaatttaagtctgtaatacacatcacctcaggagaggccatcagcttcttcaccggtgatgtaaactacctgtttgaaggggtgtgctatggacccctagtactgatcacctgcgcatcgctggtcatctgcagcatttcttcctacttcattattggatacactgcatttattgccatcttatgctatctcctggttttcccactggcggtattcatgacaagaatggctgtgaaggctcagcatcacacatctgaggtcagcgaccagcgcatccgtgtgaccagtgaagttctcacttgcattaagctgattaaaatgtacacatgggagaaaccatttgcaaaaatcattgaagacctaagaaggaaggaaaggaaactattggagaagtgcgggcttgtccagagcctgacaagtataaccttgttcatcatccccacagtggccacagcggtctgggttctcatccacacatccttaaagctgaaactcacagcgtcaatggccttcagcatgctggcctccttgaatctccttcggctgtcagtgttctttgtgcctattgcagtcaaaggtctcacgaattccaagtctgcagtgatgaggttcaagaagtttttcctccaggagagccctgttttctatgtccagacattacaagaccccagcaaagctctggtctttgaggaggccaccttgtcatggcaacagacctgtcccgggatcgtcaatggggcactggagctggagaggaacgggcatgcttctgaggggatgaccaggcctagagatgccctcgggccagaggaagaagggaacagcctgggcccagagttgcacaagatcaacctggtggtgtccaaggggatgatgttaggggtctgcggcaacacggggagtggtaagagcagcctgttgtcagccatcctggaggagatgcacttgctcgagggctcggtgggggtgcagggaagcctggcctatgtcccccagcaggcctggatcgtcagcgggaacatcagggagaacatcctcatgggaggcgcatatgacaaggcccgatacctccaggtgctccactgctgctccctgaatcgggacctggaacttctgccctttggagacatgacagagattggagagcggggcctcaacctctctggggggcagaaacagaggatcagcctggcccgcgccgtctattccgaccgtcagatctacctgctggacgaccccctgtctgctgtggacgcccacgtggggaagcacatttttgaggagtgcattaagaagacactcagggggaagacggtcgtcctggtgacccaccagctgcagtacttagaattttgtggccagatcattttgttggaaaatgggaaaatctgtgaaaatggaactcacagtgagttaatgcagaaaaaggggaaatatgcccaacttatccagaagatgcacaaggaagccacttcggacatgttgcaggacacagcaaagatagcagagaagccaaaggtagaaagtcaggctctggccacctccctggaagagtctctcaacggaaatgctgtgccggagcatcagctcacacaggaggaggagatggaagaaggctccttgagttggagggtctaccaccactacatccaggcagctggaggttacatggtctcttgcataattttcttcttcgtggtgctgatcgtcttcttaacgatcttcagcttctggtggctgagctactggttggagcagggctcggggaccaatagcagccgagagagcaatggaaccatggcagacctgggcaacattgcagacaatcctcaactgtccttctaccagctggtgtacgggctcaacgccctgctcctcatctgtgtgggggtctgctcctcagggattttcaccaangtcacgaggaaggcatccacggccctgcacaacaagctcttcaacaaggttttccgctgccccatgagtttctttgacaccatcccaataggccggcttttgaactgcttcgcaggggacttggaacagctggaccagctcttgcccatcttttcagagcagttcctggtcctgtccttaatggtgatcgccgtcctgttgattgtcagtgtgctgtctccatatatcctgttaatgggagccataatcatggttatttgcttcatttattatatgatgttcaagaaggccatcggtgtgttcaagagactggagaactatagccggtctcctttattctcccacatcctcaattctctgcaaggcctgagctccatccatgtctatggaaaaactgaagacttcatcagccagtttaagaggctgactgatgcgcagaataactacctgctgttgtttctatcttccacacgatggatggcattgaggctggagatcatgaccaaccttgtgaccttggctgttgccctgttcgtggcttttggcatttcctccaccccctactcctttaaagtcatggctgtcaacatcgtgctgcagctggcgtccagcttccaggccactgcccggattggcttggagacagaggcacagttcacggctgtagagaggatactgcagtacatgaagatgtgtgtctcggaagctcctttacacatggaaggcacaagttgtccccaggggtggccacagcatggggaaatcatatttcaggattatcacatgaaatacagagacaacacacccaccgtgcttcacggcatcaacctgaccatccgcggccacgaagtggtgggcatcgtgggaaggacgggctctgggaagtcctccttgggcatggctctcttccgcctggtggagcccatggcaggccggattctcattgacggcgtggacatttgcagcatcggcctggaggacttgcggtccaagctctcagtgatccctcaagatccagtgctgctctcaggaaccatcagattcaacctagatccctttgaccgtcacactgaccagcagatctgggatgccttggagaggacattcctgaccaaggccatctcaaagttccccaaaaagctgcatacagatgtggtggaaaacggtggaaacttctctgtgggggagaggcagctgctctgcattgccagggctgtgcttcgcaactccaagatcatccttatcgatgaagccacagcctccattgacatggagacagacaccctgatccagcgcacaatccgtgaagccttccagggctgcaccgtgctcgtcattgcccaccgtgtcaccactgtgctgaactgtgaccacatcctggttatgggcaatgggaaggtggtagaatttgatcggccggaggtactgcggaagaagcctgggtcattgttcgcagccctcatggccacagccacttcttcactgagataaggagatgtggagacttcatggaggctggcagctgagctcagaggttcacacaggtgcagcttcgaggcccacagtctgcgaccttcttgtttggagatgagaacttctcctggaagcaggggtaaatgtagggggggtggggattgctggatggaaaccctggaataggctacttgatggctctcaagaccttagaaccccagaaccatctaagacatgggattcagtgatcatgtggttctccttttaacttacatgctgaataattttataataaggtaaaagcttatagttttctgatctgtgttagaagtgttgcaaatgctgtactgactttgtaaaatataaaactaaggaaaactca

SEQ ID NO: 285605 - DNA, 254 bp, Homo sapiens
aacgtgcagaaagggactgtactactcaaaaccaccaaggaagtggcagaggtaagtcaacatctaatcctgccactctgtgtggcaaagaacgctgggagcaaattacttctgctgctctttgaaggctgtgccagcgtcacctggatggtgtaaaggaaacaagagacaggaacagagcccctcatctcacctctgggctaccatacagaaaagcaggtaactggggaaggacagacttgtgcgtggaaaca

SEQ ID NO: 285606 - DNA, 4120 bp, Homo sapiens
  misc_feature (2222)..(2222): n is a, c, g, or t
agcggggtactttgatttacagtccagcctagactgcaccaatgggggaggtgggagtcttcccagaagaaaactgaggcactggtaccagctacggggaggtgaagatattgattataccaaagatcctggaatattcagaagagcagttggggaatgttgtccatggagtgggactctgctttgccctttttctctccgaatgtgtgaagtctctgagtttctcctccagttggatcatcaaccaacgcacagccatcaggttccgagcagctgtttcctcctttgcctttgagaagctcatccaatttaagtctgtaatacacatcacctcaggagaggccatcagcttcttcaccggtgatgtaaactacctgtttgaaggggtgtgctatggacccctagtactgatcacctgcgcatcgctggtcatctgcagcatttcttcctacttcattattggatacactgcatttattgccatcttatgctatctcctggttttcccactggcggtattcatgacaagaatggctgtgaaggctcagcatcacacatctgaggtcagcgaccagcgcatccgtgtgaccagtgaagttctcacttgcattaagctgattaaaatgtacacatgggagaaaccatttgcaaaaatcattgaagacctaagaaggaaggaaaggaaactattggagaagtgcgggcttgtccagagcctgacaagtataaccttgttcatcatccccacagtggccacagcggtctgggttctcatccacacatccttaaagctgaaactcacagcgtcaatggccttcagcatgctggcctccttgaatctccttcggctgtcagtgttctttgtgcctattgcagtcaaaggtctcacgaattccaagtctgcagtgatgaggttcaagaagtttttcctccaggagagccctgttttctatgtccagacattacaagaccccagcaaagctctggtctttgaggaggccaccttgtcatggcaacagacctgtcccgggatcgtcaatggggcactggagctggagaggaacgggcatgcttctgaggggatgaccaggcctagagatgccctcgggccagaggaagaagggaacagcctgggcccagagttgcacaagatcaacctggtggtgtccaaggggatgatgttaggggtctgcggcaacacggggagtggtaagagcagcctgttgtcagccatcctggaggagatgcacttgctcgagggctcggtgggggtgcagggaagcctggcctatgtcccccagcaggcctggatcgtcagcgggaacatcagggagaacatcctcatgggaggcgcatatgacaaggcccgatacctccaggtgctccactgctgctccctgaatcgggacctggaacttctgccctttggagacatgacagagattggagagcggggcctcaacctctctggggggcagaaacagaggatcagcctggcccgcgccgtctattccgaccgtcagatctacctgctggacgaccccctgtctgctgtggacgcccacgtggggaagcacatttttgaggagtgcattaagaagacactcagggggaagacggtcgtcctggtgacccaccagctgcagtacttagaattttgtggccagatcattttgttggaaaatgggaaaatctgtgaaaatggaactcacagtgagttaatgcagaaaaaggggaaatatgcccaacttatccagaagatgcacaaggaagccacttcggacatgttgcaggacacagcaaagatagcagagaagccaaaggtagaaagtcaggctctggccacctccctggaagagtctctcaacggaaatgctgtgccggagcatcagctcacacaggaggaggagatggaagaaggctccttgagttggagggtctaccaccactacatccaggcagctggaggttacatggtctcttgcataattttcttcttcgtggtgctgatcgtcttcttaacgatcttcagcttctggtggctgagctactggttggagcagggctcggggaccaatagcagccgagagagcaatggaaccatggcagacctgggcaacattgcagacaatcctcaactgtccttctaccagctggtgtacgggctcaacgccctgctcctcatctgtgtgggggtctgctcctcagggattttcaccaangtcacgaggaaggcatccacggccctgcacaacaagctcttcaacaaggttttccgctgccccatgagtttctttgacaccatcccaataggccggcttttgaactgcttcgcaggggacttggaacagctggaccagctcttgcccatcttttcagagcagttcctggtcctgtccttaatggtgatcgccgtcctgttgattgtcagtgtgctgtctccatatatcctgttaatgggagccataatcatggttatttgcttcatttattatatgatgttcaagaaggccatcggtgtgttcaagagactggagaactatagccggtctcctttattctcccacatcctcaattctctgcaaggcctgagctccatccatgtctatggaaaaactgaagacttcatcagccagtttaagaggctgactgatgcgcagaataactacctgctgttgtttctatcttccacacgatggatggcattgaggctggagatcatgaccaaccttgtgaccttggctgttgccctgttcgtggcttttggcatttcctccaccccctactcctttaaagtcatggctgtcaacatcgtgctgcagctggcgtccagcttccaggccactgcccggattggcttggagacagaggcacagttcacggctgtagagaggatactgcagtacatgaagatgtgtgtctcggaagctcctttacacatggaaggcacaagttgtccccaggggtggccacagcatggggaaatcatatttcaggattatcacatgaaatacagagacaacacacccaccgtgcttcacggcatcaacctgaccatccgcggccacgaagtggtgggcatcgtgggaaggacgggctctgtaggtttttactgagcacctactatgtgcctgggaaccgaaagggaagtcctccttgggcatggctctcttccgcctggtggagcccatggcaggccggattctcattgacggcgtggacatttgcagcatcggcctggaggacttgcggtccaagctctcagtgatccctcaagatccagtgctgctctcaggaaccatcagattcaacctagatccctttgaccgtcacactgaccagcagatctgggatgccttggagaggacattcctgaccaaggccatctcaaagttccccaaaaagctgcatacagatgtggtggaaaacggtggaaacttctctgtgggggagaggcagctgctctgcattgccagggctgtgcttcgcaactccaagatcatccttatcgatgaagccacagcctccattgacatggagacagacaccctgatccagcgcacaatccgtgaagccttccagggctgcaccgtgctcgtcattgcccaccgtgtcaccactgtgctgaactgtgaccacatcctggttatgggcaatgggaaggtggtagaatttgatcggccggaggtactgcggaagaagcctgggtcattgttcgcagccctcatggccacagccacttcttcactgagataaggagatgtggagacttcatggaggctggcagctgagctcagaggttcacacaggtgcagcttcgaggcccacagtctgcgaccttcttgtttggagatgagaacttctcctggaagcaggggtaaatgtagggggggtggggattgctggatggaaaccctggaataggctacttgatggctctcaagaccttagaaccccagaaccatctaagacatgggattcagtgatcatgtggttctccttttaacttacatgctgaataattttataataaggtaaaagcttatagttttctgatctgtgttagaagtgttgcaaatgctgtactgactttgtaaaatataaaactaaggaaaactca

SEQ ID NO: 285607 - DNA, 2430 bp, Homo sapiens
atgacgcccaggatggtgctttgcagcgacgtgcccttcagaaggcggctccgcaccagctgcaggttgcgggccgagtccacgctggtgcgcatggtggagccgggcagcaggacgccctcgtgggtgagcagcagcgggaggcgactggggatctggatggggctcactgatgacatgctggcagcctttcgcactgggggctgtcaaaaagagccagacagacagctgcccccggcctgccccgcagtcaccaaacctcagacccgcctccacgcctccgcttccggctacgcgctacggtccgtccccgggcccaaaagccatggcttcgcgctgctctctaggagagcctcccgaattggcaggaactgaaaatgactaggaagaggacatactgggtgcccaactcttctggtggcctcgtgaatcgtggcatcgacataggcgatgacatggtttcaggacttatttataaaacctatactctccaagatggcccctggagtcagcaagagagaaatcctgaggctccagggagggcagctgtcccaccgtgggggaagtatgatgctgccttgagaaccatgattcccttccgtcccaagccgaggtttcctgccccccagcccctggacaatgctggcctgttctcctacctcaccgtgtcatggctcaccccgctcatgatccaaagcttacggagtcgcttagatgagaacaccatccctccactgtcagtccatgatgcctcagacaaaaatgtccaaaggcttcaccgcctttgggaagaagaagtctcaaggcgagggattgaaaaagcttcagtgcttctggtgatgctgaggttccagagaacaaggttgattttcgatgcacttctgggcatctgcttctgcattgccagtgtactcgggccaatattgattataccaaagatcctggaatattcagaagagcagttggggaatgttgtccatggagtgggactctgctttgccctttttctctccgaatgtgtgaagtctctgagtttctcctccagttggatcatcaaccaacgcacagccatcaggttccgagcagctgtttcctcctttgcctttgagaagctcatccaatttaagtctgtaatacacatcacctcaggagaggccatcagcttcttcaccggtgatgtaaactacctgtttgaaggggtgtgctatggacccctagtactgatcacctgcgcatcgctggtcatctgcagcatttcttcctacttcattattggatacactgcatttattgccatcttatgctatctcctggttttcccactggcggtattcatgacaagaatggctgtgaaggctcagcatcacacatctgaggtcagcgaccagcgcatccgtgtgaccagtgaagttctcacttgcattaagctgattaaaatgtacacatgggagaaaccatttgcaaaaatcattgaagacctaagaaggaaggaaaggaaactattggagaagtgcgggcttgtccagagcctgacaagtataaccttgttcatcatccccacagtggccacagcggtctgggttctcatccacacatccttaaagctgaaactcacagcgtcaatggccttcagcatgctggcctccttgaatctccttcggctgtcagtgttctttgtgcctattgcagtcaaaggtctcacgaattccaagtctgcagtgatgaggttcaagaagtttttcctccaggagagccctgttttctatgtccagacattacaagaccccagcaaagctctggtctttgaggaggccaccttgtcatggcaacagacctgtcccgggatcgtcaatggggcactggagctggagaggaacgggcatgcttctgaggggatgaccaggcctagagatgccctcgggccagaggaagaagggaacagcctgggcccagagttgcacaagatcaacctggtggtgtccaaggggatgatgttaggggtctgcggcaacacggggagtggtaagagcagcctgttgtcagccatcctggaggaggtaagtgatctgtggccacatgcttgcctgtctgcaggcagtccaggccctcccaagctccagtgccccaggcggggccccccactgctttcttcctcacaggggtctgagcaagtgggatttttataaatcaaaaatggttgtgcttgcactgtgcgggaggtgcgtgatcaaggtggccctctctcttcaccttgtggcagcgctcctggtgcaagctgcctcttatgtcacctggagacctgtcctcacctgtgctctgtgaggatacaggatattaacacaaagttaatatgatcatacaaattatttcacagagagttgagtctagtctctcttccacactgcaataccctcttgcaatggtccctat

SEQ ID NO: 285608 - DNA, 4863 bp, Homo sapiens
  misc_feature (3008)..(3008): n is a, c, g, or t
actgggataaagcaagaagactgattttatgagcaggggtttgatacatcaaaggagattgcccaggatcaagggtgcggtgttgggggtgggttggggagggtggttagagaaggtttcactaagtgatttgggcctgaggcctgagaagatgtttaaaaagagggatcaagcacaggctaaggagaggaaagagcaggcacccaaacctctgcatggccccaatatgctccctgcagggtagtgccccctcttctggctgctcaaggcgagatctaagcttcttctaactcctgctgtcttttcatattctctgattctgggaaacgaagaattggcaggaactgaaaatgactaggaagaggacatactgggtgcccaactcttctggtggcctcgtgaatcgtggcatcgacataggcgatgacatggtttcaggacttatttataaaacctatactctccaagatggcccctggagtcagcaagagagaaatcctgaggctccagggagggcagctgtcccaccgtgggggaagtatgatgctgccttgagaaccatgattcccttccgtcccaagccgaggtttcctgccccccagcccctggacaatgctggcctgttctcctacctcaccgtgtcatggctcaccccgctcatgatccaaagcttacggagtcgcttagatgagaacaccatccctccactgtcagtccatgatgcctcagacaaaaatgtccaaaggcttcaccgcctttgggaagaagaagtctcaaggcgagggattgaaaaagcttcagtgcttctggtgatgctgaggttccagagaacaaggttgattttcgatgcacttctgggcatctgcttctgcattgccagtgtactcgggccaatattgattataccaaagatcctggaatattcagaagagcagttggggaatgttgtccatggagtgggactctgctttgccctttttctctccgaatgtgtgaagtctctgagtttctcctccagttggatcatcaaccaacgcacagccatcaggttccgagcagctgtttcctcctttgcctttgagaagctcatccaatttaagtctgtaatacacatcacctcaggagaggccatcagcttcttcaccggtgatgtaaactacctgtttgaaggggtgtgctatggacccctagtactgatcacctgcgcatcgctggtcatctgcagcatttcttcctacttcattattggatacactgcatttattgccatcttatgctatctcctggttttcccactggcggtattcatgacaagaatggctgtgaaggctcagcatcacacatctgaggtcagcgaccagcgcatccgtgtgaccagtgaagttctcacttgcattaagctgattaaaatgtacacatgggagaaaccatttgcaaaaatcattgaagacctaagaaggaaggaaaggaaactattggagaagtgcgggcttgtccagagcctgacaagtataaccttgttcatcatccccacagtggccacagcggtctgggttctcatccacacatccttaaagctgaaactcacagcgtcaatggccttcagcatgctggcctccttgaatctccttcggctgtcagtgttctttgtgcctattgcagtcaaaggtctcacgaattccaagtctgcagtgatgaggttcaagaagtttttcctccaggagagccctgttttctatgtccagacattacaagaccccagcaaagctctggtctttgaggaggccaccttgtcatggcaacagacctgtcccgggatcgtcaatggggcactggagctggagaggaacgggcatgcttctgaggggatgaccaggcctagagatgccctcgggccagaggaagaagggaacagcctgggcccagagttgcacaagatcaacctggtggtgtccaaggggatgatgttaggggtctgcggcaacacggggagtggtaagagcagcctgttgtcagccatcctggaggagatgcacttgctcgagggctcggtgggggtgcagggaagcctggcctatgtcccccagcaggcctggatcgtcagcgggaacatcagggagaacatcctcatgggaggcgcatatgacaaggcccgatacctccaggtgctccactgctgctccctgaatcgggacctggaacttctgccctttggagacatgacagagattggagagcggggcctcaacctctctggggggcagaaacagaggatcagcctggcccgcgccgtctattccgaccgtcagatctacctgctggacgaccccctgtctgctgtggacgcccacgtggggaagcacatttttgaggagtgcattaagaagacactcagggggaagacggtcgtcctggtgacccaccagctgcagtacttagaattttgtggccagatcattttgttggaaaatgggaaaatctgtgaaaatggaactcacagtgagttaatgcagaaaaaggggaaatatgcccaacttatccagaagatgcacaaggaagccacttcggacatgttgcaggacacagcaaagatagcagagaagccaaaggtagaaagtcaggctctggccacctccctggaagagtctctcaacggaaatgctgtgccggagcatcagctcacacaggaggaggagatggaagaaggctccttgagttggagggtctaccaccactacatccaggcagctggaggttacatggtctcttgcataattttcttcttcgtggtgctgatcgtcttcttaacgatcttcagcttctggtggctgagctactggttggagcagggctcggggaccaatagcagccgagagagcaatggaaccatggcagacctgggcaacattgcagacaatcctcaactgtccttctaccagctggtgtacgggctcaacgccctgctcctcatctgtgtgggggtctgctcctcagggattttcaccaangtcacgaggaaggcatccacggccctgcacaacaagctcttcaacaaggttttccgctgccccatgagtttctttgacaccatcccaataggccggcttttgaactgcttcgcaggggacttggaacagctggaccagctcttgcccatcttttcagagcagttcctggtcctgtccttaatggtgatcgccgtcctgttgattgtcagtgtgctgtctccatatatcctgttaatgggagccataatcatggttatttgcttcatttattatatgatgttcaagaaggccatcggtgtgttcaagagactggagaactatagccggtctcctttattctcccacatcctcaattctctgcaaggcctgagctccatccatgtctatggaaaaactgaagacttcatcagccagtttaagaggctgactgatgcgcagaataactacctgctgttgtttctatcttccacacgatggatggcattgaggctggagatcatgaccaaccttgtgaccttggctgttgccctgttcgtggcttttggcatttcctccaccccctactcctttaaagtcatggctgtcaacatcgtgctgcagctggcgtccagcttccaggccactgcccggattggcttggagacagaggcacagttcacggctgtagagaggatactgcagtacatgaagatgtgtgtctcggaagctcctttacacatggaaggcacaagttgtccccaggggtggccacagcatggggaaatcatatttcaggattatcacatgaaatacagagacaacacacccaccgtgcttcacggcatcaacctgaccatccgcggccacgaagtggtgggcatcgtgggaaggacgggctctgggaagtcctccttgggcatggctctcttccgcctggtggagcccatggcaggccggattctcattgacggcgtggacatttgcagcatcggcctggaggacttgcggtccaagctctcagtgatccctcaagatccagtgctgctctcaggaaccatcagattcaacctagatccctttgaccgtcacactgaccagcagatctgggatgccttggagaggacattcctgaccaaggccatctcaaagttccccaaaaagctgcatacagatgtggtggaaaacggtggaaacttctctgtgggggagaggcagctgctctgcattgccagggctgtgcttcgcaactccaagatcatccttatcgatgaagccacagcctccattgacatggagacagacaccctgatccagcgcacaatccgtgaagccttccagggctgcaccgtgctcgtcattgcccaccgtgtcaccactgtgctgaactgtgaccacatcctggttatgggcaatgggaaggtggtagaatttgatcggccggaggtactgcggaagaagcctgggtcattgttcgcagccctcatggccacagccacttcttcactgagataaggagatgtggagacttcatggaggctggcagctgagctcagaggttcacacaggtgcagcttcgaggcccacagtctgcgaccttcttgtttggagatgagaacttctcctggaagcaggggtaaatgtagggggggtggggattgctggatggaaaccctggaataggctacttgatggctctcaagaccttagaaccccagaaccatctaagacatgggattcagtgatcatgtggttctccttttaacttacatgctgaataattttataataaggtaaaagcttatagttttctgatctgtgttagaagtgttgcaaatgctgtactgactttgtaaaatataaaactaaggaaaactca

SEQ ID NO: 285609 - DNA, 4933 bp, Homo sapiens
  misc_feature (3035)..(3035): n is a, c, g, or t
atgacgcccaggatggtgctttgcagcgacgtgcccttcagaaggcggctccgcaccagctgcaggttgcgggccgagtccacgctggtgcgcatggtggagccgggcagcaggacgccctcgtgggtgagcagcagcgggaggcgactggggatctggatggggctcactgatgacatgctggcagcctttcgcactgggggctgtcaaaaagagccagacagacagctgcccccggcctgccccgcagtcaccaaacctcagacccgcctccacgcctccgcttccggctacgcgctacggtccgtccccgggcccaaaagccatggcttcgcgctgctctctaggagagcctcccgaattggcaggaactgaaaatgactaggaagaggacatactgggtgcccaactcttctggtggcctcgtgaatcgtggcatcgacataggcgatgacatggtttcaggacttatttataaaacctatactctccaagatggcccctggagtcagcaagagagaaatcctgaggctccagggagggcagctgtcccaccgtgggggaagtatgatgctgccttgagaaccatgattcccttccgtcccaagccgaggtttcctgccccccagcccctggacaatgctggcctgttctcctacctcaccgtgtcatggctcaccccgctcatgatccaaagcttacggagtcgcttagatgagaacaccatccctccactgtcagtccatgatgcctcagacaaaaatgtccaaaggcttcaccgcctttgggaagaagaagtctcaaggcgagggattgaaaaagcttcagtgcttctggtgatgctgaggttccagagaacaaggttgattttcgatgcacttctgggcatctgcttctgcattgccagtgtactcgggccaatattgattataccaaagatcctggaatattcagaagagcagttggggaatgttgtccatggagtgggactctgctttgccctttttctctccgaatgtgtgaagtctctgagtttctcctccagttggatcatcaaccaacgcacagccatcaggttccgagcagctgtttcctcctttgcctttgagaagctcatccaatttaagtctgtaatacacatcacctcaggagaggccatcagcttcttcaccggtgatgtaaactacctgtttgaaggggtgtgctatggacccctagtactgatcacctgcgcatcgctggtcatctgcagcatttcttcctacttcattattggatacactgcatttattgccatcttatgctatctcctggttttcccactggcggtattcatgacaagaatggctgtgaaggctcagcatcacacatctgaggtcagcgaccagcgcatccgtgtgaccagtgaagttctcacttgcattaagctgattaaaatgtacacatgggagaaaccatttgcaaaaatcattgaagacctaagaaggaaggaaaggaaactattggagaagtgcgggcttgtccagagcctgacaagtataaccttgttcatcatccccacagtggccacagcggtctgggttctcatccacacatccttaaagctgaaactcacagcgtcaatggccttcagcatgctggcctccttgaatctccttcggctgtcagtgttctttgtgcctattgcagtcaaaggtctcacgaattccaagtctgcagtgatgaggttcaagaagtttttcctccaggagagccctgttttctatgtccagacattacaagaccccagcaaagctctggtctttgaggaggccaccttgtcatggcaacagacctgtcccgggatcgtcaatggggcactggagctggagaggaacgggcatgcttctgaggggatgaccaggcctagagatgccctcgggccagaggaagaagggaacagcctgggcccagagttgcacaagatcaacctggtggtgtccaaggggatgatgttaggggtctgcggcaacacggggagtggtaagagcagcctgttgtcagccatcctggaggagatgcacttgctcgagggctcggtgggggtgcagggaagcctggcctatgtcccccagcaggcctggatcgtcagcgggaacatcagggagaacatcctcatgggaggcgcatatgacaaggcccgatacctccaggtgctccactgctgctccctgaatcgggacctggaacttctgccctttggagacatgacagagattggagagcggggcctcaacctctctggggggcagaaacagaggatcagcctggcccgcgccgtctattccgaccgtcagatctacctgctggacgaccccctgtctgctgtggacgcccacgtggggaagcacatttttgaggagtgcattaagaagacactcagggggaagacggtcgtcctggtgacccaccagctgcagtacttagaattttgtggccagatcattttgttggaaaatgggaaaatctgtgaaaatggaactcacagtgagttaatgcagaaaaaggggaaatatgcccaacttatccagaagatgcacaaggaagccacttcggacatgttgcaggacacagcaaagatagcagagaagccaaaggtagaaagtcaggctctggccacctccctggaagagtctctcaacggaaatgctgtgccggagcatcagctcacacaggaggaggagatggaagaaggctccttgagttggagggtctaccaccactacatccaggcagctggaggttacatggtctcttgcataattttcttcttcgtggtgctgatcgtcttcttaacgatcttcagcttctggtggctgagctactggttggagcagggctcggggaccaatagcagccgagagagcaatggaaccatggcagacctgggcaacattgcagacaatcctcaactgtccttctaccagctggtgtacgggctcaacgccctgctcctcatctgtgtgggggtctgctcctcagggattttcaccaangtcacgaggaaggcatccacggccctgcacaacaagctcttcaacaaggttttccgctgccccatgagtttctttgacaccatcccaataggccggcttttgaactgcttcgcaggggacttggaacagctggaccagctcttgcccatcttttcagagcagttcctggtcctgtccttaatggtgatcgccgtcctgttgattgtcagtgtgctgtctccatatatcctgttaatgggagccataatcatggttatttgcttcatttattatatgatgttcaagaaggccatcggtgtgttcaagagactggagaactatagccggtctcctttattctcccacatcctcaattctctgcaaggcctgagctccatccatgtctatggaaaaactgaagacttcatcagccagtttaagaggctgactgatgcgcagaataactacctgctgttgtttctatcttccacacgatggatggcattgaggctggagatcatgaccaaccttgtgaccttggctgttgccctgttcgtggcttttggcatttcctccaccccctactcctttaaagtcatggctgtcaacatcgtgctgcagctggcgtccagcttccaggccactgcccggattggcttggagacagaggcacagttcacggctgtagagaggatactgcagtacatgaagatgtgtgtctcggaagctcctttacacatggaaggcacaagttgtccccaggggtggccacagcatggggaaatcatatttcaggattatcacatgaaatacagagacaacacacccaccgtgcttcacggcatcaacctgaccatccgcggccacgaagtggtgggcatcgtgggaaggacgggctctgtaggtttttactgagcacctactatgtgcctgggaaccgaaagggaagtcctccttgggcatggctctcttccgcctggtggagcccatggcaggccggattctcattgacggcgtggacatttgcagcatcggcctggaggacttgcggtccaagctctcagtgatccctcaagatccagtgctgctctcaggaaccatcagattcaacctagatccctttgaccgtcacactgaccagcagatctgggatgccttggagaggacattcctgaccaaggccatctcaaagttccccaaaaagctgcatacagatgtggtggaaaacggtggaaacttctctgtgggggagaggcagctgctctgcattgccagggctgtgcttcgcaactccaagatcatccttatcgatgaagccacagcctccattgacatggagacagacaccctgatccagcgcacaatccgtgaagccttccagggctgcaccgtgctcgtcattgcccaccgtgtcaccactgtgctgaactgtgaccacatcctggttatgggcaatgggaaggtggtagaatttgatcggccggaggtactgcggaagaagcctgggtcattgttcgcagccctcatggccacagccacttcttcactgagataaggagatgtggagacttcatggaggctggcagctgagctcagaggttcacacaggtgcagcttcgaggcccacagtctgcgaccttcttgtttggagatgagaacttctcctggaagcaggggtaaatgtagggggggtggggattgctggatggaaaccctggaataggctacttgatggctctcaagaccttagaaccccagaaccatctaagacatgggattcagtgatcatgtggttctccttttaacttacatgctgaataattttataataaggtaaaagcttatagttttctgatctgtgttagaagtgttgcaaatgctgtactgactttgtaaaatataaaactaaggaaaactca

SEQ ID NO: 285610 - DNA, 3049 bp, Homo sapiens
  misc_feature (1151)..(1151): n is a, c, g, or t
ggtccctggaactcgctggtgggcctggtagggccacattaaaagtcccttttacctaggagagcccccaaggtcctggagggcagtggggccctgggcactgtgcctgctgagccaggcaggctctgtcccttggcccaattggtcctgaggctggactcattctgccgcagatgcacttgctcgagggctcggtgggggtgcagggaagcctggcctatgtcccccagcaggcctggatcgtcagcgggaacatcagggagaacatcctcatgggaggcgcatatgacaaggcccgatacctccaggtgctccactgctgctccctgaatcgggacctggaacttctgccctttggagacatgacagagattggagagcggggcctcaacctctctggggggcagaaacagaggatcagcctggcccgcgccgtctattccgaccgtcagatctacctgctggacgaccccctgtctgctgtggacgcccacgtggggaagcacatttttgaggagtgcattaagaagacactcagggggaagacggtcgtcctggtgacccaccagctgcagtacttagaattttgtggccagatcattttgttggaaaatgggaaaatctgtgaaaatggaactcacagtgagttaatgcagaaaaaggggaaatatgcccaacttatccagaagatgcacaaggaagccacttcggacatgttgcaggacacagcaaagatagcagagaagccaaaggtagaaagtcaggctctggccacctccctggaagagtctctcaacggaaatgctgtgccggagcatcagctcacacaggaggaggagatggaagaaggctccttgagttggagggtctaccaccactacatccaggcagctggaggttacatggtctcttgcataattttcttcttcgtggtgctgatcgtcttcttaacgatcttcagcttctggtggctgagctactggttggagcagggctcggggaccaatagcagccgagagagcaatggaaccatggcagacctgggcaacattgcagacaatcctcaactgtccttctaccagctggtgtacgggctcaacgccctgctcctcatctgtgtgggggtctgctcctcagggattttcaccaangtcacgaggaaggcatccacggccctgcacaacaagctcttcaacaaggttttccgctgccccatgagtttctttgacaccatcccaataggccggcttttgaactgcttcgcaggggacttggaacagctggaccagctcttgcccatcttttcagagcagttcctggtcctgtccttaatggtgatcgccgtcctgttgattgtcagtgtgctgtctccatatatcctgttaatgggagccataatcatggttatttgcttcatttattatatgatgttcaagaaggccatcggtgtgttcaagagactggagaactatagccggtctcctttattctcccacatcctcaattctctgcaaggcctgagctccatccatgtctatggaaaaactgaagacttcatcagccagtttaagaggctgactgatgcgcagaataactacctgctgttgtttctatcttccacacgatggatggcattgaggctggagatcatgaccaaccttgtgaccttggctgttgccctgttcgtggcttttggcatttcctccaccccctactcctttaaagtcatggctgtcaacatcgtgctgcagctggcgtccagcttccaggccactgcccggattggcttggagacagaggcacagttcacggctgtagagaggatactgcagtacatgaagatgtgtgtctcggaagctcctttacacatggaaggcacaagttgtccccaggggtggccacagcatggggaaatcatatttcaggattatcacatgaaatacagagacaacacacccaccgtgcttcacggcatcaacctgaccatccgcggccacgaagtggtgggcatcgtgggaaggacgggctctgtaggtttttactgagcacctactatgtgcctgggaaccgaaagggaagtcctccttgggcatggctctcttccgcctggtggagcccatggcaggccggattctcattgacggcgtggacatttgcagcatcggcctggaggacttgcggtccaagctctcagtgatccctcaagatccagtgctgctctcaggaaccatcagattcaacctagatccctttgaccgtcacactgaccagcagatctgggatgccttggagaggacattcctgaccaaggccatctcaaagttccccaaaaagctgcatacagatgtggtggaaaacggtggaaacttctctgtgggggagaggcagctgctctgcattgccagggctgtgcttcgcaactccaagatcatccttatcgatgaagccacagcctccattgacatggagacagacaccctgatccagcgcacaatccgtgaagccttccagggctgcaccgtgctcgtcattgcccaccgtgtcaccactgtgctgaactgtgaccacatcctggttatgggcaatgggaaggtggtagaatttgatcggccggaggtactgcggaagaagcctgggtcattgttcgcagccctcatggccacagccacttcttcactgagataaggagatgtggagacttcatggaggctggcagctgagctcagaggttcacacaggtgcagcttcgaggcccacagtctgcgaccttcttgtttggagatgagaacttctcctggaagcaggggtaaatgtagggggggtggggattgctggatggaaaccctggaataggctacttgatggctctcaagaccttagaaccccagaaccatctaagacatgggattcagtgatcatgtggttctccttttaacttacatgctgaataattttataataaggtaaaagcttatagttttctgatctgtgttagaagtgttgcaaatgctgtactgactttgtaaaatataaaactaaggaaaactca

SEQ ID NO: 285611 - DNA, 4987 bp, Homo sapiens
  misc_feature (3035)..(3035): n is a, c, g, or t
atgacgcccaggatggtgctttgcagcgacgtgcccttcagaaggcggctccgcaccagctgcaggttgcgggccgagtccacgctggtgcgcatggtggagccgggcagcaggacgccctcgtgggtgagcagcagcgggaggcgactggggatctggatggggctcactgatgacatgctggcagcctttcgcactgggggctgtcaaaaagagccagacagacagctgcccccggcctgccccgcagtcaccaaacctcagacccgcctccacgcctccgcttccggctacgcgctacggtccgtccccgggcccaaaagccatggcttcgcgctgctctctaggagagcctcccgaattggcaggaactgaaaatgactaggaagaggacatactgggtgcccaactcttctggtggcctcgtgaatcgtggcatcgacataggcgatgacatggtttcaggacttatttataaaacctatactctccaagatggcccctggagtcagcaagagagaaatcctgaggctccagggagggcagctgtcccaccgtgggggaagtatgatgctgccttgagaaccatgattcccttccgtcccaagccgaggtttcctgccccccagcccctggacaatgctggcctgttctcctacctcaccgtgtcatggctcaccccgctcatgatccaaagcttacggagtcgcttagatgagaacaccatccctccactgtcagtccatgatgcctcagacaaaaatgtccaaaggcttcaccgcctttgggaagaagaagtctcaaggcgagggattgaaaaagcttcagtgcttctggtgatgctgaggttccagagaacaaggttgattttcgatgcacttctgggcatctgcttctgcattgccagtgtactcgggccaatattgattataccaaagatcctggaatattcagaagagcagttggggaatgttgtccatggagtgggactctgctttgccctttttctctccgaatgtgtgaagtctctgagtttctcctccagttggatcatcaaccaacgcacagccatcaggttccgagcagctgtttcctcctttgcctttgagaagctcatccaatttaagtctgtaatacacatcacctcaggagaggccatcagcttcttcaccggtgatgtaaactacctgtttgaaggggtgtgctatggacccctagtactgatcacctgcgcatcgctggtcatctgcagcatttcttcctacttcattattggatacactgcatttattgccatcttatgctatctcctggttttcccactggcggtattcatgacaagaatggctgtgaaggctcagcatcacacatctgaggtcagcgaccagcgcatccgtgtgaccagtgaagttctcacttgcattaagctgattaaaatgtacacatgggagaaaccatttgcaaaaatcattgaagacctaagaaggaaggaaaggaaactattggagaagtgcgggcttgtccagagcctgacaagtataaccttgttcatcatccccacagtggccacagcggtctgggttctcatccacacatccttaaagctgaaactcacagcgtcaatggccttcagcatgctggcctccttgaatctccttcggctgtcagtgttctttgtgcctattgcagtcaaaggtctcacgaattccaagtctgcagtgatgaggttcaagaagtttttcctccaggagagccctgttttctatgtccagacattacaagaccccagcaaagctctggtctttgaggaggccaccttgtcatggcaacagacctgtcccgggatcgtcaatggggcactggagctggagaggaacgggcatgcttctgaggggatgaccaggcctagagatgccctcgggccagaggaagaagggaacagcctgggcccagagttgcacaagatcaacctggtggtgtccaaggggatgatgttaggggtctgcggcaacacggggagtggtaagagcagcctgttgtcagccatcctggaggagatgcacttgctcgagggctcggtgggggtgcagggaagcctggcctatgtcccccagcaggcctggatcgtcagcgggaacatcagggagaacatcctcatgggaggcgcatatgacaaggcccgatacctccaggtgctccactgctgctccctgaatcgggacctggaacttctgccctttggagacatgacagagattggagagcggggcctcaacctctctggggggcagaaacagaggatcagcctggcccgcgccgtctattccgaccgtcagatctacctgctggacgaccccctgtctgctgtggacgcccacgtggggaagcacatttttgaggagtgcattaagaagacactcagggggaagacggtcgtcctggtgacccaccagctgcagtacttagaattttgtggccagatcattttgttggaaaatgggaaaatctgtgaaaatggaactcacagtgagttaatgcagaaaaaggggaaatatgcccaacttatccagaagatgcacaaggaagccacttcggacatgttgcaggacacagcaaagatagcagagaagccaaaggtagaaagtcaggctctggccacctccctggaagagtctctcaacggaaatgctgtgccggagcatcagctcacacaggaggaggagatggaagaaggctccttgagttggagggtctaccaccactacatccaggcagctggaggttacatggtctcttgcataattttcttcttcgtggtgctgatcgtcttcttaacgatcttcagcttctggtggctgagctactggttggagcagggctcggggaccaatagcagccgagagagcaatggaaccatggcagacctgggcaacattgcagacaatcctcaactgtccttctaccagctggtgtacgggctcaacgccctgctcctcatctgtgtgggggtctgctcctcagggattttcaccaangtcacgaggaaggcatccacggccctgcacaacaagctcttcaacaaggttttccgctgccccatgagtttctttgacaccatcccaataggccggcttttgaactgcttcgcaggggacttggaacagctggaccagctcttgcccatcttttcagagcagttcctggtcctgtccttaatggtgatcgccgtcctgttgattgtcagtgtgctgtctccatatatcctgttaatgggagccataatcatggttatttgcttcatttattatatgatgttcaagaaggccatcggtgtgttcaagagactggagaactatagccggtctcctttattctcccacatcctcaattctctgcaaggcctgagctccatccatgtctatggaaaaactgaagacttcatcagccagtttaagaggctgactgatgcgcagaataactacctgctgttgtttctatcttccacacgatggatggcattgaggctggagatcatgaccaaccttgtgaccttggctgttgccctgttcgtggcttttggcatttcctccaccccctactcctttaaagtcatggctgtcaacatcgtgctgcagctggcgtccagcttccaggccactgcccggattggcttggagacagaggcacagttcacggctgtagagaggatactgcagtacatgaagatgtgtgtctcggaagctcctttacacatggaaggcacaagttgtccccaggggtggccacagcatggggaaatcatatttcaggattatcacatgaaatacagagacaacacacccaccgtgcttcacggcatcaacctgaccatccgcggccacgaagtggtgggcatcgtgggaaggacgggctctgggaagtcctccttgggcatggctctcttccgcctggtggagcccatggcaggccggattctcattgacggcgtggacatttgcagcatcggcctggaggacttgcggtccaagctctcagtgatccctcaagatccagtgctgctctcaggaaccatcagattcaacctagatccctttgaccgtcacactgaccagcagatctgggatgccttggagaggacattcctgaccaaggccatctcaaagttccccaaaaagctgcatacagatgtggtggaaaacggtggaaacttctctgtgggggagaggcagctgctctgcattgccagggctgtgcttcgcaactccaagatcatccttatcgatgaagccacagcctccattgacatggagacagacaccctgatccagcgcacaatccgtgaagccttccagggctgcaccgtgctcgtcattgcccaccgtgtcaccactgtgctgaactgtgaccacatcctggttatgggcaatgggaaggtggtagaatttgatcggccggaggtactgcggaagaagcctgggtcattgttcgcagccctcatggccacagccacttcttcactgagataaggagatgtggagacttcatggaggctggcagctgagctcagaggttcacacaggtgcagcttcgaggcccacagtctgcgaccttcttgtttggagatgagaacttctcctggaagcagggattatgatgtctgattttcaaaaaatgccataaaaaatcaatttagtaaaccaatatttctcactctcttgcctgcactggtgctggggatgaaatggtgtccctgccctcagggaatttggaatctcgtgaggaactgctgtgggacactgccctcatcacgggtgagggagctctctacacactggccctccccaggccagatgcagctgccgtcttttccttgagcgaccagcagatggcagcctcgtcccaaaaatgcggtgatggccccactgggcttctgagctggccggatccccggagataattcgccacaaaagtgttgacccctggagtc

SEQ ID NO: 285612 - DNA, 510 bp, Homo sapiens
cagggtaccaatatgtgaataactatcattgtcttgttagcagtggggccctgactcacgtgaaggaattatagcattttgaggtggcacatgtttagttgatcacataaatatttaaaaaattgaaattcagatgaagtaataactattttttgatacttattttttgaaaaacaggatcgtgaacttccgagactgattagaggccgagttcatagatgtgttggcaactatgaccagaaaaagaacattttccaatgtgtttctgtcagaccggcgtctgtttctgaacaaaaaactttccaggcatttgtcaaaattgcagatgttgagatgcagtattatattaatgtgatgaatgaaacttaagtagtgataaaaggaagtttagcataaattatagcagttttctgttattgcttaatttaccatctccatagttttatagctactattgtatttcacttgttgaattaaagtatttgaattcttttaaatgtggaaagagtt

SEQ ID NO: 285613 - DNA, 1967 bp, Homo sapiens
ctcccgcaagctcccgcagccccggcgctgcctcgctgacggctctccgccttccatggccgccatctgaacctgggcttcagctctgtccccagcctcccggggactcagattccctgaccctgatccgacccagaaattgagccagacacctcgggtggccttcgagtcaatctctgggcacactctgggtggccaccagcatctaacaaacggatgtctggaccctaagggccagggggtgaggggaagtggggcacactttttagacgatggtggggctgaggccggttgggcaggagatctgcctctgtctctccagtcacaggacagtctcctttcctctctgggcaaaactctaaggagctggagccatccctgggtccacagtgtgagaacgccaaggaagagcgttaacgtcatcgcgcccggccaagggcggccaggcaggcagcgaagatgccatcgcgccgaggtggcggccactgcgcctgcgcggtccacggcgcctgcgaacagcctgattcccgcgctttcttcgcgggcgggaagggcggcggttgctgacggggccgcctggacgacggttgacggaggcgagggaaactgagggcgaaagttgtgtgtcgtgttggcaggagggcctagaagggaaagactgtctagtgggacaatgtcatattataaatttggaatgctgaatagaaaattatagattttgatattgaaggaaatgaagcgaagcctaaatgaaaattcagctcgaagtacagcaggctgtttgcctgttccgttgttcaatcagaaaaagaggaacagacagccattaacttctaatccacttaaagatgattcaggtatcagtaccccttctgacaattatgattttcctcctctacctacagattgggcctgggaagctgtgaatccagagttggctcctgtaatgaaaacagtggacaccgggcaaataccacattcagtttctcgtcctctgagaagtcaagattctgtctttaactctattcaatcaaatactggaagaagccagggtggttggagctacagagatggtaacaaaaataccagcttgaaaacttggaataaaaatgattttaagcctcaatgtaaacgaacaaacttagtggcaaatgatggaaaaaattcttgtccaatgagttcgggagctcaacaacaaaaacaattaagaacacctgaacctcctaacttatctcgcaacaaagaaaccgagctactcagacaaacacattcatcaaaaatatctggctgcacaatgagagggctagacaaaaacagtgcactacagacacttaagcccaattttcaacaaaatcaatataagaaacaaatgttgggatgatattccagaagacaacaccctgaaggaaacctcattgtatcagttacagtttaaggaaaaagctagttctttaagaattatttctgcagttattgaaagcatgaagtattggcgtgaacatgcacagaaaactgtacttctttttgaagtattagctgttcttgattcagctgttacacctggcccatattattcgaagacttttcttatgagggatgggaaaaatactctgccttgtgtcttttatgaaatcgatcgtgaacttccgagactgattagaggccgagttcatagatgtgttggcaactatgaccagaaaaagaacattttccaatgtgtttctgtcagaccggcgtctgtttctgaacaaaaaactttccaggcatttgtcaaaattgcagatgttgagatgcagtattatattaatgtgatgaatgaaacttaagtagtgataaaaggaagtttagcataaattatagcagttttctgttattgcttaatttaccatctccatagttttatagctactattgtatttcacttgttgaattaaagtatttgaattcttttaaatgtggaaagagtt

SEQ ID NO: 285614 - DNA, 1903 bp, Homo sapiens
ctcccgcaagctcccgcagccccggcgctgcctcgctgacggctctccgccttccatggccgccatctgaacctgggcttcagctctgtccccagcctcccggggactcagattccctgaccctgatccgacccagaaattgagccagacacctcgggtggccttcgagtcaatctctgggcacactctgggtggccaccagcatctaacaaacggatgtctggaccctaagggccagggggtgaggggaagtggggcacactttttagacgatggtggggctgaggccggttgggcaggagatctgcctctgtctctccagtcacaggacagtctcctttcctctctgggcaaaactctaaggagctggagccatccctgggtccacagtgtgagaacgccaaggaagagcgttaacgtcatcgcgcccggccaagggcggccaggcaggcagcgaagatgccatcgcgccgaggtggcggccactgcgcctgcgcggtccacggcgcctgcgaacagcctgattcccgcgctttcttcgcgggcgggaagggcggcggttgctgacggggccgcctggacgacggttgacggaggtctagtgggacaatgtcatattataaatttggaatgctgaatagaaaattatagattttgatattgaaggaaatgaagcgaagcctaaatgaaaattcagctcgaagtacagcaggctgtttgcctgttccgttgttcaatcagaaaaagaggaacagacagccattaacttctaatccacttaaagatgattcaggtatcagtaccccttctgacaattatgattttcctcctctacctacagattgggcctgggaagctgtgaatccagagttggctcctgtaatgaaaacagtggacaccgggcaaataccacattcagtttctcgtcctctgagaagtcaagattctgtctttaactctattcaatcaaatactggaagaagccagggtggttggagctacagagatggtaacaaaaataccagcttgaaaacttggaataaaaatgattttaagcctcaatgtaaacgaacaaacttagtggcaaatgatggaaaaaattcttgtccaatgagttcgggagctcaacaacaaaaacaattaagaacacctgaacctcctaacttatctcgcaacaaagaaaccgagctactcagacaaacacattcatcaaaaatatctggctgcacaatgagagggctagacaaaaacagtgcactacagacacttaagcccaattttcaacaaaatcaatataagaaacaaatgttgggatgatattccagaagacaacaccctgaaggaaacctcattgtatcagttacagtttaaggaaaaagctagttctttaagaattatttctgcagttattgaaagcatgaagtattggcgtgaacatgcacagaaaactgtacttctttttgaagtattagctgttcttgattcagctgttacacctggcccatattattcgaagacttttcttatgagggatgggaaaaatactctgccttgtgtcttttatgaaatcgatcgtgaacttccgagactgattagaggccgagttcatagatgtgttggcaactatgaccagaaaaagaacattttccaatgtgtttctgtcagaccggcgtctgtttctgaacaaaaaactttccaggcatttgtcaaaattgcagatgttgagatgcagtattatattaatgtgatgaatgaaacttaagtagtgataaaaggaagtttagcataaattatagcagttttctgttattgcttaatttaccatctccatagttttatagctactattgtatttcacttgttgaattaaagtatttgaattcttttaaatgtggaaagagtt

SEQ ID NO: 285615 - DNA, 1890 bp, Homo sapiens
ctcccgcaagctcccgcagccccggcgctgcctcgctgacggctctccgccttccatggccgccatctgaacctgggcttcagctctgtccccagcctcccggggactcagattccctgaccctgatccgacccagaaattgagccagacacctcgggtggccttcgagtcaatctctgggcacactctgggtggccaccagcatctaacaaacggatgtctggaccctaagggccagggggtgaggggaagtggggcacactttttagacgatggtggggctgaggccggttgggcaggagatctgcctctgtctctccagtcacaggacagtctcctttcctctctgggcaaaactctaaggagctggagccatccctgggtccacagtgtgagaacgccaaggaagagcgttaacgtcatcgcgcccggccaagggcggccaggcaggcagcgaagatgccatcgcgccgaggtggcggccactgcgcctgcgcggtccacggcgcctgcgaacagcctgattcccgcgctttcttcgcgggcgggaagggcggcggttgctgacggggccgcctggacgacggttgacggaggcgagggaaactgagggcgaaagttgtgtgtcgtgttggcaggagggcctagaagggaaagactgtctagtgggacaatgtcatattataaatttggaatgctgaatagaaaattatagattttgatattgaaggaaatgaagcgaagcctaaatgaaaattcagctcgaagtacagcagaaaaagaggaacagacagccattaacttctaatccacttaaagatgattcagattgggcctgggaagctgtgaatccagagttggctcctgtaatgaaaacagtggacaccgggcaaataccacattcagtttctcgtcctctgagaagtcaagattctgtctttaactctattcaatcaaatactggaagaagccagggtggttggagctacagagatggtaacaaaaataccagcttgaaaacttggaataaaaatgattttaagcctcaatgtaaacgaacaaacttagtggcaaatgatggaaaaaattcttgtccaatgagttcgggagctcaacaacaaaaacaattaagaacacctgaacctcctaacttatctcgcaacaaagaaaccgagctactcagacaaacacattcatcaaaaatatctggctgcacaatgagagggctagacaaaaacagtgcactacagacacttaagcccaattttcaacaaaatcaatataagaaacaaatgttgggatgatattccagaagacaacaccctgaaggaaacctcattgtatcagttacagtttaaggaaaaagctagttctttaagaattatttctgcagttattgaaagcatgaagtattggcgtgaacatgcacagaaaactgtacttctttttgaagtattagctgttcttgattcagctgttacacctggcccatattattcgaagacttttcttatgagggatgggaaaaatactctgccttgtgtcttttatgaaatcgatcgtgaacttccgagactgattagaggccgagttcatagatgtgttggcaactatgaccagaaaaagaacattttccaatgtgtttctgtcagaccggcgtctgtttctgaacaaaaaactttccaggcatttgtcaaaattgcagatgttgagatgcagtattatattaatgtgatgaatgaaacttaagtagtgataaaaggaagtttagcataaattatagcagttttctgttattgcttaatttaccatctccatagttttatagctactattgtatttcacttgttgaattaaagtatttgaattcttttaaatgtggaaagagtt

SEQ ID NO: 285616 - DNA, 1925 bp, Homo sapiens
ctcccgcaagctcccgcagccccggcgctgcctcgctgacggctctccgccttccatggccgccatctgaacctgggcttcagctctgtccccagcctcccggggactcagattccctgaccctgatccgacccagaaattgagccagacacctcgggtggccttcgagtcaatctctgggcacactctgggtggccaccagcatctaacaaacggatgtctggaccctaagggccagggggtgaggggaagtggggcacactttttagacgatggtggggctgaggccggttgggcaggagatctgcctctgtctctccagtcacaggacagtctcctttcctctctgggcaaaactctaaggagctggagccatccctgggtccacagtgtgagaacgccaaggaagagcgttaacgtcatcgcgcccggccaagggcggccaggcaggcagcgaagatgccatcgcgccgaggtggcggccactgcgcctgcgcggtccacggcgcctgcgaacagcctgattcccgcgctttcttcgcgggcgggaagggcggcggttgctgacggggccgcctggacgacggttgacggaggcgagggaaactgagggcgaaagtctagtgggacaatgtcatattataaatttggaatgctgaatagaaaattatagattttgatattgaaggaaatgaagcgaagcctaaatgaaaattcagctcgaagtacagcaggctgtttgcctgttccgttgttcaatcagaaaaagaggaacagacagccattaacttctaatccacttaaagatgattcaggtatcagtaccccttctgacaattatgattttcctcctctacctacagattgggcctgggaagctgtgaatccagagttggctcctgtaatgaaaacagtggacaccgggcaaataccacattcagtttctcgtcctctgagaagtcaagattctgtctttaactctattcaatcaaatactggaagaagccagggtggttggagctacagagatggtaacaaaaataccagcttgaaaacttggaataaaaatgattttaagcctcaatgtaaacgaacaaacttagtggcaaatgatggaaaaaattcttgtccaatgagttcgggagctcaacaacaaaaacaattaagaacacctgaacctcctaacttatctcgcaacaaagaaaccgagctactcagacaaacacattcatcaaaaatatctggctgcacaatgagagggctagacaaaaacagtgcactacagacacttaagcccaattttcaacaaaatcaatataagaaacaaatgttgggatgatattccagaagacaacaccctgaaggaaacctcattgtatcagttacagtttaaggaaaaagctagttctttaagaattatttctgcagttattgaaagcatgaagtattggcgtgaacatgcacagaaaactgtacttctttttgaagtattagctgttcttgattcagctgttacacctggcccatattattcgaagacttttcttatgagggatgggaaaaatactctgccttgtgtcttttatgaaatcgatcgtgaacttccgagactgattagaggccgagttcatagatgtgttggcaactatgaccagaaaaagaacattttccaatgtgtttctgtcagaccggcgtctgtttctgaacaaaaaactttccaggcatttgtcaaaattgcagatgttgagatgcagtattatattaatgtgatgaatgaaacttaagtagtgataaaaggaagtttagcataaattatagcagttttctgttattgcttaatttaccatctccatagttttatagctactattgtatttcacttgttgaattaaagtatttgaattcttttaaatgtggaaagagtt

SEQ ID NO: 285617 - DNA, 1855 bp, Homo sapiens
ctcccgcaagctcccgcagccccggcgctgcctcgctgacggctctccgccttccatggccgccatctgaacctgggcttcagctctgtccccagcctcccggggactcagattccctgaccctgatccgacccagaaattgagccagacacctcgggtggccttcgagtcaatctctgggcacactctgggtggccaccagcatctaacaaacggatgtctggaccctaagggccagggggtgaggggaagtggggcacactttttagacgatggtggggctgaggccggttgggcaggagatctgcctctgtctctccagtcacaggacagtctcctttcctctctgggcaaaactctaaggagctggagccatccctgggtccacagtgtgagaacgccaaggaagagcgttaacgtcatcgcgcccggccaagggcggccaggcaggcagcgaagatgccatcgcgccgaggtggcggccactgcgcctgcgcggtccacggcgcctgcgaacagcctgattcccgcgctttcttcgcgggcgggaagggcggcggttgctgacggggccgcctggacgacggttgacggaggtctagtgggacaatgtcatattataaatttggaatgctgaatagaaaattatagattttgatattgaaggaaatgaagcgaagcctaaatgaaaattcagctcgaagtacagcaggctgtttgcctgttccgttgttcaatcagaaaaagaggaacagacagccattaacttctaatccacttaaagatgattcagattgggcctgggaagctgtgaatccagagttggctcctgtaatgaaaacagtggacaccgggcaaataccacattcagtttctcgtcctctgagaagtcaagattctgtctttaactctattcaatcaaatactggaagaagccagggtggttggagctacagagatggtaacaaaaataccagcttgaaaacttggaataaaaatgattttaagcctcaatgtaaacgaacaaacttagtggcaaatgatggaaaaaattcttgtccaatgagttcgggagctcaacaacaaaaacaattaagaacacctgaacctcctaacttatctcgcaacaaagaaaccgagctactcagacaaacacattcatcaaaaatatctggctgcacaatgagagggctagacaaaaacagtgcactacagacacttaagcccaattttcaacaaaatcaatataagaaacaaatgttgggatgatattccagaagacaacaccctgaaggaaacctcattgtatcagttacagtttaaggaaaaagctagttctttaagaattatttctgcagttattgaaagcatgaagtattggcgtgaacatgcacagaaaactgtacttctttttgaagtattagctgttcttgattcagctgttacacctggcccatattattcgaagacttttcttatgagggatgggaaaaatactctgccttgtgtcttttatgaaatcgatcgtgaacttccgagactgattagaggccgagttcatagatgtgttggcaactatgaccagaaaaagaacattttccaatgtgtttctgtcagaccggcgtctgtttctgaacaaaaaactttccaggcatttgtcaaaattgcagatgttgagatgcagtattatattaatgtgatgaatgaaacttaagtagtgataaaaggaagtttagcataaattatagcagttttctgttattgcttaatttaccatctccatagttttatagctactattgtatttcacttgttgaattaaagtatttgaattcttttaaatgtggaaagagtt

SEQ ID NO: 285618 - DNA, 555 bp, Homo sapiens
agcccctcttccttctcttcagcctattcaatatgaagatggtgaggatgatgacctttatgatgatccacttccatttaatgaataacttattaaatcccaggtggcggtaattctctgtgaggtcaccctcaatgagaactattcgcacaggctgattctgcaattccttgatcacaggattattagatactgacacaacagtgatatatcctggacaaacacaagaagaagtttcaggtacatgaagagaaactacctcttcactacaaaagtttaagccttctgacattactgatactattatggaaatggggacaccaagatgaagacattcttcaactgcactgctccaagcaccaacaagaaacaaaagagtactgattccagttctatatgtgttgttttgtgcttgaactgcttcattgagaagttgtcccactgcactggttaaatccaaactttcaagaagccttactgttgaactgattaatacactttcatgacattcttcatctataataaatttggatgattttagtgggcctaggaaag

SEQ ID NO: 285619 - DNA, 4586 bp, Homo sapiens
agaacgatggcctttctgcggtgtctgcgaccgggaccaaggcggagcaaagtcgccgggggtgtggggtgttccacgctatgttgggagtgttcgctttcgagcttattgcaggagtgaccaggacactacctcctagaagtaatgcccacagaaagcgcaagttgttcgactgctcgccaaacaaaacagaagcgcaaatcccatagcctttctatacgaagaactaacagctcggagcaggagaggacgggactgccaagagacatgttagaaggacaagattctaaactgccttcctcggttcgcagtacacttctggaactgtttggtcaaatagaaagagaatttgaaaacctttatatcgaaaacttagaattacgtagagaaatcgacactcttaatgaacgtttagctgctgaaggacaagcgattgatggagcagagctgagtaagggccaactcaaaacaaaagccagtcacagcaccagccagctctcccagaaactgaagaccacttacaaggcttccaccagcaagattgtctccagctttaagaccacgacatcgagagctgcctgccagctcgtgaaggagtacatcggccaccgggacggcatctgggatgtcagcgtggccaagacacagccagtggtgctcgggactgcatcagccgatcacacggctttgctgtggagcatagagacagggaagtgcctagtcaagtacgcaggccacgtgggctcagtaaattctatcaaatttcatccctcagagcagttggctctcactgcttctggagatcagactgctcatatctggagatacgcggtgcagctgccgacaccccagcctgttgctgacactagtatatctggggaagatgaagtagagtgctctgacaaggacgagcccgacctcgatggggatgtgtccagcgactgccccaccatccgcgtcccactgacatccctcaagagccaccagggcgtggtcatcgcctccgactggctggttggggggaagcaggctgtgactgcctcctgggaccggacggcaaacctgtacgacgtggagacgtccgagctcgttcactctctgacagggcacgaccaggagttgacgcactgctgcacacaccccacccagcggctcgtggtgacctcctcccgtgacacgactttccgcctctgggatttcagggacccctccatccactcggtgaatgttttccagggacacacggacactgtgacttctgccgtgttcaccgtgggagacaacgtggtttcaggcagcgatgaccgcacggtgaaagtctgggacttgaaaaatatgagatcccccattgcaactattcgcacggactctgccattaacaggatcaatgtatgtgtcggccaaaaaatcatagccctcccccatgacaaccgacaagtgagactgtttgatatgtcaggagtgcgcctggcgcggcttccccggagcagccgacagggccacaggagaatggtatgctgctcggcatggagtgaagaccaccccgtgtgcaatctgttcacctgtgggtttgaccggcaagccattggttggaacatcaacatccctgcattgctacaagaaaaataaggacaccggcagcccttagtttcactgtttgccagcacagacctttgatgggtgcaggcttttctgcgtattaatcagccatttttgtgagagtttgaccctggaaagggtgctttgtatatgttcttttcacatagtgcccagcttgcatgaaatgtacagagaaatgtgtggtcgtattttttacttttgtcttgtatatgtatgtatattgggtcctctgggcagtagaggcaaagctcacctcccatgtagcacatgaaatgcttgtgagttgttgacattggacaggtgaacagtagggcattacatttgtgtgaattaaatgtgaacttctgtattacgttgcggcgtcggctgtcctgcgttccctggagtaactgtacgtatctgcctttgctgggaagactgtgaggctgcctgtgttggctggcgaccagcaggattgctccaggattttgtgtttacctcgcgtgaagttcagcacgtgctgtcgtgtagtcagcttctactctaatttctgttacagttctgcaaaggtaacctggagtttagaagttaaaaaaaagcatgggatgttggatttgcaccatttggagtttctttaggaaagaaaagttttctgcttttttatagaaaatcatttcagtctcctgaggtctcatgctagcaaattttgaaataggattctaatcactgatttcaaatattaagcaaaatgtaaagcactttaatttatagctatggttataaacaggttttagatgtttcaaatgacttgtccactgaatgtcacttgaccttgataagaggccgcctgcacacagagcccagttaattctccgcacctcggttgtgtgcttccgaatgggctcactcccgtggtggtgtttgagagccaacaacactacctcagagacgggtctttgggaaactttgggtctcactgttgcctggctggagcactttggtttatagctggaatactgagttcagttcagaaggcaggaaagacagtcacaccgacgtgtcctgaaggtgtaggctctccacttaggcgcacaagctgacggctgcagccagcaggccccggtgacgagacacttccaggtcttgtggtggggacgcctctcagtgccagtcccgccactgctgagtgagcctggtgttcttgccttcttggaaattactgctcacctggtatctgtacgttaatgtttcttgctgagttacagttttgataaagaggctctcatttcctgtgtcttgtatattcagtcctttcaatacgtccacctggaggctcaccacttggagagacacaggaaggtaatatttacagctgtcatgtgacatccccaggtctttgtgttttgccctgttttacggtgaggtaggagggaacccatctggggaccggtaggtgcaggtgcagtaggacgtgggacttttggacccgtcctttggtgcagctcgccagggatgagaggcacctccctacttgggtcttcaggagctggtccaaggagcttcgaatctaagtcatctagaatgaccctgaaatgactgacagccccgggcccaagaaaaacccataaccacctcagatggatctgacgtggctaagggacaaacagcaaatatttcagtcattttgattttacaaataaaaaatgtgttgtgtttttgtccgacattatttcctgactgcactgttctgagaatggagtccacctggtccctctggttgattagaatctcaggtttcagctcctgctgtcctgagcgaacttgcctgatgcagggctgtgctgtgtccagatgttgctggggcctcactttttctcttggctggaggtccaattgccagagcctcccacactgcacatacaaaggtctgagcccagggcagcttctggggccactgcacaggccacctgcttgggttcctcggagtttaatttgaaagtctgggtgtcttaggatgatggttaggaacattgaaaaatggctgcaaatagccaaatcaaacttaagaaccagatctctgccagattaaacatttttgaagcttttaaaagtcaatattcctagtggccactgagttccaggcacactggtgccctttactgccacagctgctcaccttgtctggcaaactggagggacctcagaaactggactcctgcatgtccttgggggcgcagccctgtggtgctcaggcagagctctcaggagccggggcaccttgctgttcgctgctgtgtcgtcttctaatgtgagctcatccactgctgctgcagcgtggtgatcaggagtcacagacaagatcggggatggtgtgtgtgtgcgtgtgtgtgtgtgtgtgtgtgcacgtgtgtgtggctaaattaagtcatactgtcaaccacacgtgatctcgtctgaaacagtgtttggaagtgggaacagttttgtcctgtatgctgatgtgtccagaatttcatttaatgatagacggaaaatgtgtggttactgaaaactgtatatgatacagaatttcataagagccatgctgttgggcaaagcaactctttttcaaccactgctcatcagtttctgtagagacaaaaactctgtacatattttggaatctgaagaatcctatgtaaatcatttgttacttaagtctgtgaaaaacatatttctttggaggaaaatgtatgcatttataagtgttccatggaatcagtttttattgtatcgatataattgtctctaagtgttgactgtcttcattgcaatatgaaattcattaaaatgtccatgttccataattactattataaaagctttgtgttattgggagtcttattatttttatagtttttcatgttttgctttggtgaaacattgtgaatgactatataaacatcacgatgagctagaaattgaacaaatataatactggtcactcg

SEQ ID NO: 285620 - DNA, 4462 bp, Homo sapiens
gcggtgtcctgcgcgtcttcgggtcagtacggggggccgcgtcgtagggactcactggcggtgcgcgacctgggctggctccgggggtggcgggcgcagctgctgtgacagcttattgcaggagtgaccaggacactacctcctagaagtaatgcccacagaaagcgcaagttgttcgactgctcgccaaacaaaacagaagcgcaaatcccatagcctttctatacgaagaactaacagctcggagcaggagaggacgggactgccaagagacatgttagaaggacaagattctaaactgccttcctcggttcgcagtacacttctggaactgtttggtcaaatagaaagagaatttgaaaacctttatatcgaaaacttagaattacgtagagaaatcgacactcttaatgaacgtttagctgctgaaggacaagcgattgatggagcagagctgagtaagggccaactcaaaacaaaagccagtcacagcaccagccagctctcccagaaactgaagaccacttacaaggcttccaccagcaagattgtctccagctttaagaccacgacatcgagagctgcctgccagctcgtgaaggagtacatcggccaccgggacggcatctgggatgtcagcgtggccaagacacagccagtggtgctcgggactgcatcagccgatcacacggctttgctgtggagcatagagacagggaagtgcctagtcaagtacgcaggccacgtgggctcagtaaattctatcaaatttcatccctcagagcagttggctctcactgcttctggagatcagactgctcatatctggagatacgcggtgcagctgccgacaccccagcctgttgctgacactagtatatctggggaagatgaagtagagtgctctgacaaggacgagcccgacctcgatggggatgtgtccagcgactgccccaccatccgcgtcccactgacatccctcaagagccaccagggcgtggtcatcgcctccgactggctggttggggggaagcaggctgtgactgcctcctgggaccggacggcaaacctgtacgacgtggagacgtccgagctcgttcactctctgacagggcacgaccaggagttgacgcactgctgcacacaccccacccagcggctcgtggtgacctcctcccgtgacacgactttccgcctctgggatttcagggacccctccatccactcggtgaatgttttccagggacacacggacactgtgacttctgccgtgttcaccgtgggagacaacgtggtttcaggcagcgatgaccgcacggtgaaagtctgggacttgaaaaatatgagatcccccattgcaactattcgcacggactctgccattaacaggatcaatgtatgtgtcggccaaaaaatcatagccctcccccatgacaaccgacaagtgagactgtttgatatgtcaggagtgcgcctggcgcggcttccccggagcagccgacagggccacaggagaatggtatgctgctcggcatggagtgaagaccaccccgtgtgcaatctgttcacctgtgggtttgaccggcaagccattggttggaacatcaacatccctgcattgctacaagaaaaataaggacaccggcagcccttagtttcactgtttgccagcacagacctttgatgggtgcaggcttttctgcgtattaatcagccatttttgtgagagtttgaccctggaaagggtgctttgtatatgttcttttcacatagtgcccagcttgcatgaaatgtacagagaaatgtgtggtcgtattttttacttttgtcttgtatatgtatgtatattgggtcctctgggcagtagaggcaaagctcacctcccatgtagcacatgaaatgcttgtgagttgttgacattggacaggtgaacagtagggcattacatttgtgtgaattaaatgtgaacttctgtattacgttgcggcgtcggctgtcctgcgttccctggagtaactgtacgtatctgcctttgctgggaagactgtgaggctgcctgtgttggctggcgaccagcaggattgctccaggattttgtgtttacctcgcgtgaagttcagcacgtgctgtcgtgtagtcagcttctactctaatttctgttacagttctgcaaaggtaacctggagtttagaagttaaaaaaaagcatgggatgttggatttgcaccatttggagtttctttaggaaagaaaagttttctgcttttttatagaaaatcatttcagtctcctgaggtctcatgctagcaaattttgaaataggattctaatcactgatttcaaatattaagcaaaatgtaaagcactttaatttatagctatggttataaacaggttttagatgtttcaaatgacttgtccactgaatgtcacttgaccttgataagaggccgcctgcacacagagcccagttaattctccgcacctcggttgtgtgcttccgaatgggctcactcccgtggtggtgtttgagagccaacaacactacctcagagacgggtctttgggaaactttgggtctcactgttgcctggctggagcactttggtttatagctggaatactgagttcagttcagaaggcaggaaagacagtcacaccgacgtgtcctgaaggtgtaggctctccacttaggcgcacaagctgacggctgcagccagcaggccccggtgacgagacacttccaggtcttgtggtggggacgcctctcagtgccagtcccgccactgctgagtgagcctggtgttcttgccttcttggaaattactgctcacctggtatctgtacgttaatgtttcttgctgagttacagttttgataaagaggctctcatttcctgtgtcttgtatattcagtcctttcaatacgtccacctggaggctcaccacttggagagacacaggaaggtaatatttacagctgtcatgtgacatccccaggtctttgtgttttgccctgttttacggtgaggtaggagggaacccatctggggaccggtaggtgcaggtgcagtaggacgtgggacttttggacccgtcctttggtgcagctcgccagggatgagaggcacctccctacttgggtcttcaggagctggtccaaggagcttcgaatctaagtcatctagaatgaccctgaaatgactgacagccccgggcccaagaaaaacccataaccacctcagatggatctgacgtggctaagggacaaacagcaaatatttcagtcattttgattttacaaataaaaaatgtgttgtgtttttgtccgacattatttcctgactgcactgttctgagaatggagtccacctggtccctctggttgattagaatctcaggtttcagctcctgctgtcctgagcgaacttgcctgatgcagggctgtgctgtgtccagatgttgctggggcctcactttttctcttggctggaggtccaattgccagagcctcccacactgcacatacaaaggtctgagcccagggcagcttctggggccactgcacaggccacctgcttgggttcctcggagtttaatttgaaagtctgggtgtcttaggatgatggttaggaacattgaaaaatggctgcaaatagccaaatcaaacttaagaaccagatctctgccagattaaacatttttgaagcttttaaaagtcaatattcctagtggccactgagttccaggcacactggtgccctttactgccacagctgctcaccttgtctggcaaactggagggacctcagaaactggactcctgcatgtccttgggggcgcagccctgtggtgctcaggcagagctctcaggagccggggcaccttgctgttcgctgctgtgtcgtcttctaatgtgagctcatccactgctgctgcagcgtggtgatcaggagtcacagacaagatcggggatggtgtgtgtgtgcgtgtgtgtgtgtgtgtgtgtgcacgtgtgtgtggctaaattaagtcatactgtcaaccacacgtgatctcgtctgaaacagtgtttggaagtgggaacagttttgtcctgtatgctgatgtgtccagaatttcatttaatgatagacggaaaatgtgtggttactgaaaactgtatatgatacagaatttcataagagccatgctgttgggcaaagcaactctttttcaaccactgctcatcagtttctgtagagacaaaaactctgtacatattttggaatctgaagaatcctatgtaaatcatttgttacttaagtctgtgaaaaacatatttctttggaggaaaatgtatgcatttataagtgttccatggaatcagtttttattgtatcgatataattgtctctaagtgttgactgtcttcattgcaatatgaaattcattaaaatgtccatgttccataattactattat

SEQ ID NO: 285621 - DNA, 639 bp, Homo sapiens
ttatgaatagacattcatcactatattagttttctgttctgctgtagcaaacttaaacttattttagtggcttaaactaacacagatttgtcatcttgcagttctgtgggtctggtataattcccacgaggactccgtctcaaaagtaaataaataaaaataaaaaataaaaaatacatggatcttatcattttccctacaccaagtacaccataaattgagaaaacattgatttacttttttattaatataccatcatttgaaaattgatgcatatactatatctgacttattaaagacaaatcaaaacaattttgaattagcttggctttaatttatcttttttttattttggaagtaatggccatatgtgcttaaaaatttatcagacagtataaaaagaaatctaccattacccctcaagcccatcgcactcttcaaaggaagacattttctgcatgtttttgcttttggttcttttggtggttagtcctgtgaatgtaagtaatcatcttctggttttagatctatccgctttagtgttaatgcttcacagtgaaataaacaggtcctttgcgctgctctattactttccagttttcctccttcagggtttgtgtttgtaaaatttatatatat

SEQ ID NO: 285622 - DNA, 532 bp, Homo sapiens
cagggcggtccctgaatgcggtctcagaaaagagttatttaagtaaaaagtacattcctctcactaagtggtcactaagctggaaaggtctgactgctgctgcttagccatagtggcggtgaagagcgcattttaccatggtctgtgccttgggtaattttccccgatttctctcttcagcttctggagatcagactgctcatatctggagatacgcggtgcagctgccgacaccccagcctgttgctgacactagtgtaagcacctttccttacctgtgaatgtgtaggatgctgatgtctgcgaatctgagaatccatttatgatatctgtcatggacggaatgtttgtgtccccccaagttcagtgttgaaggcctcacccccggtatggttgaatttggagattgggcctctaaggtagtagttaaggttcagtgaggttgcgtgaggtcctcataagaggagacagtggagagctcacctgtgttctcaatctctctgtcactctccgtgtcacgtaagagcagagc

SEQ ID NO: 285623 - DNA, 505 bp, Homo sapiens
gcatgatcgacgctcggtgccttcatagaggcacggagtgaatgctgtccacgtagttaacgctgtccatgtagttagttaacgctgttcacgtagctcttttctgccttttcacttagagctgtgtgtgtaccagtttcctgaccagactttgtttctgtttcctctcgcacgtgctgtgtggttccttcccccgcagtgccctcttcacttgctcactcgccctccctcacacctccacgctgccaggctgagaggtggcatcgcctgtgtgcacagagggacaggtgtgggtggggcccgtggctctgagcgcctgtctgcccgtccacagggccctgatgagctgtggagccttcccctcccctttcccaggacctcctctcctttggccattcctgctgtcacagtgtcttctctttcttgccctggacatttccccttagtgtgtagacaggctggcgcctttcccgtgttagaccccctcctccgtgctgccttctta

SEQ ID NO: 285624 - DNA, 455 bp, Homo sapiens
ttatgaatagacattcatcactatattagttttctgttctgctgtagcaaacttaaacttattttagtggcttaaactaacacagatttgtcatcttgcagttctgtgggtctggtataattcccacgaggactccgtctcaaaagtaaataaataaaaataaaaaataaaaaatacatggatcttatcattttccctacaccaagtacaccataaattgagaaaacattgatttacttttttattaatataccatcatttgaaaattgatgcatatactatatctgacttattaaagacaaatcaaaacaattttgaattagcttggctttaatttatcttttttttattttggaagtaatggccatatgtgcttaaaaatttatcagacagtataaaaagaaatctaccattaccctgaactttctatcaccacagataaagattttgttttg

SEQ ID NO: 285625 - DNA, 4652 bp, Homo sapiens
agccgaacactgaccgcgccgtccccgccaggctcccgcgcggccggcaccgcggccctgagcgcaggcggccccgggtctcaggcctcaggcggaccgcgccccgggctcgcagccctcccgccccggctgccgggctacggggcagatggactcggagcgccccgccgcttattgcaggagtgaccaggacactacctcctagaagtaatgcccacagaaagcgcaagttgttcgactgctcgccaaacaaaacagaagcgcaaatcccatagcctttctatacgaagaactaacagctcggagcaggagaggacgggactgccaagagacatgttagaaggacaagattctaaactgccttcctcggttcgcagtacacttctggaactgtttggtcaaatagaaagagaatttgaaaacctttatatcgaaaacttagaattacgtagagaaatcgacactcttaatgaacgtttagctgctgaaggacaagcgattgatggagcagagctgagtaagggccaactcaaaacaaaagccagtcacagcaccagccagctctcccagaaactgaagaccacttacaaggcttccaccagcaagattgtctccagctttaagaccacgacatcgagagctgcctgccagctcgtgaaggagtacatcggccaccgggacggcatctgggatgtcagcgtggccaagacacagccagtggtgctcgggactgcatcagccgatcacacggctttgctgtggagcatagagacagggaagtgcctagtcaagtacgcaggccacgtgggctcagtaaattctatcaaatttcatccctcagagcagttggctctcactgcttctggagatcagactgctcatatctggagatacgcggtgcagctgccgacaccccagcctgttgctgacactagtatatctggggaagatgaagtagagtgctctgacaaggacgagcccgacctcgatggggatgtgtccagcgactgccccaccatccgcgtcccactgacatccctcaagagccaccagggcgtggtcatcgcctccgactggctggttggggggaagcaggctgtgactgcctcctgggaccggacggcaaacctgtacgacgtggagacgtccgagctcgttcactctctgacagggcacgaccaggagttgacgcactgctgcacacaccccacccagcggctcgtggtgacctcctcccgtgacacgactttccgcctctgggatttcagggacccctccatccactcggtgaatgttttccagggacacacggacactgtgacttctgccgtgttcaccgtgggagacaacgtggtttcaggcagcgatgaccgcacggtgaaagtctgggacttgaaaaatatgagatcccccattgcaactattcgcacggactctgccattaacaggatcaatgtatgtgtcggccaaaaaatcatagccctcccccatgacaaccgacaagtgagactgtttgatatgtcaggagtgcgcctggcgcggcttccccggagcagccgacagggccacaggagaatggtatgctgctcggcatggagtgaagaccaccccgtgtgcaatctgttcacctgtgggtttgaccggcaagccattggttggaacatcaacatccctgcattgctacaagaaaaataaggacaccggcagcccttagtttcactgtttgccagcacagacctttgatgggtgcaggcttttctgcgtattaatcagccatttttgtgagagtttgaccctggaaagggtgctttgtatatgttcttttcacatagtgcccagcttgcatgaaatgtacagagaaatgtgtggtcgtattttttacttttgtcttgtatatgtatgtatattgggtcctctgggcagtagaggcaaagctcacctcccatgtagcacatgaaatgcttgtgagttgttgacattggacaggtgaacagtagggcattacatttgtgtgaattaaatgtgaacttctgtattacgttgcggcgtcggctgtcctgcgttccctggagtaactgtacgtatctgcctttgctgggaagactgtgaggctgcctgtgttggctggcgaccagcaggattgctccaggattttgtgtttacctcgcgtgaagttcagcacgtgctgtcgtgtagtcagcttctactctaatttctgttacagttctgcaaaggtaacctggagtttagaagttaaaaaaaagcatgggatgttggatttgcaccatttggagtttctttaggaaagaaaagttttctgcttttttatagaaaatcatttcagtctcctgaggtctcatgctagcaaattttgaaataggattctaatcactgatttcaaatattaagcaaaatgtaaagcactttaatttatagctatggttataaacaggttttagatgtttcaaatgacttgtccactgaatgtcacttgaccttgataagaggccgcctgcacacagagcccagttaattctccgcacctcggttgtgtgcttccgaatgggctcactcccgtggtggtgtttgagagccaacaacactacctcagagacgggtctttgggaaactttgggtctcactgttgcctggctggagcactttggtttatagctggaatactgagttcagttcagaaggcaggaaagacagtcacaccgacgtgtcctgaaggtgtaggctctccacttaggcgcacaagctgacggctgcagccagcaggccccggtgacgagacacttccaggtcttgtggtggggacgcctctcagtgccagtcccgccactgctgagtgagcctggtgttcttgccttcttggaaattactgctcacctggtatctgtacgttaatgtttcttgctgagttacagttttgataaagaggctctcatttcctgtgtcttgtatattcagtcctttcaatacgtccacctggaggctcaccacttggagagacacaggaaggtaatatttacagctgtcatgtgacatccccaggtctttgtgttttgccctgttttacggtgaggtaggagggaacccatctggggaccggtaggtgcaggtgcagtaggacgtgggacttttggacccgtcctttggtgcagctcgccagggatgagaggcacctccctacttgggtcttcaggagctggtccaaggagcttcgaatctaagtcatctagaatgaccctgaaatgactgacagccccgggcccaagaaaaacccataaccacctcagatggatctgacgtggctaagggacaaacagcaaatatttcagtcattttgattttacaaataaaaaatgtgttgtgtttttgtccgacattatttcctgactgcactgttctgagaatggagtccacctggtccctctggttgattagaatctcaggtttcagctcctgctgtcctgagcgaacttgcctgatgcagggctgtgctgtgtccagatgttgctggggcctcactttttctcttggctggaggtccaattgccagagcctcccacactgcacatacaaaggtctgagcccagggcagcttctggggccactgcacaggccacctgcttgggttcctcggagtttaatttgaaagtctgggtgtcttaggatgatggttaggaacattgaaaaatggctgcaaatagccaaatcaaacttaagaaccagatctctgccagattaaacatttttgaagcttttaaaagtcaatattcctagtggccactgagttccaggcacactggtgccctttactgccacagctgctcaccttgtctggcaaactggagggacctcagaaactggactcctgcatgtccttgggggcgcagccctgtggtgctcaggcagagctctcaggagccggggcaccttgctgttcgctgctgtgtcgtcttctaatgtgagctcatccactgctgctgcagcgtggtgatcaggagtcacagacaagatcggggatggtgtgtgtgtgcgtgtgtgtgtgtgtgtgtgtgcacgtgtgtgtggctaaattaagtcatactgtcaaccacacgtgatctcgtctgaaacagtgtttggaagtgggaacagttttgtcctgtatgctgatgtgtccagaatttcatttaatgatagacggaaaatgtgtggttactgaaaactgtatatgatacagaatttcataagagccatgctgttgggcaaagcaactctttttcaaccactgctcatcagtttctgtagagacaaaaactctgtacatattttggaatctgaagaatcctatgtaaatcatttgttacttaagtctgtgaaaaacatatttctttggaggaaaatgtatgcatttataagtgttccatggaatcagtttttattgtatcgatataattgtctctaagtgttgactgtcttcattgcaatatgaaattcattaaaatgtccatgttccataattactattataaaagctttgtgttattgggagtcttattatttttatagtttttcatgttttgctttggtgaaacattgtgaatgactatataaacatcacgatgagctagaaattgaacaaatataatactggtcactcg

SEQ ID NO: 285626 - DNA, 1225 bp, Homo sapiens
agccgaacactgaccgcgccgtccccgccaggctcccgcgcggccggcaccgcggccctgagcgcaggcggccccgggtctcaggcctcaggcggaccgcgccccgggctcgcagccctcccgccccggctgccgggctacggggcagatggactcggagcgccccgccgcttattgcaggagtgaccaggacactacctcctagaagtaatgcccacagaaagcgcaagttgttcgactgctcgccaaacaaaacagaagcgcaaatcccatagcctttctatacgaagaactaacagctcggagcaggagaggacgggactgccaagagacatgttagaaggacaagattctaaactgccttcctcggttcgcagtacacttctggaactgtttggtcaaatagaaagagaatttgaaaacctttatatcgaaaacttagaattacgtagagaaatcgacactcttaatgaacgtttagctgctgaaggacaagcgattgatggagcagagctgagtaagggccaactcaaaacaaaagccagtcacagcaccagccagctctcccagaaactgaagaccacttacaaggcttccaccagcaagattgtctccagctttaagaccacgacatcgagagctgcctgccagctcgtgaaggagtacatcggccaccgggacggcatctgggatgtcagcgtggccaagacacagccagtggtgctcgggactgcatcagccgatcacacggctttgctgtggagcatagagacagggaagtgcctagtcaagtacgcaggccacgtgggctcaggtaagcactgcctaaggagtgccgtagccagaggccgttgccttctccagtgtgtttttaaaatcgtgcatgataaagccagctgctactgtgtaggaagccttactgtttcggttgtcaggggacagtgtggtctgttcagagactgggataactctgtcttgagcttgtatgggctcaataacagggaaaagcttaactccctaaacaatgtacatatcatgttagtctgcattttatttaatattgtatataacccatatgtaggaaattttgtaactgaaatgtgtgcgttatttttcacaaaatacatatctgttttagaggtttacttttgatgtagtgataacttggatgtattcaataaaggatactccatgaatgtgcttgcgtgcccgtagttaatgctgt

SEQ ID NO: 285627 - DNA, 4438 bp, Homo sapiens
agctcagaggtctccaagccgcacggcctcgtcctctgctccacctttggcctgtgtctcccacgctcgctccctagacggagctcatttgttcaatgagcagtgattcggagtgggaccggtcagcatgttctgattctaaactgccttcctcggttcgcagtacacttctggaactgtttggtcaaatagaaagagaatttgaaaacctttatatcgaaaacttagaattacgtagagaaatcgacactcttaatgaacgtttagctgctgaaggacaagcgattgatggagcagagctgagtaagggccaactcaaaacaaaagccagtcacagcaccagccagctctcccagaaactgaagaccacttacaaggcttccaccagcaagattgtctccagctttaagaccacgacatcgagagctgcctgccagctcgtgaaggagtacatcggccaccgggacggcatctgggatgtcagcgtggccaagacacagccagtggtgctcgggactgcatcagccgatcacacggctttgctgtggagcatagagacagggaagtgcctagtcaagtacgcaggccacgtgggctcagtaaattctatcaaatttcatccctcagagcagttggctctcactgcttctggagatcagactgctcatatctggagatacgcggtgcagctgccgacaccccagcctgttgctgacactagtatatctggggaagatgaagtagagtgctctgacaaggacgagcccgacctcgatggggatgtgtccagcgactgccccaccatccgcgtcccactgacatccctcaagagccaccagggcgtggtcatcgcctccgactggctggttggggggaagcaggctgtgactgcctcctgggaccggacggcaaacctgtacgacgtggagacgtccgagctcgttcactctctgacagggcacgaccaggagttgacgcactgctgcacacaccccacccagcggctcgtggtgacctcctcccgtgacacgactttccgcctctgggatttcagggacccctccatccactcggtgaatgttttccagggacacacggacactgtgacttctgccgtgttcaccgtgggagacaacgtggtttcaggcagcgatgaccgcacggtgaaagtctgggacttgaaaaatatgagatcccccattgcaactattcgcacggactctgccattaacaggatcaatgtatgtgtcggccaaaaaatcatagccctcccccatgacaaccgacaagtgagactgtttgatatgtcaggagtgcgcctggcgcggcttccccggagcagccgacagggccacaggagaatggtatgctgctcggcatggagtgaagaccaccccgtgtgcaatctgttcacctgtgggtttgaccggcaagccattggttggaacatcaacatccctgcattgctacaagaaaaataaggacaccggcagcccttagtttcactgtttgccagcacagacctttgatgggtgcaggcttttctgcgtattaatcagccatttttgtgagagtttgaccctggaaagggtgctttgtatatgttcttttcacatagtgcccagcttgcatgaaatgtacagagaaatgtgtggtcgtattttttacttttgtcttgtatatgtatgtatattgggtcctctgggcagtagaggcaaagctcacctcccatgtagcacatgaaatgcttgtgagttgttgacattggacaggtgaacagtagggcattacatttgtgtgaattaaatgtgaacttctgtattacgttgcggcgtcggctgtcctgcgttccctggagtaactgtacgtatctgcctttgctgggaagactgtgaggctgcctgtgttggctggcgaccagcaggattgctccaggattttgtgtttacctcgcgtgaagttcagcacgtgctgtcgtgtagtcagcttctactctaatttctgttacagttctgcaaaggtaacctggagtttagaagttaaaaaaaagcatgggatgttggatttgcaccatttggagtttctttaggaaagaaaagttttctgcttttttatagaaaatcatttcagtctcctgaggtctcatgctagcaaattttgaaataggattctaatcactgatttcaaatattaagcaaaatgtaaagcactttaatttatagctatggttataaacaggttttagatgtttcaaatgacttgtccactgaatgtcacttgaccttgataagaggccgcctgcacacagagcccagttaattctccgcacctcggttgtgtgcttccgaatgggctcactcccgtggtggtgtttgagagccaacaacactacctcagagacgggtctttgggaaactttgggtctcactgttgcctggctggagcactttggtttatagctggaatactgagttcagttcagaaggcaggaaagacagtcacaccgacgtgtcctgaaggtgtaggctctccacttaggcgcacaagctgacggctgcagccagcaggccccggtgacgagacacttccaggtcttgtggtggggacgcctctcagtgccagtcccgccactgctgagtgagcctggtgttcttgccttcttggaaattactgctcacctggtatctgtacgttaatgtttcttgctgagttacagttttgataaagaggctctcatttcctgtgtcttgtatattcagtcctttcaatacgtccacctggaggctcaccacttggagagacacaggaaggtaatatttacagctgtcatgtgacatccccaggtctttgtgttttgccctgttttacggtgaggtaggagggaacccatctggggaccggtaggtgcaggtgcagtaggacgtgggacttttggacccgtcctttggtgcagctcgccagggatgagaggcacctccctacttgggtcttcaggagctggtccaaggagcttcgaatctaagtcatctagaatgaccctgaaatgactgacagccccgggcccaagaaaaacccataaccacctcagatggatctgacgtggctaagggacaaacagcaaatatttcagtcattttgattttacaaataaaaaatgtgttgtgtttttgtccgacattatttcctgactgcactgttctgagaatggagtccacctggtccctctggttgattagaatctcaggtttcagctcctgctgtcctgagcgaacttgcctgatgcagggctgtgctgtgtccagatgttgctggggcctcactttttctcttggctggaggtccaattgccagagcctcccacactgcacatacaaaggtctgagcccagggcagcttctggggccactgcacaggccacctgcttgggttcctcggagtttaatttgaaagtctgggtgtcttaggatgatggttaggaacattgaaaaatggctgcaaatagccaaatcaaacttaagaaccagatctctgccagattaaacatttttgaagcttttaaaagtcaatattcctagtggccactgagttccaggcacactggtgccctttactgccacagctgctcaccttgtctggcaaactggagggacctcagaaactggactcctgcatgtccttgggggcgcagccctgtggtgctcaggcagagctctcaggagccggggcaccttgctgttcgctgctgtgtcgtcttctaatgtgagctcatccactgctgctgcagcgtggtgatcaggagtcacagacaagatcggggatggtgtgtgtgtgcgtgtgtgtgtgtgtgtgtgtgcacgtgtgtgtggctaaattaagtcatactgtcaaccacacgtgatctcgtctgaaacagtgtttggaagtgggaacagttttgtcctgtatgctgatgtgtccagaatttcatttaatgatagacggaaaatgtgtggttactgaaaactgtatatgatacagaatttcataagagccatgctgttgggcaaagcaactctttttcaaccactgctcatcagtttctgtagagacaaaaactctgtacatattttggaatctgaagaatcctatgtaaatcatttgttacttaagtctgtgaaaaacatatttctttggaggaaaatgtatgcatttataagtgttccatggaatcagtttttattgtatcgatataattgtctctaagtgttgactgtcttcattgcaatatgaaattcattaaaatgtccatgttccataattactattataaaagctttgtgttattgggagtcttattatttttatagtttttcatgttttgctttggtgaaacattgtgaatgactatataaacatcacgatgagctagaaattgaacaaatataatactggtcactcg

SEQ ID NO: 285628 - DNA, 493 bp, Homo sapiens
agccgaacactgaccgcgccgtccccgccaggctcccgcgcggccggcaccgcggccctgagcgcaggcggccccgggtctcaggcctcaggcggaccgcgccccgggctcgcagccctcccgccccggctgccgggctacggggcagatggactcggagcgccccgccgcttattgcaggagtgaccaggacactacctcctagaagtaatgcccacagaaagcgcaagttgttcgactgctcgccaaacaaaacagaagcgcaaatcccatagcctttctatacgaagaactaacagctcggagcaggagaggacgggactgccaagagacatgttagaaggacaagattctaaactgccttcctcggttcgcagtacacttctggaactgtttggtcaaatagaaagagaatttgaaaacctttatatcgaaaacttagaatgtgagtatctcctattttaatatacttttatagctttacctatccata

SEQ ID NO: 285629 - DNA, 610 bp, Homo sapiens
tatttgtcttattctttcatttgaaaaactataaactgatgatagctaagttccgacttcttcatttccatcttgcagatcacacggctttgctgtggagcatagagacagggaagtgcctagtcaagtacgcaggccacgtgggctcaggtaagcactgcctaaggagtgccgtagccagaggccgttgccttctccagtgtgtttttaaaatcgtgcatgataaagccagctgctactgtgtaggaagccttactgtttcggttgtcaggggacagtgtggtctgttcagagactgggataactctgtcttgagcttgtatgggctcaataacagggaaaagcttaactccctaaacaatgtacatatcatgttagtctgcattttatttaatattgtatataacccatatgtaggaaattttgtaactgaaatgtgtgcgttatttttcacaaaatacatatctgttttagaggtttacttttgatgtagtgataacttggatgtattcaataaaggatactccatgaatgtgcttgcgtgcccgtagttaatgctgtccacggagtgaatgctgtccacgtagttaacgctgtccatgtagttagt

SEQ ID NO: 285630 - DNA, 524 bp, Homo sapiens
atcccatatcatactaggtagccatttatacaatttgatttatagtctccttggcagaaatttggaactttaaactctttaagcattttatatataaaaatatgtaataatacaaaataagagtttacaataaaagataattcactttggaaaaagcatatttgtacttagagtttttcattcattcattcattttaaacaaagtcttcttctgcaggattctaaactgccttcctcggttcgcagtacacttctggaactgtttggtcaaatagaaagagaatttgaaaacctttatatcgaaaacttagaatgtgagtatctcctattttaatatacttttatagctttacctatccatagtcaaatttatgaatagacattcatcactatattagttttctgttctgctgtagcaaacttaaacttattttagtggcttaaactaacacagatttgtcatcttgcagttctgtgggtctggtataattcccacgaggactccgtctcaaaagtaaataaat

SEQ ID NO: 285631 - DNA, 964 bp, Homo sapiens
accccgctcacctgcaccagcctccggagcagggggctgcggctgcgggcgccgctgcgcagaagtgccgccagcacagccatggtcgcagagggctgagtatcggctccacaggcgtagactagcggcctcctccccaaccccgcacccctagcggcccggcgcgggcaccgcccatcccgcttcctccaatagtcgcctctcagtcggcggcgattggccggcagccaagggcggggcggagcctggcgctgggacaccgcagcctgggccaggaaaggttgacgagtgaaggacgtggatggagacactggcgctggggtcaacgagcacctgacacgctgctggctcccgtgtccaccaagtctaacctgccggggccggtggtttatgtataagtagagcaaatcaaagtttggatcagcgctcctgaagttaggccatgaccaatccacaaagcaagctgttactcattttacgcactccaggacatcactattaaagatttctaagcttgggttatatccctgctcggcaccaattttaagtgtacgttggagagaagagacctgaataaaggatgccaactgtgattccagacctttacaaactgctggtgactgattcaaacctgaggctacaaatccctaatcatgagaccttaaaataccaaaatacttctatgctacagattaagagatcagttacataactatatcagagcaggagatttctgtgttgtttttaataaattcagatatggcataataaatattaggtatataaacattaagtgtgttagtaaacacacaatatgtttagtaaacacacttaatatgtttgttttgctattttggctctgcaatcataatgacctacctatctccataaattttttaaactattgaagcaacaattaatataagcttcatttttcaaaacaagctttccagccatatttaaa

SEQ ID NO: 285632 - DNA, 1789 bp, Homo sapiens
gatagctgcagcgactctcttaatttccccgctcagggggaggctggattttcttttcacttaactgcaggttatatccctgctcggcaccaattttaagtgtacgttggagagaagagacctgaataaaggatgccaactgtgattccagacctttacaaactgctggtaagattttttttttcatttttttttaaattagcaaatctgttgttaaattacttaaagaaaatttaacaatggcataggcaccttgtcaactaaatgattttcataaacaccaaaaagtagttaaaacttttgtatacataaccaaaaaaaaaaaaaaagaaaactgtacatttacagtatttgctgctgttcattccccaaaatacaattaggacataattggctattaaaaatttataaaatttaataaaaaactttgctatgaatgtagtgttacccacttttgcattaaattcaccttcataaatcaaaacatcatgactctcattcttaaattaaatgacccaaaattagaagttccaaaaaagttctgagaacaattatggtttaaaacaacaaacctaaatttttaaaatggacggcaatttttcctgtttcctcctttggcattcttgtattgggacaagcaaatacgccaatgctgaattatctgttaaacataagggccacaattactacaaaattatttcttctaaattccaaatatacccattatgaacagtcacctaattagagaaaactgtacgtattaattttagtttaattcttcacaatatgctcggtctaataattgacatttgctaccttaaagtgtaaaattttaaacaaaattccaatttcctataagtttcagaacaggcatttggctatactcagcaaaactctaaatgttttaaagttgctttccttccattcagcaggcagttcacaaagcctcttcggatggggacagatcctacgaaatgctcttgaaagcactccactgtaacataatactgtatgcctttctgtactccatttcctactatcttcaaaaaccatactttaaaaatattacttaacatcaaataagatataaaataatttgcaagaaaatttgaaacgtgcaccacaatgaataaaaatccacgttgagccattctttcctcaaggggaatcaattttctctttcaagttgttcacgtcctcaagtcctaaaatttccactactctgggtattcagttgccagcaactagttaagttgctactttggatagactgaaaggaacatggtaaatgttgccttctgacgatttaaaaaatgtttatttttaaaatatataaatatatatgtacatatatttggcaagtttactgctcgtattaagagtgcaacaattttgcttctgtttttcaggtcttatgttgtggtttttctcttacccctaggtgactgattcaaacctgaggctacaaatccctaatcatgagaccttaaaataccaaaatacttctatgctacagattaagagatcagttacataactatatcagagcaggagatttctgtgttgtttttaataaattcagatatggcataataaatattaggtatataaacattaagtgtgttagtaaacacacaatatgtttagtaaacacacttaatatgtttgttttgctattttggctctgcaatcataatgacctacctatctccataaattttttaaactattgaagcaacaattaatataagcttcatttttcaaaacaagctttccagccatatttaaa

SEQ ID NO: 285633 - DNA, 1025 bp, Homo sapiens
gatagctgcagcgactctcttaatttccccgctcagggggaggctggattttcttttcacttaactgcaggttatatccctgctcggcaccaattttaagtgtacgttggagagaagagacctgaataaaggatgccaactgtgattccagacctttacaaactgctggcagttcacaaagcctcttcggatggggacagatcctacgaaatgctcttgaaagcactccactgtaacataatactgtatgcctttctgtactccatttcctactatcttcaaaaaccatactttaaaaatattacttaacatcaaataagatataaaataatttgcaagaaaatttgaaacgtgcaccacaatgaataaaaatccacgttgagccattctttcctcaaggggaatcaattttctctttcaagttgttcacgtcctcaagtcctaaaatttccactactctgggtattcagttgccagcaactagttaagttgctactttggatagactgaaaggaacatggtaaatgttgccttctgacgatttaaaaaatgtttatttttaaaatatataaatatatatgtacatatatttggcaagtttactgctcgtattaagagtgcaacaattttgcttctgtttttcaggtcttatgttgtggtttttctcttacccctaggtgactgattcaaacctgaggctacaaatccctaatcatgagaccttaaaataccaaaatacttctatgctacagattaagagatcagttacataactatatcagagcaggagatttctgtgttgtttttaataaattcagatatggcataataaatattaggtatataaacattaagtgtgttagtaaacacacaatatgtttagtaaacacacttaatatgtttgttttgctattttggctctgcaatcataatgacctacctatctccataaattttttaaactattgaagcaacaattaatataagcttcatttttcaaaacaagctttccagccatatttaaa

SEQ ID NO: 285634 - DNA, 189 bp, Homo sapiens
agggaggagttatctggtccagaaaggggatcgtgacctttccccagattgggacagggagtgggactgtgatattctcttagctgcagggtaccttgggtagtaggctgtgtagtacttgtcttccggatggaacttgtttgacttctccgtgcatcagaagctctgggctacaccctagaccagtcc

SEQ ID NO: 285635 - DNA, 1636 bp, Homo sapiens
  misc_feature (1589)..(1589): n is a, c, g, or t
  misc_feature (1615)..(1615): n is a, c, g, or t
  misc_feature (1617)..(1621): n is a, c, g, or t
  misc_feature (1623)..(1623): n is a, c, g, or t
  misc_feature (1625)..(1626): n is a, c, g, or t
  misc_feature (1630)..(1631): n is a, c, g, or t
  misc_feature (1635)..(1635): n is a, c, g, or t
cccccgctccagcctggagatgacatcaggtttggaagcttgaagtcctgctccagagaaaggaagcaagacctgaaaagtcatcccaggtagagggcaggatggacctgtggtctgagtctttgtgctggttgtgtccttccctgccacctggtctctaaccgtggagaaagacacaggcctctgcctaagctgaggaaaggtcaaaactagcttttcaggaggacggggagcatagataggacagtgttggggcctgaacacatcatggtagaggactcatagtagtgggtgttgatccccagcagaagggctaaagggggaatgagtctccagcaccatgtctggtttgtctggcccaccagcccggcatggcccttgtccatcggcgttgctgcttttgttcctgctgggccccagcttggtcctcgccatctccttccatctgtccattaattctcacaactgcttccatgaggagatccacaaggacctactagtgactggcacatacgagatctctgaccagtctgggggcactggtggcctgtgcagccacctcaagatcacagattctgctggccatattttctactccaaaaagaatacaaccaaggggaaatttgcctttaccactgaagattatgacatgtttgaagtgtgttttgagagcaaggaaacagggcagatacctgaccaacttgtgatcctagacatgaagcatggagtggaggtgaaaaattacagagagattgcaaaagttgagaagctcaaaccattagaggtgaagctgcgacacctagaagacctttcagaatctattgttaatgattttgcctacatgaagaagagagaagaggagatggtgataccagtgagtcaacaaacacttgggtcctacacttcagcatcttttcaatgttctgcctcactggactagccacctggcaggtcttctacctgtgatgcttcttcaaggctaagaagttgattgagtaatgaataaggcatattctcctcccaccttttaccacagccagcagaacatcgctgggatgggcctggcctaaggcatcctaccagcagcaccatcaaggcatgtaggagctttcttgccagaaatgatctcttttggtgtgcgaggacatggggtaccacctacacccaacaagtcaatgagggacttctttttaatttggtaggattttgactggttttgcaacaacaggtctattattagagtcacctatgacaaaaaaaagggttacctagataatgccaaagtcagcatttgtcctgggttcccttgtgtgatctgtttgaaccaagttttcttttcttctcccacttgctcagcagtttgggcttccattctagttcttttaccaagatttttgtgtgaccaagttgacttcattcggattgccttctttcaatttccttgtgaaaacactcttaactttctctttacccttagctgaaatgtttacgtagcttctggtgatatcttttcatgattttatgtctcttaaaatggtgatggatgtgacacttcataaaagtgagctttaaactgtagataactcttnaagaaaatgtcattttagacaattanannnnntntnntcanntgtng

SEQ ID NO: 285636 - DNA, 3404 bp, Homo sapiens
acgggcggccggatttgcccggaggccgcacccgcctccggcggggctctcagtgaaaaatgtactctgacctgaatcctgaattttccttgatggtcaaaagattaagaaatcatgagtggaggatctcaagtccacattttttggggtgctccaattgctccactgaaaatcacagtatcagaagacacagcttctttaatgtctgttgctgacccctggaaaaaaattcagcttttatacagtcaacattctttatatctgaaggatgaaaaacagcacaaaaatcttgaaaactataaagtcccagaatctattggttctccagatcttagtggtcatttcttagcaaactgtatgaatagacatgttcatgtgaaagatgactttgtacgttctgtttctgaaacacagaatatagaatcccagaagattcactcctctagactgagtgatataactagctctaatatgcaaatatgtggatttaaaagcacagttccgcatttcaccgaagaagaaaagtatcaaaagcttctcagtgaaaataaaattagagatgaacagcctaaacatcagccagatatatgtggtaagaactttaacacaaatttgtttcagttgggccataaatgtgcagctgtgttggatttggtttgtagtactgaaaaaattaatatagggcctgaagtggtacaaagagagtgtgtgccaacagaatatcatgaaatacaaaaccagtgtttgggattattttcctcgaacgcagtagataagtcaaggtctgaagcagcagttaggaaggtctcagaccttaaaatatcaactgatacagaatttctcagtataattacctccagccaggttgcttttttagctcaaaagaaagataaaaggcggagtcctgtaaataaagggaatgtaaacatggagactgaaccaaaggcaagttacggggagataagaatacctgaagagaattcgattcagcttgatggttttacagaagcatatgaaagtggacaaaaccaagcatattcccttgaactttttagtcctgtttgtcctaaaacagaaaatagccgcattcacataaactctgataaaggtcttgaagaacatacaggatctcaagaacttttcagttctgaagatgaactgccaccaaatgagatacgtattgagttgtgtagctcaggaatactgtgttcccaactaaataccttccacaaaagtgctattaaaagaagctgtacctctgaagataaagtgggccagtctgaagctctatctagagtccttcaagtagctaagaaaatgaagttgatttctaatggaggagattctgctgtagaaatggatcggagaaatgtgtctgaatttaagagtattaaaaaaacatcattaataaaaaactgtgattctaaaagccagaagtataattgtttagtcatggtgctatctccatgccatgtgaaggaaataaacataaaattcggaccaaattctggctctaaagtgcctttagcaacagttacagtaattgatcaatcagaaactaagaagaaggtttttctgtggaggactgcagcattttgggcatttacagtgtttcttggagatataattttactcacagatgttgttattcatgaggaccaatggattggcgagacagtactacaatcaacatttagcagtcagttattaaatcttgggagttattcatctattcagcctgaagaatattccagtgtagttagtgaagttgtacttcaagacttactggcatatgtgtcctcaaaacattcctacctcagagatcttcctccgaggcagcctcagagggtgaacagtatagactttgtagaattggagcaccttcaacctgatgtattagtccacgcagtactaagagttgttgatttcactatactgacagaggcagtatacagttatagaggacagaagcagaaaaaagttatgttaacagtggaacaggcccaagatcaacattatgcgcttgtattatggggtcctggagcagcctggtaccctcaacttcaaaggaaaaaaggagtggttctgattaaagcccagatttcagagctggcatttcctattacagcatctcagaagatagcgctaaatgctcacagttctctgaagagtattttttcttctcttcccaacatcgtatatactggctgtgcaaaatgtggattggaactagaaacagatgagaacaggatctacaaacaatgttttagctgcttgccatttactatgaagaaaatatattataggccagcgttaatgactgccattgatggaagacatgatgtttgtatccgtgtagaatcaaagctgatagagaagattcttctcaacatttctgcagactgcctcaacagagtgatagttccttcctcagagatcacctatgggatggtcgtggcagacctgttccactccttgttggcagtcagcgcagaaccttgtgtattaaagattcagagcctttttgtgttagatgaaaacagctatccattacaacaagatttctccctcctggatttttatcctgacattgtaaagcatggagccaatgcccgtctctgaggccagaggaagaaattgcaggcatttcaaggaagaagtactgaaatgatttgtcttttgaaataaatgaatgacagggcttttgctttggattttttatgaaatatattttacaaagagaattgcactagatatataaattaaaacttttttctaagaaaatcctgtgaggtttaaaaagattgtttttgtcttttggtttcttcctttctcctggagaaatgatctaccagtcaaggcaatatgtagcagatccctgggaattaaaggtttgcccatttgttcactgtatttagtccctgctacattccaggcattgtactaagtatggggaaccacagagaagacattccctcagaaactgctgcagtgctttcgcttatccctacctaaaaaaccgtcaatgtgaaatcatttccttgattataactataatgataatggattagtttatataaacctatgtttagacaagttcaagacaagcgtgtctttctataaaaagtattgaaaatgaaggaaatgagatcatgtttcaatttattaaagcagggaagagcgttctgtggttagttcgtgtctaggatttgagtgccttactgaatgcatttaccagcaaacatgtagcaatctgttctctcattgtgattgtggaagaagctcatgtaaaatgatagtcattaatgaggaagtatggcgtggtacttattctgtaagttcagagtatgctgagtgttaatagattatcatattgcctgaaaataaattcatgatgacatgaa

SEQ ID NO: 285637 - DNA, 2157 bp, Homo sapiens
  misc_feature (46)..(46): n is a, c, g, or t
  misc_feature (107)..(107): n is a, c, g, or t
  misc_feature (153)..(153): n is a, c, g, or t
  misc_feature (356)..(356): n is a, c, g, or t
  misc_feature (374)..(374): n is a, c, g, or t
  misc_feature (391)..(391): n is a, c, g, or t
  misc_feature (596)..(597): n is a, c, g, or t
  misc_feature (772)..(772): n is a, c, g, or t
  misc_feature (832)..(832): n is a, c, g, or t
  misc_feature (972)..(972): n is a, c, g, or t
  misc_feature (994)..(994): n is a, c, g, or t
  misc_feature (997)..(998): n is a, c, g, or t
  misc_feature (1164)..(1164): n is a, c, g, or t
  misc_feature (1170)..(1170): n is a, c, g, or t
cttttttgcataatgtaaattagtctttatctcttagagaagcatnattctcatatcacatatacttcagtgttttgtccattcttgagacaattaaagttgtactncttggcattaattagattgtgatcataagtcaaaatgtcattggtnataaagtggtcatcagaccatgcagactattactaatattggttatgttttagtttattgcagtgaaaatacaaaatttaaaagttattgtagagaattatcataccccccaaaatatgtcattggtcctccaggactctgtagtccccatccaagaaagactgtgataattgtcaaggggttagtacggtctgagcatggtngatggtgctctgtcattntggtattgaacaacctnccaaatgtcttgattacatgtcctaaaaaagtgaggggaagagtgtaggacaaatgcaaaataaaataacacatttagctatacttttagtattttttattattgagattcaatatttaagtgaccgattcaagattcttttatataaaaaatgaatatatgcataagtaactgtgataagaactgtggatggataagagcactnntctgatgtactgcagcataaccagaactgctgtcggtctgaacggtgtgttatctgggcctgtttcttgtgtcagggggatcacatgccgtcactctggagtgcctcaatagcttgtaactagaaagagaaggtatagaaagagtagtttacttacctgtttatttatttagagncagagtcttgctctgttgcccaggctggagtgcagtggcacaatctcagctcattgcaanctctacctcctgggttcaagcaaatctcctgcctcagcttcccgagtagctgggattacaggcatgtgccaccactcccggctaatttttgtatttttagtagagacagggttttactgtgttggccaggcatgtctcgnactcctgacctcaagtaatccngcnncctccgtctcccagagtgctgggattacaggtgtgagccaccgctactggacgggaggagaaatttaaaatgggtttgagacttgaggaaccaaaagaaacaatgaaaccattcaatgtgtgtgctcctgtcaagctagcagcgatcttgggagctctgtgttttngtcttntgcagttccttcctcagagatcacctatgggatggtcgtggcagacctgttccactccttgttggcagtcagcgcagaaccttgtgtattaaagattcagagcctttttgtgttagatgaaaacagctatccattacaacaagatttctccctcctggatttttatcctgacattgtaaagcatggagccaatgcccgtctctgaggccagaggaagaaattgcaggcatttcaaggaagaagtactgaaatgatttgtcttttgaaataaatgaatgacagggcttttgctttggattttttatgaaatatattttacaaagagaattgcactagatatataaattaaaacttttttctaagaaaatcctgtgaggtttaaaaagattgtttttgtcttttggtttcttcctttctcctggagaaatgatctaccagtcaaggcaatatgtagcagatccctgggaattaaaggtttgcccatttgttcactgtatttagtccctgctacattccaggcattgtactaagtatggggaaccacagagaagacattccctcagaaactgctgcagtgctttcgcttatccctacctaaaaaaccgtcaatgtgaaatcatttccttgattataactataatgataatggattagtttatataaacctatgtttagacaagttcaagacaagcgtgtctttctataaaaagtattgaaaatgaaggaaatgagatcatgtttcaatttattaaagcagggaagagcgttctgtggttagttcgtgtctaggatttgagtgccttactgaatgcatttaccagcaaacatgtagcaatctgttctctcattgtgattgtggaagaagctcatgtaaaatgatagtcattaatgaggaagtatggcgtggtacttattctgtaagttcagagtatgctgagtgttaatagattatcatattgcctgaaaataaattcatgatgacatgaa

SEQ ID NO: 285638 - DNA, 1114 bp, Homo sapiens
agctagcgagcgagaggcagccgcgcccgccgccgcccctgctctgtatgccgctctctcccggcgcggccgccgccgatcacagcagcaggagccgccgccgccgcggttgatgtggttgggccggggctgaggaggccgccaagatgccgcagtcaaagtcccggaagatcgcgatcctgggctaccggtctgtggggaaatcctcattgacgattcaatttgttgaaggccaatttgtggactcctacgatccaaccatagaaaacacttttacaaagttgatcacagtaaatggacaagaatatcatctttaacttgtagacacagccgggcaagatgaatattctatctttcctcagacatactccatagatattaatggctatattcttgtgtattctgttacatcaatcaaaagttttgaagtgattaaagttatccatggcaaattgttggatatggtggggaaagtacaaatacctattatgttggttggaaataagaaagacctgcatatggaaagggtgatcagttatgaagaagggaaagctttggcagaatcttggaatgcagcttttttggaatcttctgctaaagaaaatcagactgctgttgatgtttttcgaaggatgattttggaggcagaaaaaatggacggggcagcttcacaaggcaagtcttcatgctcggtgatgtgattctgctgcaaagccccgaggacactgggaatatattcctagctgaagaagcaaactgcccgttctccttggagataaactatgcttcttttttcttctgttaacctgaaagatatcatttgggtcagagctcccctcccttcagattatgttaactctgagtctgtccaaatgagttcacttccattttcaaattttaagcaatcatattttcaatttatatattgtatttcttaatattatgaccaagaattttattggcattaatttttcagtgtagtttgttgtttaaaataatgtaatcatcaaaatgatgcatattgttacactactattaactaggcttcaatatatcagtgtttatttcattgtgttaaatgtatacttgcaaataaaatagctgcaaacctcaa

SEQ ID NO: 285639 - DNA, 3611 bp, Homo sapiens
acgggcggccggatttgcccggaggccgcacccgcctccggcggggctctcagtgaaaaatgtactctgacctgaatcctgaattttccttgatggtcaaaagattaagaaatcatgagtggaggatctcaagtccacattttttggggtgctccaattgctccactgaaaatcacagtatcagaagacacagcttctttaatgtctgttgctgacccctggaaaaaaattcagcttttatacagtcaacattctttatatctgaaggatgaaaaacagcacaaaaatcttgaaaactataaagtcccagaatctattggttctccagatcttagtggtcatttcttagcaaactgtatgaatagacatgttcatgtgaaagatgactttgtacgttctgtttctgaaacacagaatatagaatcccagaagattcactcctctagactgagtgatataactagctctaatatgcaaatatgtggatttaaaagcacagttccgcatttcaccgaagaagaaaagtatcaaaagcttctcagtgaaaataaaattagagatgaacagcctaaacatcagccagatatatgtggtaagaactttaacacaaatttgtttcagttgggccataaatgtgcagctgtgttggatttggtttgtagtactgaaaaaattaatatagggcctgaagtggtacaaagagagtgtgtgccaacagaatatcatgaaatacaaaaccagtgtttgggattattttcctcgaacgcagtagataagtcaaggtctgaagcagcagttaggaaggtctcagaccttaaaatatcaactgatacagaatttctcagtataattacctccagccaggttgcttttttagctcaaaagaaagataaaaggcggagtcctgtaaataaagggaatgtaaacatggagactgaaccaaaggcaagttacggggagataagaatacctgaagagaattcgattcagcttgatggttttacagaagcatatgaaagtggacaaaaccaagcatattcccttgaactttttagtcctgtttgtcctaaaacagaaaatagccgcattcacataaactctgataaaggtcttgaagaacatacaggatctcaagaacttttcagttctgaagatgaactgccaccaaatgagatacgtattgagttgtgtagctcaggaatactgtgttcccaactaaataccttccacaaaagtgctattaaaagaagctgtacctctgaagataaagtgggccagtctgaagctctatctagagtccttcaagtagctaagaaaatgaagttgatttctaatggaggagattctgctgtagaaatggatcggagaaatgtgtctgaatttaagagtattaaaaaaacatcattaataaaaaactgtgattctaaaagccagaagtataattgtttagtcatggtgctatctccatgccatgtgaaggaaataaacataaaattcggaccaaattctggctctaaagtgcctttagcaacagttacagtaattgatcaatcagaaactaagaagaaggtttttctgtggaggactgcagcattttgggcatttacagtgtttcttggagatataattttactcacagatgttgttattcatgaggaccaatggattggcgagacagtactacaatcaacatttagcagtcagttattaaatcttgggagttattcatctattcagcctgaagaatattccagtgtagttagtgaagttgtacttcaagacttactggcatatgtgtcctcaaaacattcctacctcagagatcttcctccgaggcagcctcagagggtgaacagtatagactttgtagaattggagcaccttcaacctgatgtattagtccacgcagtactaagagttgttgatttcactatactgacagaggcagtatacagttatagaggacagaagcagaaaaaagttatgttaacagtggaacaggcccaagatcaacattatgcgcttgtattatggggtcctggagcagcctggtaccctcaacttcaaaggaaaaaaggttatatttgggaatttaaatatctttttgttcagtgcaattacacactagaaaacctagaattgcatacaacgccttggtcatcctgtgagtgcttgtttgatgatgatataagggcaattacatttaaagcaaaatttcaaaaaagtgcaccctcctttgtgaagatatcagacttagcaacccacctagaggataagtgttcaggagtggttctgattaaagcccagatttcagagctggcatttcctattacagcatctcagaagatagcgctaaatgctcacagttctctgaagagtattttttcttctcttcccaacatcgtatatactggctgtgcaaaatgtggattggaactagaaacagatgagaacaggatctacaaacaatgttttagctgcttgccatttactatgaagaaaatatattataggccagcgttaatgactgccattgatggaagacatgatgtttgtatccgtgtagaatcaaagctgatagagaagattcttctcaacatttctgcagactgcctcaacagagtgatagttccttcctcagagatcacctatgggatggtcgtggcagacctgttccactccttgttggcagtcagcgcagaaccttgtgtattaaagattcagagcctttttgtgttagatgaaaacagctatccattacaacaagatttctccctcctggatttttatcctgacattgtaaagcatggagccaatgcccgtctctgaggccagaggaagaaattgcaggcatttcaaggaagaagtactgaaatgatttgtcttttgaaataaatgaatgacagggcttttgctttggattttttatgaaatatattttacaaagagaattgcactagatatataaattaaaacttttttctaagaaaatcctgtgaggtttaaaaagattgtttttgtcttttggtttcttcctttctcctggagaaatgatctaccagtcaaggcaatatgtagcagatccctgggaattaaaggtttgcccatttgttcactgtatttagtccctgctacattccaggcattgtactaagtatggggaaccacagagaagacattccctcagaaactgctgcagtgctttcgcttatccctacctaaaaaaccgtcaatgtgaaatcatttccttgattataactataatgataatggattagtttatataaacctatgtttagacaagttcaagacaagcgtgtctttctataaaaagtattgaaaatgaaggaaatgagatcatgtttcaatttattaaagcagggaagagcgttctgtggttagttcgtgtctaggatttgagtgccttactgaatgcatttaccagcaaacatgtagcaatctgttctctcattgtgattgtggaagaagctcatgtaaaatgatagtcattaatgaggaagtatggcgtggtacttattctgtaagttcagagtatgctgagtgttaatagattatcatattgcctgaaaataaattcatgatgacatgaa

SEQ ID NO: 285640 - DNA, 3838 bp, Homo sapiens
ctccaccagcttgtcctccacgatgctggcgccgcgatcgaagaagccctccaccatcttgaagaagttggggtcgtcctcgcggtcggccaccgcctcgctgtagtggcgccgggcggccaatgccagccccggctgcggggcggcggcgggctgtccccgggcccagcccagcaacgcggccgagtcggcggacgccgagcccagggcagcgggcccggcccgggacagcaacagcgcttcgcccaggtagcggtacatggccacaagcggaggggagtgaaaaatgtactctgacctgaatcctgaattttccttgatggtcaaaagattaagaaatcatgagtggaggatctcaagtccacattttttggggtgctccaattgctccactgaaaatcacagtatcagaagacacagcttctttaatgtctgttgctgacccctggaaaaaaattcagcttttatacagtcaacattctttatatctgaaggatgaaaaacagcacaaaaatcttgaaaactataaagtcccagaatctattggttctccagatcttagtggtcatttcttagcaaactgtatgaatagacatgttcatgtgaaagatgactttgtacgttctgtttctgaaacacagaatatagaatcccagaagattcactcctctagactgagtgatataactagctctaatatgcaaatatgtggatttaaaagcacagttccgcatttcaccgaagaagaaaagtatcaaaagcttctcagtgaaaataaaattagagatgaacagcctaaacatcagccagatatatgtggtaagaactttaacacaaatttgtttcagttgggccataaatgtgcagctgtgttggatttggtttgtagtactgaaaaaattaatatagggcctgaagtggtacaaagagagtgtgtgccaacagaatatcatgaaatacaaaaccagtgtttgggattattttcctcgaacgcagtagataagtcaaggtctgaagcagcagttaggaaggtctcagaccttaaaatatcaactgatacagaatttctcagtataattacctccagccaggttgcttttttagctcaaaagaaagataaaaggcggagtcctgtaaataaagggaatgtaaacatggagactgaaccaaaggcaagttacggggagataagaatacctgaagagaattcgattcagcttgatggttttacagaagcatatgaaagtggacaaaaccaagcatattcccttgaactttttagtcctgtttgtcctaaaacagaaaatagccgcattcacataaactctgataaaggtcttgaagaacatacaggatctcaagaacttttcagttctgaagatgaactgccaccaaatgagatacgtattgagttgtgtagctcaggaatactgtgttcccaactaaataccttccacaaaagtgctattaaaagaagctgtacctctgaagataaagtgggccagtctgaagctctatctagagtccttcaagtagctaagaaaatgaagttgatttctaatggaggagattctgctgtagaaatggatcggagaaatgtgtctgaatttaagagtattaaaaaaacatcattaataaaaaactgtgattctaaaagccagaagtataattgtttagtcatggtgctatctccatgccatgtgaaggaaataaacataaaattcggaccaaattctggctctaaagtgcctttagcaacagttacagtaattgatcaatcagaaactaagaagaaggtttttctgtggaggactgcagcattttgggcatttacagtgtttcttggagatataattttactcacagatgttgttattcatgaggaccaatggattggcgagacagtactacaatcaacatttagcagtcagttattaaatcttgggagttattcatctattcagcctgaagaatattccagtgtagttagtgaagttgtacttcaagacttactggcatatgtgtcctcaaaacattcctacctcagagatcttcctccgaggcagcctcagagggtgaacagtatagactttgtagaattggagcaccttcaacctgatgtattagtccacgcagtactaagagttgttgatttcactatactgacagaggcagtatacagttatagaggacagaagcagaaaaaagttatgttaacagtggaacaggcccaagatcaacattatgcgcttgtattatggggtcctggagcagcctggtaccctcaacttcaaaggaaaaaaggttatatttgggaatttaaatatctttttgttcagtgcaattacacactagaaaacctagaattgcatacaacgccttggtcatcctgtgagtgcttgtttgatgatgatataagggcaattacatttaaagcaaaatttcaaaaaagtgcaccctcctttgtgaagatatcagacttagcaacccacctagaggataagtgttcaggagtggttctgattaaagcccagatttcagagctggcatttcctattacagcatctcagaagatagcgctaaatgctcacagttctctgaagagtattttttcttctcttcccaacatcgtatatactggctgtgcaaaatgtggattggaactagaaacagatgagaacaggatctacaaacaatgttttagctgcttgccatttactatgaagaaaatatattataggccagcgttaatgactgccattgatggaagacatgatgtttgtatccgtgtagaatcaaagctgatagagaagattcttctcaacatttctgcagactgcctcaacagagtgatagttccttcctcagagatcacctatgggatggtcgtggcagacctgttccactccttgttggcagtcagcgcagaaccttgtgtattaaagattcagagcctttttgtgttagatgaaaacagctatccattacaacaagatttctccctcctggatttttatcctgacattgtaaagcatggagccaatgcccgtctctgaggccagaggaagaaattgcaggcatttcaaggaagaagtactgaaatgatttgtcttttgaaataaatgaatgacagggcttttgctttggattttttatgaaatatattttacaaagagaattgcactagatatataaattaaaacttttttctaagaaaatcctgtgaggtttaaaaagattgtttttgtcttttggtttcttcctttctcctggagaaatgatctaccagtcaaggcaatatgtagcagatccctgggaattaaaggtttgcccatttgttcactgtatttagtccctgctacattccaggcattgtactaagtatggggaaccacagagaagacattccctcagaaactgctgcagtgctttcgcttatccctacctaaaaaaccgtcaatgtgaaatcatttccttgattataactataatgataatggattagtttatataaacctatgtttagacaagttcaagacaagcgtgtctttctataaaaagtattgaaaatgaaggaaatgagatcatgtttcaatttattaaagcagggaagagcgttctgtggttagttcgtgtctaggatttgagtgccttactgaatgcatttaccagcaaacatgtagcaatctgttctctcattgtgattgtggaagaagctcatgtaaaatgatagtcattaatgaggaagtatggcgtggtacttattctgtaagttcagagtatgctgagtgttaatagattatcatattgcctgaaaataaattcatgatgacatgaa

SEQ ID NO: 285641 - DNA, 3784 bp, Homo sapiens
ctccaccagcttgtcctccacgatgctggcgccgcgatcgaagaagccctccaccatcttgaagaagttggggtcgtcctcgcggtcggccaccgcctcgctgtagtggcgccgggcggccaatgccagccccggctgcggggcggcggcgggctgtccccgggcccagcccagcaacgcggccgagtcggcggacgccgagcccagggcagcgggcccggcccgggacagcaacagcgcttcgcccaggtagcggtacatggccacaagcggaggggagtgaaaaatgtactctgacctgaatcctgaattttccttgatggtcaaaagattaagaaatcatgagtggaggatctcaagtccacattttttggggtgctccaattgctccactgaaaatcacagtatcagaagacacagcttctttaatgtctgttgctgacccctggaaaaaaattcagcttttatacagtcaacattctttatatctgaaggatgaaaaacagcacaaaaatcttgaaaaaaactgtatgaatagacatgttcatgtgaaagatgactttgtacgttctgtttctgaaacacagaatatagaatcccagaagattcactcctctagactgagtgatataactagctctaatatgcaaatatgtggatttaaaagcacagttccgcatttcaccgaagaagaaaagtatcaaaagcttctcagtgaaaataaaattagagatgaacagcctaaacatcagccagatatatgtggtaagaactttaacacaaatttgtttcagttgggccataaatgtgcagctgtgttggatttggtttgtagtactgaaaaaattaatatagggcctgaagtggtacaaagagagtgtgtgccaacagaatatcatgaaatacaaaaccagtgtttgggattattttcctcgaacgcagtagataagtcaaggtctgaagcagcagttaggaaggtctcagaccttaaaatatcaactgatacagaatttctcagtataattacctccagccaggttgcttttttagctcaaaagaaagataaaaggcggagtcctgtaaataaagggaatgtaaacatggagactgaaccaaaggcaagttacggggagataagaatacctgaagagaattcgattcagcttgatggttttacagaagcatatgaaagtggacaaaaccaagcatattcccttgaactttttagtcctgtttgtcctaaaacagaaaatagccgcattcacataaactctgataaaggtcttgaagaacatacaggatctcaagaacttttcagttctgaagatgaactgccaccaaatgagatacgtattgagttgtgtagctcaggaatactgtgttcccaactaaataccttccacaaaagtgctattaaaagaagctgtacctctgaagataaagtgggccagtctgaagctctatctagagtccttcaagtagctaagaaaatgaagttgatttctaatggaggagattctgctgtagaaatggatcggagaaatgtgtctgaatttaagagtattaaaaaaacatcattaataaaaaactgtgattctaaaagccagaagtataattgtttagtcatggtgctatctccatgccatgtgaaggaaataaacataaaattcggaccaaattctggctctaaagtgcctttagcaacagttacagtaattgatcaatcagaaactaagaagaaggtttttctgtggaggactgcagcattttgggcatttacagtgtttcttggagatataattttactcacagatgttgttattcatgaggaccaatggattggcgagacagtactacaatcaacatttagcagtcagttattaaatcttgggagttattcatctattcagcctgaagaatattccagtgtagttagtgaagttgtacttcaagacttactggcatatgtgtcctcaaaacattcctacctcagagatcttcctccgaggcagcctcagagggtgaacagtatagactttgtagaattggagcaccttcaacctgatgtattagtccacgcagtactaagagttgttgatttcactatactgacagaggcagtatacagttatagaggacagaagcagaaaaaagttatgttaacagtggaacaggcccaagatcaacattatgcgcttgtattatggggtcctggagcagcctggtaccctcaacttcaaaggaaaaaaggttatatttgggaatttaaatatctttttgttcagtgcaattacacactagaaaacctagaattgcatacaacgccttggtcatcctgtgagtgcttgtttgatgatgatataagggcaattacatttaaagcaaaatttcaaaaaagtgcaccctcctttgtgaagatatcagacttagcaacccacctagaggataagtgttcaggagtggttctgattaaagcccagatttcagagctggcatttcctattacagcatctcagaagatagcgctaaatgctcacagttctctgaagagtattttttcttctcttcccaacatcgtatatactggctgtgcaaaatgtggattggaactagaaacagatgagaacaggatctacaaacaatgttttagctgcttgccatttactatgaagaaaatatattataggccagcgttaatgactgccattgatggaagacatgatgtttgtatccgtgtagaatcaaagctgatagagaagattcttctcaacatttctgcagactgcctcaacagagtgatagttccttcctcagagatcacctatgggatggtcgtggcagacctgttccactccttgttggcagtcagcgcagaaccttgtgtattaaagattcagagcctttttgtgttagatgaaaacagctatccattacaacaagatttctccctcctggatttttatcctgacattgtaaagcatggagccaatgcccgtctctgaggccagaggaagaaattgcaggcatttcaaggaagaagtactgaaatgatttgtcttttgaaataaatgaatgacagggcttttgctttggattttttatgaaatatattttacaaagagaattgcactagatatataaattaaaacttttttctaagaaaatcctgtgaggtttaaaaagattgtttttgtcttttggtttcttcctttctcctggagaaatgatctaccagtcaaggcaatatgtagcagatccctgggaattaaaggtttgcccatttgttcactgtatttagtccctgctacattccaggcattgtactaagtatggggaaccacagagaagacattccctcagaaactgctgcagtgctttcgcttatccctacctaaaaaaccgtcaatgtgaaatcatttccttgattataactataatgataatggattagtttatataaacctatgtttagacaagttcaagacaagcgtgtctttctataaaaagtattgaaaatgaaggaaatgagatcatgtttcaatttattaaagcagggaagagcgttctgtggttagttcgtgtctaggatttgagtgccttactgaatgcatttaccagcaaacatgtagcaatctgttctctcattgtgattgtggaagaagctcatgtaaaatgatagtcattaatgaggaagtatggcgtggtacttattctgtaagttcagagtatgctgagtgttaatagattatcatattgcctgaaaataaattcatgatgacatgaa

SEQ ID NO: 285642 - DNA, 2539 bp, Homo sapiens
agctagcgagcgagaggcagccgcgcccgccgccgcccctgctctgtatgccgctctctcccggcgcggccgccgccgatcacagcagcaggagccgccgccgccgcggttgatgtggttgggccggggctgaggaggccgccaagatgccgcagtcaaagtcccggaagatcgcgatcctgggctaccggtctgtggggaaatcctcattgacgattcaatttgttgaaggccaatttgtggactcctacgatccaaccatagaaaacacttttacaaagttgatcacagtaaatggacaagaatatcatctttaacttgtagacacagccgggcaagatgaatattctatctttcctcagacatactccatagatattaatggctatattcttgtgtattctgttacatcaatcaaaagttttgaagtgattaaagttatccatggcaaattgttggatatggtggggaaagtacaaatacctattatgttggttggaaataagaaagacctgcatatggaaagggtgatcagttatgaagaagggaaagctttggcagaatcttggaatgcagcttttttggaatcttctgctaaagaaaatcagactgctgttgatgtttttcgaaggatgattttggaggcagaaaaaatggacggggcagcttcacaagattccagtgtagttagtgaagttgtacttcaagacttactggcatatgtgtcctcaaaacattcctacctcagagatcttcctccgaggcagcctcagagggtgaacagtatagactttgtagaattggagcaccttcaacctgatgtattagtccacgcagtactaagagttgttgatttcactatactgacagaggcagtatacagttatagaggacagaagcagaaaaaagttatgttaacagtggaacaggcccaagatcaacattatgcgcttgtattatggggtcctggagcagcctggtaccctcaacttcaaaggaaaaaaggttatatttgggaatttaaatatctttttgttcagtgcaattacacactagaaaacctagaattgcatacaacgccttggtcatcctgtgagtgcttgtttgatgatgatataagggcaattacatttaaagcaaaatttcaaaaaagtgcaccctcctttgtgaagatatcagacttagcaacccacctagaggataagtgttcaggagtggttctgattaaagcccagatttcagagctggcatttcctattacagcatctcagaagatagcgctaaatgctcacagttctctgaagagtattttttcttctcttcccaacatcgtatatactggctgtgcaaaatgtggattggaactagaaacagatgagaacaggatctacaaacaatgttttagctgcttgccatttactatgaagaaaatatattataggccagcgttaatgactgccattgatggaagacatgatgtttgtatccgtgtagaatcaaagctgatagagaagattcttctcaacatttctgcagactgcctcaacagagtgatagttccttcctcagagatcacctatgggatggtcgtggcagacctgttccactccttgttggcagtcagcgcagaaccttgtgtattaaagattcagagcctttttgtgttagatgaaaacagctatccattacaacaagatttctccctcctggatttttatcctgacattgtaaagcatggagccaatgcccgtctctgaggccagaggaagaaattgcaggcatttcaaggaagaagtactgaaatgatttgtcttttgaaataaatgaatgacagggcttttgctttggattttttatgaaatatattttacaaagagaattgcactagatatataaattaaaacttttttctaagaaaatcctgtgaggtttaaaaagattgtttttgtcttttggtttcttcctttctcctggagaaatgatctaccagtcaaggcaatatgtagcagatccctgggaattaaaggtttgcccatttgttcactgtatttagtccctgctacattccaggcattgtactaagtatggggaaccacagagaagacattccctcagaaactgctgcagtgctttcgcttatccctacctaaaaaaccgtcaatgtgaaatcatttccttgattataactataatgataatggattagtttatataaacctatgtttagacaagttcaagacaagcgtgtctttctataaaaagtattgaaaatgaaggaaatgagatcatgtttcaatttattaaagcagggaagagcgttctgtggttagttcgtgtctaggatttgagtgccttactgaatgcatttaccagcaaacatgtagcaatctgttctctcattgtgattgtggaagaagctcatgtaaaatgatagtcattaatgaggaagtatggcgtggtacttattctgtaagttcagagtatgctgagtgttaatagattatcatattgcctgaaaataaattcatgatgacatgaa

SEQ ID NO: 285643 - DNA, 3967 bp, Homo sapiens
acgggcggccggatttgcccggaggccgcacccgcctccggcggggctctcagtgaaaaatgtactctgacctgaatcctgaattttccttgatggtcaaaagattaagaaatcatgagtggaggatctcaagtccacattttttggggtgctccaattgctccactgaaaatcacagtatcagaagacacagcttctttaatgtctgttgctgacccctggaaaaaaattcagcttttatacagtcaacattctttatatctgaaggatgaaaaacagcacaaaaatcttgaaaactataaagtcccagaatctattggttctccagatcttagtggtcatttcttagcaaactgtatgaatagacatgttcatgtgaaagatgactttgtacgttctgtttctgaaacacagaatatagaatcccagaagattcactcctctagactgagtgatataactagctctaatatgcaaatatgtggatttaaaagcacagttccgcatttcaccgaagaagaaaagtatcaaaagcttctcagtgaaaataaaattagagatgaacagcctaaacatcagccagatatatgtggtaagaactttaacacaaatttgtttcagttgggccataaatgtgcagctgtgttggatttggtttgtagtactgaaaaaattaatatagggcctgaagtggtacaaagagagtgtgtgccaacagaatatcatgaaatacaaaaccagtgtttgggattattttcctcgaacgcagtagataagtcaaggtctgaagcagcagttaggaaggtctcagaccttaaaatatcaactgatacagaatttctcagtataattacctccagccaggttgcttttttagctcaaaagaaagataaaaggcggagtcctgtaaataaagggaatgtaaacatggagactgaaccaaaggcaagttacggggagataagaatacctgaagagaattcgattcagcttgatggttttacagaagcatatgaaagtggacaaaaccaagcatattcccttgaactttttagtcctgtttgtcctaaaacagaaaatagccgcattcacataaactctgataaaggtcttgaagaacatacaggatctcaagaacttttcagttctgaagatgaactgccaccaaatgagatacgtattgagttgtgtagctcaggaatactgtgttcccaactaaataccttccacaaaagtgctattaaaagaagctgtacctctgaagataaagtgggccagtctgaagctctatctagagtccttcaagtagctaagaaaatgaagttgatttctaatggaggagattctgctgtagaaatggatcggagaaatgtgtctgaatttaagagtattaaaaaaacatcattaataaaaaactgtgattctaaaagccagaagtataattgtttagtcatggtgctatctccatgccatgtgaaggaaataaacataaaattcggaccaaattctggctctaaagtgcctttagcaacagttacagtaattgatcaatcagaaactaagaagaaggtttttctgtggaggactgcagcattttgggcatttacagtgtttcttggagatataattttactcacagatgttgttattcatgaggaccaatggattggcgagacagtactacaatcaacatttagcagtcagttattaaatcttgggagttattcatctattcagcctgaagaatattccagtgtagttagtgaagttgtacttcaagacttactggcatatgtgtcctcaaaacattcctacctcagagatcttcctccgaggcagcctcagagggtgaacagtatagactttgtagaattggagcaccttcaacctgatgtattagtccacgcagtactaagagttgttgatttcactatactgacagaggcagtatacagttatagaggacagaagcagaaaaaagttatgttaacagtggaacaggcccaagatcaacattatgcgcttgtattatggggtcctggagcagcctggtaccctcaacttcaaaggaaaaaaggttatatttgggaatttaaatatctttttgttcagtgcaattacacactagaaaacctagaattgcatacaacgccttggtcatcctgtgagtgcttgtttgatgatgatataagggcaattacatttaaagcaaaatttcaaaaaagtgcaccctcctttgtgaagatatcagacttagcaacccacctagaggataagtgttcaggagtggttctgattaaagcccagatttcagagctggcatttcctattacagcatctcagaagatagcgctaaatgctcacagttctctgaagagtattttttcttctcttcccaacatcgtatatactggctgtgcaaaatgtggattggaactagaaacagatgagaacaggatctacaaacaatgttttagctgcttgccatttactatgaagaaaatatattataggccagcgttaatgactgccattgatggaagacatgatgtttgtatccgtgtagaatcaaagctgatagagaagattcttctcaacatttctgcagactgcctcaacagagtgatagttccttcctcagagatcacctatgggatggtcgtggcagacctgttccactccttgttggcagtcagcgcagaaccttgtgtattaaagattcagagcctttttgtgttagatgaaaacagctatccattacaacaagatttctccctcctggatttttatcctgacattgtaaagcatggagccaatgcccgtctctgaggccagaggaagaaattgcaggcatttcaaggaagaagtactgaaatgatttgtcttttgaaataaatgaatgacagggcttttgctttggattttttatgaaatatattttacaaagagaattgcactagatatataaattaaaacttttttctaagaaaatcctgtgaggtttaaaaagattgtttttgtcttttggtttcttcctttctcctggagaaatgatctaccagtcaaggcaatatgtagcagatccctgggaattaaaggtttgcccatttgttcactgtatttagtccctgctacattccaggcattgtactaagtatggggaaccacagagaagacattccctcagaaactgctgcagtgctttcgcttatccctacctaaaaaaccgtcaatgtgaaatcatttccttgattataactataatgataatggattagtttatataaacctatgtttagacaagttcaagacaagcgtgtctttctataaaaagtattgaaaatgaaggaaatgagatcatgtttcaatttattaaagcagggaagagcgttctgtggttagttcgtgtctaggatttgagtgccttactgaatgcatttaccagcaaacatgtagcaatctgttctctcattgtgattgtggaagaagctcatgtaaaatgatagtcattaatgaggaagtatggcgtggtacttattctgtaagttcagagtatgctgagtgttaatagattatcatattgcctgaaaataaattcatgatgacatgaaaaaaaaaaaaaaaaaaaaaaaaaaaaaaaaaaaaaaaaaaaaaaaaaaaaaaaaaaaaaaaaaaaaaaaaaaaaaaaaacagtgtcggcgcgggcgggccgcgccacacaaaaaagacttctaacaaaacatctgggggggggacgggcgcgccaccatgtagaataagaagacaggagaggacagcacggccccacagagaaaccgggggaacaaaaaagaggggggtacttcagccagaaaaaaaaagggcggggggagacaacgacgcgtgtgcaaaaaaccccaagaagaagtctgagacacatggaggggtaaaaaaagggggccacgaggacgaataaaaaagccccggg

SEQ ID NO: 285644 - DNA, 3557 bp, Homo sapiens
acgggcggccggatttgcccggaggccgcacccgcctccggcggggctctcagtgaaaaatgtactctgacctgaatcctgaattttccttgatggtcaaaagattaagaaatcatgagtggaggatctcaagtccacattttttggggtgctccaattgctccactgaaaatcacagtatcagaagacacagcttctttaatgtctgttgctgacccctggaaaaaaattcagcttttatacagtcaacattctttatatctgaaggatgaaaaacagcacaaaaatcttgaaaactataaagtcccagaatctattggttctccagatcttagtggtcatttcttagcaaactgtatgaatagacatgttcatgtgaaagatgactttgtacgttctgtttctgaaacacagaatatagaatcccagaagattcactcctctagactgagtgatataactagctctaatatgcaaatatgtggatttaaaagcacagttccgcatttcaccgaagaagaaaagtatcaaaagcttctcagtgaaaataaaattagagatgaacagcctaaacatcagccagatatatgtggtaagaactttaacacaaatttgtttcagttgggccataaatgtgcagctgtgttggatttggtttgtagtactgaaaaaattaatatagggcctgaagtggtacaaagagagtgtgtgccaacagaatatcatgaaatacaaaaccagtgtttgggattattttcctcgaacgcagtagataagtcaaggtctgaagcagcagttaggaaggtctcagaccttaaaatatcaactgatacagaatttctcagtataattacctccagccaggttgcttttttagctcaaaagaaagataaaaggcggagtcctgtaaataaagggaatgtaaacatggagactgaaccaaaggcaagttacggggagataagaatacctgaagagaattcgattcagcttgatggttttacagaagcatatgaaagtggacaaaaccaagcatattcccttgaactttttagtcctgtttgtcctaaaacagaaaatagccgcattcacataaactctgataaaggtcttgaagaacatacaggatctcaagaacttttcagttctgaagatgaactgccaccaaatgagatacgtattgagttgtgtagctcaggaatactgtgttcccaactaaataccttccacaaaagtgctattaaaagaagctgtacctctgaagataaagtgggccagtctgaagctctatctagagtccttcaagtagctaagaaaatgaagttgatttctaatggaggagattctgctgtagaaatggatcggagaaatgtgtctgaatttaagagtattaaaaaaacatcattaataaaaaactgtgattctaaaagccagaagtataattgtttagtcatggtgctatctccatgccatgtgaaggaaataaacataaaattcggaccaaattctggctctaaagtgcctttagcaacagttacagtaattgatcaatcagaaactaagaagaaggtttttctgtggaggactgcagcattttgggcatttacagtgtttcttggagatataattttactcacagatgttgttattcatgaggaccaatggattggcgagacagtactacaatcaacatttagcagtcagttattaaatcttgggagttattcatctattcagcctgaagaatattccagtgtagttagtgaagttgtacttcaagacttactggcatatgtgtcctcaaaacattcctacctcagagatcttcctccgaggcagcctcagagggtgaacagtatagactttgtagaattggagcaccttcaacctgatgtattagtccacgcagtactaagagttgttgatttcactatactgacagaggcagtatacagttatagaggacagaagcagaaaaaagttatgttaacagtggaacaggcccaagatcaacattatgcgcttgtattatggggtcctggagcagcctggtaccctcaacttcaaaggaaaaaaggttatatttgggaatttaaatatctttttgttcagtgcaattacacactagaaaacctagaattgcatacaacgccttggtcatcctgtgagtgcttgtttgatgatgatataagggcaattacatttaaagcaaaatttcaaaaaagtgcaccctcctttgtgaagatatcagacttagcaacccacctagaggataagtgttcaggagtggttctgattaaagcccagatttcagagctggcatttcctattacagcatctcagaagatagcgctaaatgctcacagttctctgaagagtattttttcttctcttcccaacatcgtatatactggctgtgcaaaatgtggattggaactagaaacagatgagaacaggatctacaaacaatgttttagctgcttgccatttactatgaagaaaatatattataggccagcgttaatgactgccattgatggaagacatgatgtttgtatccgtgtagaatcaaagctgatagagaagattcttctcaacatttctgcagactgcctcaacagagtgatagttccttcctcagagatcacctatgggatggtcgtggcagacctgttccactccttgttggcagtcagcgcagaaccttgtgtattaaagattcagagcctttttgtgttagatgttgtaaagcatggagccaatgcccgtctctgaggccagaggaagaaattgcaggcatttcaaggaagaagtactgaaatgatttgtcttttgaaataaatgaatgacagggcttttgctttggattttttatgaaatatattttacaaagagaattgcactagatatataaattaaaacttttttctaagaaaatcctgtgaggtttaaaaagattgtttttgtcttttggtttcttcctttctcctggagaaatgatctaccagtcaaggcaatatgtagcagatccctgggaattaaaggtttgcccatttgttcactgtatttagtccctgctacattccaggcattgtactaagtatggggaaccacagagaagacattccctcagaaactgctgcagtgctttcgcttatccctacctaaaaaaccgtcaatgtgaaatcatttccttgattataactataatgataatggattagtttatataaacctatgtttagacaagttcaagacaagcgtgtctttctataaaaagtattgaaaatgaaggaaatgagatcatgtttcaatttattaaagcagggaagagcgttctgtggttagttcgtgtctaggatttgagtgccttactgaatgcatttaccagcaaacatgtagcaatctgttctctcattgtgattgtggaagaagctcatgtaaaatgatagtcattaatgaggaagtatggcgtggtacttattctgtaagttcagagtatgctgagtgttaatagattatcatattgcctgaaaataaattcatgatgacatgaa

SEQ ID NO: 285645 - DNA, 3264 bp, Homo sapiens
acgggcggccggatttgcccggaggccgcacccgcctccggcggggctctcagtgaaaaatgtactctgacctgaatcctgaattttccttgatggtcaaaagattaagaaatcatgagtggaggatctcaagtccacattttttggggtgctccaattgctccactgaaaatcacagtatcagaagacacagcttctttaatgtctgttgctgacccctggaaaaaaattcagcttttatacagtcaacattctttatatctgaaggatgaaaaacagcacaaaaatcttgaaaactataaagtcccagaatctattggttctccagatcttagtggtcatttcttagcaaactgtatgaatagacatgttcatgtgaaagatgactttgtacgttctgtttctgaaacacagaatatagaatcccagaagattcactcctctagactgagtgatataactagctctaatatgcaaatatgtggatttaaaagcacagttccgcatttcaccgaagaagaaaagtatcaaaagcttctcagtgaaaataaaattagagatgaacagcctaaacatcagccagatatatgtggtaagaactttaacacaaatttgtttcagttgggccataaatgtgcagctgtgttggatttggtttgtagtactgaaaaaattaatatagggcctgaagtggtacaaagagagtgtgtgccaacagaatatcatgaaatacaaaaccagtgtttgggattattttcctcgaacgcagtagataagtcaaggtctgaagcagcagttaggaaggtctcagaccttaaaatatcaactgatacagaatttctcagtataattacctccagccaggttgcttttttagctcaaaagaaagataaaaggcggagtcctgtaaataaagggaatgtaaacatggagactgaaccaaaggcaagttacggggagataagaatacctgaagagaattcgattcagcttgatggttttacagaagcatatgaaagtggacaaaaccaagcatattcccttgaactttttagtcctgtttgtcctaaaacagaaaatagccgcattcacataaactctgataaaggtcttgaagaacatacaggatctcaagaacttttcagttctgaagatgaactgccaccaaatgagatacgtattgagttgtgtagctcaggaatactgtgttcccaactaaataccttccacaaaagtgctattaaaagaagctgtacctctgaagataaagtgggccagtctgaagctctatctagagtccttcaagtagctaagaaaatgaagttgatttctaatggaggagattctgctgtagaaatggatcggagaaatgtgtctgaatttaagagtattaaaaaaacatcattaataaaaaactgtgattctaaaagccagaagtataattgtttagtcatggtgctatctccatgccatgtgaaggaaataaacataaaattcggaccaaattctggctctaaagtgcctttagcaacagttacagtaattgatcaatcagaaactaagaagaaggtttttctgtggaggactgcagcattttgggcatttacagtgtttcttggagatataattttactcacagatgttgttattcatgaggaccaatggattggcgagacagtactacaatcaacatttagcagtcagttattaaatcttgggagttattcatctattcagcctgaagaatattccagtgtagttagtgaagttgtacttcaagacttactggcatatgtgtcctcaaaacattcctacctcagagatcttcctccgaggcagcctcagagggtgaacagtatagactttgtagaattggagcaccttcaacctgatgtattagtccacgcagtactaagagttgttgatttcactatactgacagaggcagtatacagttatagaggacagaagcagaaaaaagttatgttaacagtggaacaggcccaagatcaacattatgcgcttgtattatggggtcctggagcagcctggtaccctcaacttcaaaggaaaaaaggttatatttgggaatttaaatatctttttgttcagtgcaattacacactagaaaacctagaattgcatacaacgccttggtcatcctgtgagtgcttgtttgatgatgatataagggcaattacatttaaagcaaaatttcaaaaaagtgcaccctcctttgtgaagatatcagacttagcaacccacctagaggataagtgttcaggagtggttctgattaaagcccagatttcagagctggcatttcctattacagcatctcagaagatagcgctaaatgctcacagttctctgaagagtattttttcttctcttcccaacatcgtatatactggctgtgcaaaatgtggattggaactagaaacagatgagaacaggatctacaaacaatgttttagctgcttgccatttactatgaagaaaatatattataggccagcgttaatgactgccattgatggaagacatgatgtttgtatccgtgtagaatcaaagctgatagagaagattcttctcaacatttctgcagactgcctcaacagagtgatagttccttcctcagagatcacctatgggatggtcgtggcagacctgttccactccttgttggcagtcagcgcagaaccttgtgtattaaagattcagagcctttttgtgttagatgaaaacagctatccattacaacaagatttctccctcctggatttttatcctgacattgtaaagcatggagccaatgcccgtctctgaggccagaggaagaaattgcaggcatttcaaggaagaagtactgaaatgatttgtcttttgaaataaatgaatgacagggcttttgctttggattttttatgaaatatattttacaaagagaattgcactagatatataaattaaaacttttttctaagaaaatcctgtgaggtttaaaaagattgtttttgtcttttggtttcttcctttctcctggagaaatgatctaccagtcaaggcaatatgtagcagatccctgggaattaaaggtttgcccatttgttcactgtatttagtccctgctacattccaggcattgtactaagtatggggaaccacagagaagacattccccaaacgtggcgggtcgctatctactacggatggaatcttcttgtttactatggaggtagtttaacctgtcgtgggcttctg

SEQ ID NO: 285646 - DNA, 3040 bp, Homo sapiens
acgggcggccggatttgcccggaggccgcacccgcctccggcggggctctcagtgaaaaatgtactctgacctgaatcctgaattttccttgatggtcaaaagattaagaaatcatgagtggaggatctcaagtccacattttttggggtgctccaattgctccactgaaaatcacagtatcagaagacacagcttctttaatgtctgttgctgacccctggaaaaaaattcagcttttatacagtcaacattctttatatctgaaggatgaaaaacagcacaaaaatcttgaaaactataaagtcccagaatctattggttctccagatcttagtggtcatttcttagcaaactgtatgaatagacatgttcatgtgaaagatgactttgtacgttctgtttctgaaacacagaatatagaatcccagaagattcactcctctagactgagtgatataactagctctaatatgcaaatatgtggatttaaaagcacagttccgcatttcaccgaagaagaaaagtatcaaaagcttctcagtgaaaataaaattagagatgaacagcctaaacatcagccagatatatgtggtaagaactttaacacaaatttgtttcagttgggccataaatgtgcagctgtgttggatttggtttgtagtactgaaaaaattaatatagggcctgaagtggtacaaagagagtgtgtgccaacagaatatcatgaaatacaaaaccagtgtttgggattattttcctcgaacgcagtagataagtcaaggtctgaagcagcagttaggaaggtctcagaccttaaaatatcaactgatacagaatttctcagtataattacctccagccaggttgcttttttagctcaaaagaaagataaaaggcggagtcctgtaaataaagggaatgtaaacatggagactgaaccaaaggcaagttacggggagataagaatacctgaagagaattcgattcagcttgatggttttacagaagcatatgaaagtggacaaaaccaagcatattcccttgaactttttagtcctgtttgtcctaaaacagaaaatagccgcattcacataaactctgataaaggtcttgaagaacatacaggatctcaagaacttttcagttctgaagatgaactgccaccaaatgagatacgtattgagttgtgtagctcaggaatactgtgttcccaactaaataccttccacaaaagtgctattaaaagaagctgtacctctgaagataaagtgggccagtctgaagctctatctagagtccttcaagtagctaagaaaatgaagttgatttctaatggaggagattctgctgtagaaatggatcggagaaatgtgtctgaatttaagagtattaaaaaaacatcattaataaaaaactgtgattctaaaagccagaagtataattgtttagtcatggtgctatctccatgccatgtgaaggaaataaacataaaattcggaccaaattctggctctaaagtgcctttagcaacagttacagtaattgatcaatcagaaactaagaagaaggtttttctgtggaggactgcagcattttgggcatttacagtgtttcttggagatataattttactcacagatgttgttattcatgaggaccaatggattggcgagacagtactacaatcaacatttagcagtcagttattaaatcttgggagttattcatctattcagcctgaagaatattccagtgtagttagtgaagttgtacttcaagacttactggcatatgtgtcctcaaaacattcctacctcagagatcttcctccgaggcagcctcagagggtgaacagtatagactttgtagaattggagcaccttcaacctgatgtattagtccacgcagtactaagagttgttgatttcactatactgacagaggcagtatacagttatagaggacagaagcagaaaaaagttatgttaacagtggaacaggcccaagatcaacattatgcgcttgtattatggggtcctggagcagcctggtaccctcaacttcaaaggaaaaaaggttatatttgggaatttaaatatctttttgttcagtgcaattacacactagaaaacctagaattgcatacaacgccttggtcatcctgtgagtgcttgtttgatgatgatataagggcaattacatttaaagcaaaatttcaaaaaagtgcaccctcctttgtgaagatatcagacttagcaacccacctagaggataagtgttcaggagtggttctgattaaagcccagatttcagagctggcatttcctattacagcatctcagaagatagcgctaaatgctcacagttctctgaagagtattttttcttctcttcccaacatcgtatatactggctgtgcaaaatgtggattggaactagaaacagatgagaacaggatctacaaacaatgttttagctgcttgccatttactatgaagaaaatatattataggccagcgttaatgactgccattgatggaagacatgatgtttgtatccgtgtagaatcaaagctgatagagaagattcttctcaacatttctgcagactgcctcaacagagtgatagatggagttttgctcttgttgcctagactggagtgctgtggcgcgatctcagttcaccataacctctgcctcctggattcaagcaagtctcctgcctcagtttcccaagtagctgggattacagttccttcctcagagatcacctatgggatggtcgtggcagacctgttccactccttgttggcagtcagcgcagaaccttgtgtattaaagattcagagcctttttgtgttagatgaaaacagctatccattacaacaagatttctccctcctggatttttatcctgacattgtaaagcatggagccaatgcccgtctctgaggccagaggaagaaattgcaggcattcaggagaatacctccaatggttgtgcttgaatatattcttccttttgggtgtttcctgttgc

SEQ ID NO: 285647 - DNA, 1999 bp, Homo sapiens
acgggcggccggatttgcccggaggccgcacccgcctccggcggggctctcagtgaaaaatgtactctgacctgaatcctgaattttccttgatggtcaaaagattaagaaatcatgagtggaggatctcaagtccacattttttggggtgctccaattgctccactgaaaatcacagtatcagaagacacagcttctttaatgtctgttgctgacccctggaaaaaaattcagcttttatacagtcaacattctttatatctgaaggatgaaaaacagcacaaaaatcttgaaaactataaagtcccagaatctattggttctccagatcttagtggtcatttcttagcaaactgtatgaatagacatgttcatgtgaaagatgactttgtacgttctgtttctgaaacacagaatatagaatcccagaagattcactcctctagactgagtgatataactagctctaatatgcaaatatgtggatttaaaagcacagttccgcatttcaccgaagaagaaaagtatcaaaagcttctcagtgaaaataaaattagagatgaacagcctaaacatcagccagatatatgtggtaagaactttaacacaaatttgtttcagttgggccataaatgtgcagctgtgttggatttggtttgtagtactgaaaaaattaatatagggcctgaagtggtacaaagagagtgtgtgccaacagaatatcatgaaatacaaaaccagtgtttgggattattttcctcgaacgcagtagataagtcaaggtctgaagcagcagttaggaaggtctcagaccttaaaatatcaactgatacagaatttctcagtataattacctccagccaggttgcttttttagctcaaaagaaagataaaaggcggagtcctgtaaataaagggaatgtaaacatggagactgaaccaaaggcaagttacggggagataagaatacctgaagagaattcgattcagcttgatggttttacagaagcatatgaaagtggacaaaaccaagcatattcccttgaactttttagtcctgtttgtcctaaaacagaaaatagccgcattcacataaactctgataaaggtcttgaagaacatacaggatctcaagaacttttcagttctgaagatgaactgccaccaaatgagatacgtattgagttgtgtagctcaggaatactgtgttcccaactaaataccttccacaaaagtgctattaaaagaagctgtacctctgaagataaagtgggccagtctgaagctctatctagagtccttcaagtagctaagaaaatgaagttgatttctaatggaggagattctgctgtagaaatggatcggagaaatgtgtctgaatttaagagtattaaaaaaacatcattaataaaaaactgtgattctaaaagccagaagtataattgtttagtcatggtgctatctccatgccatgtgaaggaaataaacataaaattcggaccaaattctggctctaaagtgcctttagcaacagttacagtaattgatcaatcagaaactaagaagaaggtttttctgtggaggactgcagcattttgggcatttacagtgtttcttggagatataattttactcacaggtgaggtcattatggtataatggtagcttattttataaagctaagttttgtttgtttttgtttttctcccacttagtctttgaagactctttctttagtcatttgcctcttctgagctcagcataattgatccctttattgcatctgcattgctctcctttccattgtccactctcctgcccattgccacttctgggcctctgttctatccttctcagctctgccccttctttccacttatcccctcctttaataagccttccctagtcaggtggagtgggtcacacttgtaatcccagcactttgggaggctgaggcaggaagattgcttgaggccaggaatttgagaccagccttggc

SEQ ID NO: 285648 - DNA, 510 bp, Homo sapiens
gttgatttcactatactgacaggtaaacattttgactgcctccttaattttagattatgaaaaaattaagatacaagaccatcttagtgtaccatttggttatcactatatatgtatcatcagctattaaagtatggtatcatgtgtgatagagtaatgccaactaagatactcattttccttttccagaggcagtatacagttatagaggacagaagcagaaaaaagttatgttaacagtggaacaggcccaagatcaacattatgcgcttgtattatggggtcctggagcagcctggtaccctcaacttcaaaggaaaaaaggtaaatacaccaaaaagcatttaacctatttatatttcggtaaatgattaatgtttatgagcccaagatggagaaaatcttaagagacgagacagcatttgaaatacaagtgatcatgattgaatattcttctgcaaatttcttctgttaaaattttgtacctcttgtagcaattcatttatctaa

SEQ ID NO: 285649 - DNA, 1041 bp, Homo sapiens
  misc_feature (4)..(4): n is a, c, g, or t
  misc_feature (6)..(7): n is a, c, g, or t
  misc_feature (9)..(9): n is a, c, g, or t
ggcncnngngaggtgagagacttaagtctaaggcactgagcgtatcatgttaaagatgagcgggtggcagcgacagagccaaaatcagagctggaacctgaggagagagtgttcaagaaggaagtgtatcttcatacatcaccacacctgaaagcagatgtgcttttccagactgatccaactgcagagatggcagctgagtcattgcctttctccttcgggacactgtccagctgggagctggaagcctggtatgaggacctgcaagaggtcctgtcttcagatgaaaatgggggtacctatgtttcacctcctggaaatgaagaggaagaatcaaaaatcttcaccactcttgaccctgcttctctggcttggctgactgaggaggagccagaaccagcagaggtcacaagcacctcccagagccctcactctccagattccagtcagagctccctggctcaggaggaagaggaggaagaccaagggagaaccaggaaacggaaacagagtggtcattccccagcccgggctggaaagcagcgcatgaaggagaaagaacaggagaatgaaaggaaagtggcacagctagctgaagagaatgaacggctcaagcaggaaatcgagcgcctgaccagggaagtagaggcgactcgccgagctctgattgaccgaatggtgaatctgcaccaagcatgaacaattgggagcatcagtcccccacttgggccacactacccacctttcccagaagtggctactgactaccctctcactagtgccaatgatgtgaccctcaatcccacatacgcagggggaaggcttggagtagacaaaaggaaaggtctcagcttgtatatagagattgtacatttatttattactgtccctatctattaaagtgactttctatgaaaaaacaaaaaaaaaccgggctcaaggcgggggcaaaaacggcagcgaccgccggtctagcggttccgggccgttctggacaagggaatcgcgggtcccaaaggagcgttatcgaagcggtacgaa

SEQ ID NO: 285650 - DNA, 915 bp, Homo sapiens
  misc_feature (4)..(4): n is a, c, g, or t
  misc_feature (6)..(7): n is a, c, g, or t
  misc_feature (9)..(9): n is a, c, g, or t
ggcncnngngaggtgagagacttaagtctaaggcactgagcgtatcatgttaaagatgagcgggtggcagcgacagagccaaaatcagagctggaacctgaggagagagtgttcaagaaggaagtgtatcttcatacatcaccacacctgaaagcagatgtgcttttccagactgatccaactgcagagatggcagctgagtcattgcctttctccttcgggacactgtccagctgggagctggaagcctggtatgaggacctgcaagaggtcctgtcttcagatgaaaatgggggtacctatgtttcacctcctggaaatgaagaggaagaatcaaaaatcttcaccactcttgaccctgcttctctggcttggctgactgaggaggagccagaaccagcagaggtcacaagcacctcccagagccctcactctccagattccagtcagagctccctggctcaggaggaagaggaggaagaccaagggagaaccaggaaacggaaacagagtggtcattccccagcccgggctggaaagcagcgcatgaaggagaaagaacaggagaatgaaaggaaagtggcacagctagctgaagagaatgaacggctcaagcaggaaatcgagcgcctgaccagggaagtagaggcgactcgccgagctctgattgaccgaatggtgaatctgcaccaagcatgaacaattgggagcatcagtcccccacttgggccacactacccacctttcccagaagtggctactgactaccctctcactagtgccaatgatgtgaccctcaatcccacatacgcagggggaaggcttggagtagacaaaaggaaaggtctcagcttgtatatagagattgtacatttatttattactgtccctatctattaaagtgactttctatga

SEQ ID NO: 285651 - DNA, 941 bp, Homo sapiens
  misc_feature (4)..(4): n is a, c, g, or t
  misc_feature (6)..(7): n is a, c, g, or t
  misc_feature (9)..(9): n is a, c, g, or t
ggcncnngngaggtgagagacttaagtctaaggcactgagcgtatcatgttaaagatgagcgggtggcagcgacagagccaaaatcagagctggaacctgaggagagagtgttcaagaaggaagtgtatcttcatacatcaccacacctgaaagcagatgtgcttttccagactgatccaactgcagagatggcagctgagtcattgcctttctccttcgggacactgtccagctgggagctggaagcctggtatgaggacctgcaagaggtcctgtcttcagatgaaaatgggggtacctatgtttcacctcctggaaatgaagaggaagaatcaaaaatcttcaccactcttgaccctgcttctctggcttggctgactgaggaggagccagaaccagcagaggtcacaagcacctcccagagccctcactctccagattccagtcagagctccctggctcaggaggaagaggaggaagaccaagggagaaccaggaaacggaaacagagtggtcattccccagcccgggctggaaagcagcgcatgaaggagaaagaacaggagaatgaaaggaaagtggcacagctagctgaagagaatgaacggctcaagcaggaaatcgagcgcctgaccagggaagtagaggcgactcgccgagctctgattgaccgaatggtgaatctgcaccaagcatgaacaattgggagcatcagtcccccacttgggccacactacccacctttcccagaagtggctactgactaccctctcactagtgccaatgatgtgaccctcaatcccacatacgcagggggaaggcttggagtagacaaaaggaaaggtctcagcttgtatatagagattgtacatttatttattactgtccctatctattaaagtgactttctatgaaaaaaaaaaggggggggcaaagaacc

SEQ ID NO: 285652 - DNA, 902 bp, Homo sapiens
aaggctaggtacgaggccctcggggtaatcggccgaggtaagatgagcgggtggcagcgacagagccaaaatcagagctggaacctgaggagagagtgttcaagaaggaagtgtatcttcatacatcaccacacctgaaagcagatgtgcttttccagactgatccaactgcagagatggcagctgagtcattgcctttctccttcgggacactgtccagctgggagctggaagcctggtatgaggacctgcaagaggtcctgtcttcagatgaaaatgggggtacctatgtttcacctcctggaaatgaagaggaagaatcaaaaatcttcaccactcttgaccctgcttctctggcttggctgactgaggaggagccagaaccagcagaggtcacaagcacctcccagagccctcactctccagattccagtcagagctccctggctcaggaggaagaggaggaagaccaagggagaaccaggaaacggaaacagagtggtcattccccagcccgggctggaaagcagcgcatgaaggagaaagaacaggagaatgaaaggaaagtggcacagctagctgaagagaatgaacggctcaagcaggaaatcgagcgcctgaccagggaagtagaggcgactcgccgagctctgattgaccgaatggtgaatctgcaccaagcatgaacaattgggagcatcagtcccccacttgggccacactacccacctttcccagaagtggctactgactaccctctcactagtgccaatgatgtgaccctcaatcccacatacgcagggggaaggcttggagtagacaaaaggaaaggtctcagcttgtatatagagattgtacatttatttattactgtccctatctattaaagtgactttctatga

SEQ ID NO: 285653 - DNA, 749 bp, Homo sapiens
  misc_feature (27)..(28): n is a, c, g, or t
cttacggctagtacgaggctgggtgtnnagctgagtcattgcctttctccttcgggacactgtccagctgggagctggaagcctggtatgaggacctgcaagaggtcctgtcttcagatgaaaatgggggtacctatgtttcacctcctggaaatgaagaggaagaatcaaaaatcttcaccactcttgaccctgcttctctggcttggctgactgaggaggagccagaaccagcagaggtcacaagcacctcccagagccctcactctccagattccagtcagagctccctggctcaggaggaagaggaggaagaccaagggagaaccaggaaacggaaacagagtggtcattccccagcccgggctggaaagcagcgcatgaaggagaaagaacaggagaatgaaaggaaagtggcacagctagctgaagagaatgaacggctcaagcaggaaatcgagcgcctgaccagggaagtagaggcgactcgccgagctctgattgaccgaatggtgaatctgcaccaagcatgaacaattgggagcatcagtcccccacttgggccacactacccacctttcccagaagtggctactgactaccctctcactagtgccaatgatgtgaccctcaatcccacatacgcagggggaaggcttggagtagacaaaaggaaaggtctcagcttgtatatagagattgtacatttatttattactgtccctatctattaaagtgactttctatga

SEQ ID NO: 285654 - DNA, 1122 bp, Homo sapiens
  misc_feature (4)..(4): n is a, c, g, or t
  misc_feature (6)..(7): n is a, c, g, or t
  misc_feature (9)..(9): n is a, c, g, or t
ggcncnngngaggtgagagacttaagtctaaggcactgagcgtatcatgttaaagatgagcgggtggcagcgacagagccaaaatcagagctggaacctgaggagagagtgttcaagaaggaagtgtatcttcatacatcaccacacctgaaagcaggcatcagaccagcttgccaacttgtggcatagactgtttgctacatggagcttgttccagccactccccattatcctgcagatgtgcttttccagactgatccaactgcagagatggcagctgagtcattgcctttctccttcgggacactgtccagctgggagctggaagcctggtatgaggacctgcaagaggtcctgtcttcagatgaaaatgggggtacctatgtttcacctcctggaaatgaagaggaagaatcaaaaatcttcaccactcttgaccctgcttctctggcttggctgactgaggaggagccagaaccagcagaggtcacaagcacctcccagagccctcactctccagattccagtcagagctccctggctcaggaggaagaggaggaagaccaagggagaaccaggaaacggaaacagagtggtcattccccagcccgggctggaaagcagcgcatgaaggagaaagaacaggagaatgaaaggaaagtggcacagctagctgaagagaatgaacggctcaagcaggaaatcgagcgcctgaccagggaagtagaggcgactcgccgagctctgattgaccgaatggtgaatctgcaccaagcatgaacaattgggagcatcagtcccccacttgggccacactacccacctttcccagaagtggctactgactaccctctcactagtgccaatgatgtgaccctcaatcccacatacgcagggggaaggcttggagtagacaaaaggaaaggtctcagcttgtatatagagattgtacatttatttattactgtccctatctattaaagtgactttctatgaaaaaacaaaaaaaaaccgggctcaaggcgggggcaaaaacggcagcgaccgccggtctagcggttccgggccgttctggacaagggaatcgcgggtcccaaaggagcgttatcgaagcggtacgaa

SEQ ID NO: 285655 - DNA, 1194 bp, Homo sapiens
agctaccccatgcagccagtcactgcacctccatcctaccctcctaccagctattcctctacacagccgactagttatgatcagagcagttactctcagcagaacacctatgggcaaccgagcagctatggacagcagagtagctatggtcaacaaagcagctatgggcagcagcctcccactagttacccaccccaaactggatcctacagccaagctccaagtcaatatagccaacagagcagcagctacgggcagcagatgttcaagaaggaagtgtatcttcatacatcaccacacctgaaagcagatgtgcttttccagactgatccaactgcagagatggcagctgagtcattgcctttctccttcgggacactgtccagctgggagctggaagcctggtatgaggacctgcaagaggtcctgtcttcagatgaaaatgggggtacctatgtttcacctcctggaaatgaagaggaagaatcaaaaatcttcaccactcttgaccctgcttctctggcttggctgactgaggaggagccagaaccagcagaggtcacaagcacctcccagagccctcactctccagattccagtcagagctccctggctcaggaggaagaggaggaagaccaagggagaaccaggaaacggaaacagagtggtcattccccagcccgggctggaaagcagcgcatgaaggagaaagaacaggagaatgaaaggaaagtggcacagctagctgaagagaatgaacggctcaagcaggaaatcgagcgcctgaccagggaagtagaggcgactcgccgagctctgattgaccgaatggtgaatctgcaccaagcatgaacaattgggagcatcagtcccccacttgggccacactacccacctttcccagaagtggctactgactaccctctcactagtgccaatgatgtgaccctcaatcccacatacgcagggggaaggcttggagtagacaaaaggaaaggtctcagcttgtatatagagattgtacatttatttattactgtccctatctattaaagtgactttctatgaaaaaacaaaaaaaaaccgggctcaaggcgggggcaaaaacggcagcgaccgccggtctagcggttccgggccgttctggacaagggaatcgcgggtcccaaaggagcgttatcgaagcggtacgaa

SEQ ID NO: 285656 - DNA, 1308 bp, Homo sapiens
  misc_feature (4)..(4): n is a, c, g, or t
  misc_feature (6)..(7): n is a, c, g, or t
  misc_feature (9)..(9): n is a, c, g, or t
ggcncnngngaggtgagagacttaagtctaaggcactgagcgtatcatgttaaagatgagcgggtggcagcgacagagccaaaatcagagctggaacctgaggagagagtgttcaagaaggaagtgtatcttcatacatcaccacacctgaaagcaggtaaacttaacctacccttttccaaaaattttaaacggcaggacagtaaatattttagatgttaaaagtcctatagtctctagcgtgactcttcatctctgccactgtagcaccaaagcagccataaacaatatgtaaataaacagatgtggctgtattccagtacaactttacctacaaaaacaggcatcagaccagcttgccaacttgtggcatagactgtttgctacatggagcttgttccagccactccccattatcctgcagatgtgcttttccagactgatccaactgcagagatggcagctgagtcattgcctttctccttcgggacactgtccagctgggagctggaagcctggtatgaggacctgcaagaggtcctgtcttcagatgaaaatgggggtacctatgtttcacctcctggaaatgaagaggaagaatcaaaaatcttcaccactcttgaccctgcttctctggcttggctgactgaggaggagccagaaccagcagaggtcacaagcacctcccagagccctcactctccagattccagtcagagctccctggctcaggaggaagaggaggaagaccaagggagaaccaggaaacggaaacagagtggtcattccccagcccgggctggaaagcagcgcatgaaggagaaagaacaggagaatgaaaggaaagtggcacagctagctgaagagaatgaacggctcaagcaggaaatcgagcgcctgaccagggaagtagaggcgactcgccgagctctgattgaccgaatggtgaatctgcaccaagcatgaacaattgggagcatcagtcccccacttgggccacactacccacctttcccagaagtggctactgactaccctctcactagtgccaatgatgtgaccctcaatcccacatacgcagggggaaggcttggagtagacaaaaggaaaggtctcagcttgtatatagagattgtacatttatttattactgtccctatctattaaagtgactttctatgaaaaaacaaaaaaaaaccgggctcaaggcgggggcaaaaacggcagcgaccgccggtctagcggttccgggccgttctggacaagggaatcgcgggtcccaaaggagcgttatcgaagcggtacgaa

SEQ ID NO: 285657 - DNA, 1062 bp, Homo sapiens
  misc_feature (4)..(4): n is a, c, g, or t
  misc_feature (6)..(7): n is a, c, g, or t
  misc_feature (9)..(9): n is a, c, g, or t
ggcncnngngaggtgagagacttaagtctaaggcactgagcgtatcatgttaaagatgagcgggtggcagcgacagagccaaaatcagagctggaacctgaggagagagtgttcaagaaggaagtgtatcttcatacatcaccacacctgaaagcagccactccccattatcctgcagatgtgcttttccagactgatccaactgcagagatggcagctgagtcattgcctttctccttcgggacactgtccagctgggagctggaagcctggtatgaggacctgcaagaggtcctgtcttcagatgaaaatgggggtacctatgtttcacctcctggaaatgaagaggaagaatcaaaaatcttcaccactcttgaccctgcttctctggcttggctgactgaggaggagccagaaccagcagaggtcacaagcacctcccagagccctcactctccagattccagtcagagctccctggctcaggaggaagaggaggaagaccaagggagaaccaggaaacggaaacagagtggtcattccccagcccgggctggaaagcagcgcatgaaggagaaagaacaggagaatgaaaggaaagtggcacagctagctgaagagaatgaacggctcaagcaggaaatcgagcgcctgaccagggaagtagaggcgactcgccgagctctgattgaccgaatggtgaatctgcaccaagcatgaacaattgggagcatcagtcccccacttgggccacactacccacctttcccagaagtggctactgactaccctctcactagtgccaatgatgtgaccctcaatcccacatacgcagggggaaggcttggagtagacaaaaggaaaggtctcagcttgtatatagagattgtacatttatttattactgtccctatctattaaagtgactttctatgaaaaaacaaaaaaaaaccgggctcaaggcgggggcaaaaacggcagcgaccgccggtctagcggttccgggccgttctggacaagggaatcgcgggtcccaaaggagcgttatcgaagcggtacgaa

SEQ ID NO: 285658 - DNA, 1045 bp, Homo sapiens
tggtgactggaagtgtcctaatcccacctgtgagaatatgaacttctcttggaggaatgaatgcaaccagtgtaaggcccctaaaccagatggcccaggagggggaccaggtggctctcacatgggggtgttcaagaaggaagtgtatcttcatacatcaccacacctgaaagcagatgtgcttttccagactgatccaactgcagagatggcagctgagtcattgcctttctcctttgggacactgtccagctgggagctggaagcctggtatgaggacctgcaagaggtcctgtcttcagatgaaaatgggggtacctatgtttcacctcctggaaatgaagaggaagaatcaaaaatcttcaccactcttgaccctgcttctctggcttggctgactgaggaggagccagaaccagcagaggtcacaagcacctcccagagccctcactctccagattccagtcagagctccctggctcaggaggaagaggaggaagaccaagggagaaccaggaaacggaaacagagtggtcattccccagcccgggctggaaagcagcgcatgaaggagaaagaacaggagaatgaaaggaaagtggcacagctagctgaagagaatgaacggctcaagcaggaaatcgagcgcctgaccagggaagtagaggcgactcgccgagctctgattgaccgaatggtgaatctgcaccaagcatgaacaattgggagcatcagtcccccacttgggccacactacccacctttcccagaagtggctactgactaccctctcactagtgccaatgatgtgaccctcaatcccacatacgcagggggaaggcttggagtagacaaaaggaaaggtctcagcttgtatatagagattgtacatttatttattactgtccctatctattaaagtgactttctatgaaaagaaaaaaaaaaattcgggctatatgtggggggggacaagggtttgaatggccagtgtaagggtttcggaccttttgtaagggaaatcgcggcccaaggagaaacgaac

SEQ ID NO: 285659 - DNA, 1035 bp, Homo sapiens
tattcccagcagagcagtcagccctacggacagcagagttacagtggttatagccagtccacggacacttcaggctatggccagagcagctattcttcttatggccagagccagaacatgttcaagaaggaagtgtatcttcatacatcaccacacctgaaagcagatgtgcttttccagactgatccaactgcagagatggcagctgagtcattgcctttctcctttgggacactgtccagctgggagctggaagcctggtatgaggacctgcaagaggtcctgtcttcagatgaaaatgggggtacctatgtttcacctcctggaaatgaagaggaagaatcaaaaatcttcaccactcttgaccctgcttctctggcttggctgactgaggaggagccagaaccagcagaggtcacaagcacctcccagagccctcactctccagattccagtcagagctccctggctcaggaggaagaggaggaagaccaagggagaaccaggaaacggaaacagagtggtcattccccagcccgggctggaaagcagcgcatgaaggagaaagaacaggagaatgaaaggaaagtggcacagctagctgaagagaatgaacggctcaagcaggaaatcgagcgcctgaccagggaagtagaggcgactcgccgagctctgattgaccgaatggtgaatctgcaccaagcatgaacaattgggagcatcagtcccccacttgggccacactacccacctttcccagaagtggctactgactaccctctcactagtgccaatgatgtgaccctcaatcccacatacgcagggggaaggcttggagtagacaaaaggaaaggtctcagcttgtatatagagattgtacatttatttattactgtccctatctattaaagtgactttctatgaaaagaaaaaaaaaaattcgggctatatgtggggggggacaagggtttgaatggccagtgtaagggtttcggaccttttgtaagggaaatcgcggcccaaggagaaacgaac

SEQ ID NO: 285660 - DNA, 881 bp, Homo sapiens
  misc_feature (4)..(4): n is a, c, g, or t
  misc_feature (6)..(7): n is a, c, g, or t
  misc_feature (9)..(9): n is a, c, g, or t
ggcncnngngaggtgagagacttaagtctaaggcactgagcgtatcatgttaaagatgagcgggtggcagcgacagagccaaaatcagagctggaacctgaggagagagtgttcaagaaggaagtgtatcttcatacatcaccacacctgaaagcagatgtgcttttccagactgatccaactgcagagatggcagctgagtcattgcctttctccttcgggacactgtccagctgggagctggaagcctggtatgaggacctgcaagaggtcctgtcttcagatgaaaatgggggtacctatgtttcacctcctggaaatgaagaggagccagaaccagcagaggtcacaagcacctcccagagccctcactctccagattccagtcagagctccctggctcaggaggaagaggaggaagaccaagggagaaccaggaaacggaaacagagtggtcattccccagcccgggctggaaagcagcgcatgaaggagaaagaacaggagaatgaaaggaaagtggcacagctagctgaagagaatgaacggctcaagcaggaaatcgagcgcctgaccagggaagtagaggcgactcgccgagctctgattgaccgaatggtgaatctgcaccaagcatgaacaattgggagcatcagtcccccacttgggccacactacccacctttcccagaagtggctactgactaccctctcactagtgccaatgatgtgaccctcaatcccacatacgcagggggaaggcttggagtagacaaaaggaaaggtctcagcttgtatatagagattgtacatttatttattactgtccctatctattaaagtgactttctatgaaaaaaaaaaggggggggcaaagaacc

SEQ ID NO: 285661 - DNA, 2202 bp, Homo sapiens
aacgccttcagcctgtttcccaggaacggtccccggcttcgcgccccaatttctaacagcctgcctgtcccccgggaacgttctaacatccttggggagcgccccagctacaagacactgtcctgagaacgctgtcatcacccgtagttgcaagtttcggagcggcagtgggaagcatgcgggactacgacgaggtgatcgccttcctgggcgagtgggggcccttccagcgcctcatcttcttcctgctcagcgccagcatcatccccaatggcttcaatggtatgtcagtcgtgttcctggcggggaccccggagcaccgctgtcgagtgccggacgccgcgaacctgagcagcgcctggcgcaacaacagtgtcccgctgcggctgcgggacggccgcgaggtgccccacagctgcagccgctaccggctcgccaccatcgccaacttctcggcgctcgggctggagccggggcgcgacgtggacctggggcagctggagcaggagagctgcctggatggctgggagttcagccaggacgtctacctgtccaccgtcgtgaccgagtggaatctggtgtgtgaggacaactggaaggtgcccctcaccacctccctgttcttcgtaggcgtgctcctcggctccttcgtgtccgggcagctgtcagacaggtttggcaggaagaacgttctcttcgcaaccatggctgtacagactggcttcagcttcctgcagattttctccatcagctgggagatgttcactgtgttatttgtcatcgtgggcatgggccagatctccaactatgtggtagccttcatactaggaacagaaattcttggcaagtcagttcgtattatattctctacattaggagtgtgcacattttttgcagttggctatatgctgctgccactgtttgcttacttcatcagagactggcggatgctgctgctggcgctgacggtgccgggagtgctgtgtgtcccgctgtggtggttcattcctgaatctccccgatggctgatatcccagagaagatttagagaggctgaagatatcatccaaaaagctgcaaaaatgaacaacatagctgtaccagcagtgatatttgattctgtggaggagctaaatcccctgaagcagcagaaagctttcattctggacctgttcaggactcggaatattgccataatgaccattatgtctttgctgctatggatgctgacctcagtgggttactttgctctgtctctggatgctcctaatttacatggagatgcctacctgaactgtttcctctctgccttgattgaaattccagcttacattacagcctggctgctattgcgaacgctgcccaggcgttatatcatagctgcagtactgttctggggaggaggtgtgcttctcttcattcaactggtacctgtggattattacttcttatccattggtctggtcatgctgggaaaatttgggatcacctctgctttctccatgctgtatgtcttcactgctgagctctacccaaccctggtcaggaacatggcggtgggggtcacatccacggcctccagagtgggcagcatcattgccccctactttgtttacctcggtgcttacaacagaatgctgccctacatcgtcatgggtagtctgactgtcctgattggaatcctcaccctttttttccctgaaagtttgggaatgactcttccagaaaccttagagcagatgcagaaagtgaaatggttcagatctgggaaaaaaacaagagactcaatggagacagaagaaaatcccaaggttctaataactgcattctgaaaaaatatctaccccatttggtgaagtgaaaaacagaaaaataagaccctgtggagaaattcgttgttcccactgaaatggactgactgtaacgattgacaccaaaatgaaccttgctatcaagaaatgctcgtcatacagtaaactctggatgattcttccagataatgtccttgctttacaaaccaaccatttctagagagtctccttactcattaattcaatgaaatggattggtaagatgtcttgaaaacatgttagtcaaggactggtaaaatacatataaagattaacactcatttccaatcatacaaatactatccaaataaaaataacatcattgtattaacgcaaatattaggtgacaaca

SEQ ID NO: 285662 - DNA, 2385 bp, Homo sapiens
aacgccttcagcctgtttcccaggaacggtccccggcttcgcgccccaatttctaacagcctgcctgtcccccgggaacgttctaacatccttggggagcgccccagctacaagacactgtcctgagaacgctgtcatcacccgtagttgcaagtttcggagcggcagtgggaagcatgcgggactacgacgaggtgatcgccttcctgggcgagtgggggcccttccagcgcctcatcttcttcctgctcagcgccagcatcatccccaatggcttcaatggtatgtcagtcgtgttcctggcggggaccccggagcaccgctgtcgagtgccggacgccgcgaacctgagcagcgcctggcgcaacaacagtgtcccgctgcggctgcgggacggccgcgaggtgccccacagctgcagccgctaccggctcgccaccatcgccaacttctcggcgctcgggctggagccggggcgcgacgtggacctggggcagctggagcaggagagctgcctggatggctgggagttcagccaggacgtctacctgtccaccgtcgtgaccgagtggaatctggtgtgtgaggacaactggaaggtgcccctcaccacctccctgttcttcgtaggcgtgctcctcggctccttcgtgtccgggcagctgtcagacaggtttggcaggaagaacgttctcttcgcaaccatggctgtacagactggcttcagcttcctgcagattttctccatcagctgggagatgttcactgtgttatttgtcatcgtgggcatgggccagatctccaactatgtggtagccttcatactaggaacagaaattcttggcaagtcagttcgtattatattctctacattaggagtgtgcacattttttgcagttggctatatgctgctgccactgtttgcttacttcatcagagactggcggatgctgctgctggcgctgacggtgccgggagtgctgtgtgtcccgctgtggtggagctggtccatgaatgctcctggctgtgggcatactgtaccagggacaggacttgccccagacagaggccagcctgggaccagcactgacaagctgagtgctccccctgaacatttaccagtggtcttaccattttcctataaaagaaaatagctttcttctgaacatcccatccttggcaggttcattcctgaatctccccgatggctgatatcccagagaagatttagagaggctgaagatatcatccaaaaagctgcaaaaatgaacaacatagctgtaccagcagtgatatttgattctgtggaggagctaaatcccctgaagcagcagaaagctttcattctggacctgttcaggactcggaatattgccataatgaccattatgtctttgctgctatggatgctgacctcagtgggttactttgctctgtctctggatgctcctaatttacatggagatgcctacctgaactgtttcctctctgccttgattgaaattccagcttacattacagcctggctgctattgcgaacgctgcccaggcgttatatcatagctgcagtactgttctggggaggaggtgtgcttctcttcattcaactggtacctgtggattattacttcttatccattggtctggtcatgctgggaaaatttgggatcacctctgctttctccatgctgtatgtcttcactgctgagctctacccaaccctggtcaggaacatggcggtgggggtcacatccacggcctccagagtgggcagcatcattgccccctactttgtttacctcggtgcttacaacagaatgctgccctacatcgtcatgggtagtctgactgtcctgattggaatcctcaccctttttttccctgaaagtttgggaatgactcttccagaaaccttagagcagatgcagaaagtgaaatggttcagatctgggaaaaaaacaagagactcaatggagacagaagaaaatcccaaggttctaataactgcattctgaaaaaatatctaccccatttggtgaagtgaaaaacagaaaaataagaccctgtggagaaattcgttgttcccactgaaatggactgactgtaacgattgacaccaaaatgaaccttgctatcaagaaatgctcgtcatacagtaaactctggatgattcttccagataatgtccttgctttacaaaccaaccatttctagagagtctccttactcattaattcaatgaaatggattggtaagatgtcttgaaaacatgttagtcaaggactggtaaaatacatataaagattaacactcatttccaatcatacaaatactatccaaataaaaataacatcattgtattaacgcaaatattaggtgacaaca

SEQ ID NO: 285663 - DNA, 1845 bp, Homo sapiens
aacgccttcagcctgtttcccaggaacggtccccggcttcgcgccccaatttctaacagcctgcctgtcccccgggaacgttctaacatccttggggagcgccccagctacaagacactgtcctgagaacgctgtcatcacccgtagttgcaagtttcggagcggcagtgggaagcatgcgggactacgacgaggtgatcgccttcctgggcgagtgggggcccttccagcgcctcatcttcttcctgctcagcgccagcatcatccccaatggcttcaatggtatgtcagtcgtgttcctggcggggaccccggagcaccgctgtcgagtgccggacgccgcgaacctgagcagcgcctggcgcaacaacagtgtcccgctgcggctgcgggacggccgcgaggtgccccacagctgcagccgctaccggctcgccaccatcgccaacttctcggcgctcgggctggagccggggcgcgacgtggacctggggcagctggagcaggagagctgcctggatggctgggagttcagccaggacgtctacctgtccaccgtcgtgaccgagtggaatctggtgtgtgaggacaactggaaggtgcccctcaccacctccctgttcttcgtaggcgtgctcctcggctccttcgtgtccgggcagctgtcagacaggtttggcaggaagaacgttctcttcgcaaccatggctgtacagactggcttcagcttcctgcagattttctccatcagctgggagatgttcactgtgttatttgtcatcgtgggcatgggccagatctccaactatgtggtagccttcatactaggaacagaaattcttggcaagtcagttcgtattatattctctacattaggagtgtgcacattttttgcagttggctatatgctgctgccactgtttgcttacttcatcagagactggcggatgctgctgctggcgctgacggtgccgggagtgctgtgtgtcccgctgtggtggagctggtccatgaatgctcctggctgtgggcatactgtaccagggacaggacttgccccagacagaggccagcctgggaccagcactgacaagctgagtgctccccctgaacatttaccagtggtcttaccattttcctataaaagaaaatagctttcttctgaacatcccatccttggcaggttcattcctgaatctccccgatggctgatatcccagagaagatttagagaggctgaagatatcatccaaaaagctgcaaaaatgaacaacatagctgtaccagcagtgatatttgattctgtggaggagctaaatcccctgaagcagcagaaagctttcattctggacctgttcaggactcggaatattgccataatgaccattatgtctttgctgctatggatgctgacctcagtgggttactttgctctgtctctggatgctcctaatttacatggagatgcctacctgaactgtttcctctctgccttgattgaaattccagcttacattacagcctggctgctattgcgaacgctgcccaggcgttatatcatagctgcagtactgttctggggaggaggtgtgcttctcttcattcaactggtacctgtggtgagtggttctggtccagaagactctcatgaagttgcagtcaagctgtcagtagtcatctcgacacccaactgatgctgaaggagctacttccaagctcactcaaggttgttggtgggcctcagttcctcattaaatgttggctagagacttcattccttgacatcacatggacccctcaaagggctgcttataacatgacagcttgcttgtctctgagcaagag

SEQ ID NO: 285664 - DNA, 1979 bp, Homo sapiens
aacagagaaaaaccctgagatgttttattgcttcagattcactgataaaggcttacagcttgagtacagaagagacagtggattacggagtggatgcgggtggttcctaaacactggacacaataaatgctaataccatgactagtgtgagatgcaggagtaagttaagtacaacaaaaaatatccttttcaaggatcccaaatgggcattatttttcaggttcaggatataaagcccacctgtatcctagaattaggcattgaaggataggccttaagaaaggatgctccaaaataccagtttggctacagagcagagtcagtgactgtttagaacaggtttggttccacctccagatcagggaatggcaggaatggtgggatgtgtctgcccgtgggtttgcttacaccttctaccccgggacatgaaagggctgggtatagaagcactttctgtgagtatttggaatgatgcccagaaatttatttttgctctcaaccagagtaattaaggggaagtgaaatcattcaaagagaagtaaaacaactcacttctctggaggataccagttagcctctgctaaccagaaccagccgaaggtaggcaggaattataaaagaactttaagcagctgaaagtgttaatacaaattctatgtactgaaaacacaaaagcctatttattcctactcttctagcttgctaatgcaaggtaatctagtttcctagcacacagcagattagaagtgatgcggggacctgacagaggcaggctcaatgatggcaggctaaaggtcatagggagaagttgcagccgatagtctacagatggacagtctggccatgtcatatcactcaagacatctgtgtggcatctaaaatcagtacaggcgatgccgttgctgttcatttgatggtaacctctccccgccatcggagcagagcaagcatcacactttgcagttctgccctccaagtatctaggacagcttttctcacctgcttgccttttgtcattcatttaaaagtaaggccaaaaagacaaaatagggtgaccaaccatcttgatttgcccaggaccaagggatacaggaccctcagtgccacaaattgggaaatccccagccatccaggatgagttggtcatctttggcacaactttctgagtgatgtaaatatattttgcttgggttagtgattatatggatgtatatacagttgtcaaaactcattgatgtgaacacttcaagatctgtgcattttattatatagaaattctacatcaataaaggctaattccttttgctcaggagtactgagtctgaatcaggtcctaagtatttcagatgtaagtaaaagaacactttaggggttagaaacaacttttggattgataagtttacataacatttacttgatctgtgtattacataatggcattggagatagacagacctgtgatggaatcccaccccgtcatatgctgactgactctgtactactaacctcttgataccttttttcctcatctagataattaggctgaccagttcatagggttgtaatggattaaatgtaaggaataagtggtaaatgtattgaagagcaggtagataatgagcagccaaaaattacagatatcacttgttgtaccttatagctaaagtgagagggagaaagcaaaactataaattaatgaattagacttctttcaccacagttctgttgggaagactatgtaactgttagctcaatgagggggttctctgaaaccttagcacgcatcagaatcaccaggagggattattaaaacaaatctgggccccacccatggagtttctgattcagtagggctgggctaggcctgagaatgtgcaggcctaacgctcccaggtgatgacagtgcttgttgggtccgggtactacacttggagaactgctggtttaatgagtcttaagtgcatctgactgttgaggag

SEQ ID NO: 285665 - DNA, 939 bp, Homo sapiens
gctgggcccaatgcttgattttgaacaaaactaattttggggggaaaaagggctacaaaaagctctggaaggagggagaatcacaagtttaagttatgtctatgcaaactatcataattagcatcagggctgagggaagactagaaactatgcagtttaatggtggttttgattggaaccctttaccctcatggcaatgtggaaaatggattattaggaaaaaagacttgtgggggtgtgtgtgcgcacaagtgctgcatggtgatcaccaaggccttgcaagtgacagactgcagacacgtgcttatgagcaacagactacttaaaccattctctctcttttcacttttaaaggagagttgcaggaggggaaatagacaaaaaacaaaaccctgagtcaaaataatgtgagtggactttaaaggtgacaaatcttctctagtgtgagattcggaaacttctggtgaggaggaagtatgagtttggtctggaaggcctgagccaggtgtgagtccagagagacatggggttagtatgtagagaaaccaggataaaaaaaaatttagtgctgcaggtttctgattccactaacacatctaaatatggcaaaagagcaagtgaatgtctcacaaggttttgatgtataatatggatttggttttgtttttatcggtacaaggaaaccatctctgtcaccagcttttatttctaaggaaaaggatttttgtgaaaacattttcaattcctgctggtggcctgatagataccatcctaaaagcttcctttatcagagaattccacaaaaagtcttgagaaaatgaacaatgaatcagaagattaatccaagatgtacagtggagtttgtctacagagacactgacatgacttctgaagccagggggcatgcgagcgctcccaggcacggtccaccaagtgcaa

SEQ ID NO: 285666 - DNA, 2120 bp, Homo sapiens
gctgggcccaatgcttgattttgaacaaaactaattttggggggaaaaagggctacaaaaagctctggaaggagggagaatcacaagtttaagttatgtctatgcaaactatcataattagcatcagggctgagggaagactagaaactatgcagtttaatggtggttttgattggaaccctttaccctcatggcaatgtggaaaatggattattaggaaaaaagacttgtgggggtgtgtgtgcgcacaagtgctgcatggtgatcaccaaggccttgcaagtgacagactgcagacacgtgcttatgagcaacagactacttaaaccattctctctcttttcacttttaaaggagagttgcaggaggggaaatagacaaaaaacaaaaccctgagtcaaaataatgtgagtggactttaaaggtgacaaatcttctctagtgtgagattcggaaacttctggtgaggaggaagtatgagtttggtctggaaggcctgagccaggtgtgagtccagagagacatggggttagtatgtagagaaaccaggataaaaaaaaatttagtgctgcaggtttgacttgaaagctgctagtgacagcaatgacctgggtagagagatgtttccttgaaaacggctaaaatttatcatacttggtcagactgcaaggtagatgaaggccagggaagcctcttctgaggataattctgcagcaaaaattttttctttagagttagaaggaaagagaaaaccccaaaccagtatgcagagatcattaatgtttatgcaaatgaatcactaaccaagaaaacaaggaaaataaaaggaacaaaatgaattttaatggacatgtgctttaagcatgccaacagacaacacaccactagagacacacatcaaaagcaatcacagtgctatgatcaaatgatgggtacatgtgaacacatccctcgcaaccccaccccccacgttgcttctctttagcgattagtccagagtgctttagtggctgggcacacccgagatacttaaatcaggaggtgaacatgaatgcaacgtgacaactagtagcacagaaaacacctgattggtattcaaagtgcacgaagcaatgctattttcaagttcattgagtctctgcgtcatcactcaaaacaataaaaatactttttcttctcatacaagccaattgtaattaaaattttgttatgacaagctacatttaaaaatctagataaaaataggcatgatagcaaatgctaagaacatcatagcactcttttcttgtgtgcttatgtggttccttttttggagggtcttctagatacaaaaagtgtcaaattgggtgtcagtcctgatgatacaaaatttaaacacacacacatatatatatgaaaacatcacatatatacatatagatcaatgaaacacaaaatgtaacttggagccacaaacacacattagagctccctaatgaccaaagacaaggcagaagtttttttgtctaaaatgaattttgatgtgttttaaggcagagacccaataatgatgcatactacccccagaacataagaagcttggcatctatctatatacccatctacagtcagaagtagatagatatgtacatagagataaggaaaaacaaacaagatgctatatgacgttatcctgacaaaagaaaaaaaaagacatgcatcatgaaataaaaagacaaatcagacttaactcatggagaacacatatcaaaacaggtttctgattccactaacacatctaaatatggcaaaagagcaagtgaatgtctcacaaggttttgatgtataatatggatttggttttgtttttatcggtacaaggaaaccatctctgtcaccagcttttatttctaaggaaaaggatttttgtgaaaacattttcaattcctgctggtggcctgatagataccatcctaaaagcttcctttatcagagaattccacaaaaagtcttgagaaaatgaacaatgaatcagaagattaatccaagatgtacagtggagtttgtctacagagacactgacatgacttctgaagccagggggcatgcgagcgctcccaggcacggtccaccaagtgcaa

SEQ ID NO: 285667 - DNA, 1881 bp, Homo sapiens
ttccgggttaagggaaagcgtgggtgtgagtaggagtcttcggaaaccctttttctttcttttcgccccgctgctgttcgggagatggacttctggagtccccgtcgtagctggtgttgtcccctctaccttcaggaaagaagggcagatggccctcttgcctactgaagccgaggaggggcgcgtatacagcgggctaagggcgctcaagagatccgagtggaagaaaaagcagcggcacagcactggaatgggcgggagtggcagaagagttgtgaaggctattggctagcaagggtggtgggcggggcgtagaccgagctacccagtttactggtcgatttcggatccagttttccagttatagccacgttggcacctcttgaacctctgtggccgttagcacggttttctgcccgcgtgcccgagaaaccaacggattagaaggacttttaaagatgtgtgaggaaagagctcaccgctgaagaaggctgctgcatcactgaacttcttatcactaacatagcgagattttagtttggacgaatttgaggttataggggagatagcgatggcagaagactaggtggaaatggcacatctaggttggctgcagtcgaaacggtttgagcgtggtcgctgtggctcatcgtcggcaccaattaacgaagcgatgacatctgcgttgttaggggtttcttaaactgagttggtagaaatgcgaagcgtcagggttcccgccggcttcgagcctttcttggcgtatttgtatcttgagctgatttctgcgtcagcccacatctcgctctgatccgcacgccccccgggttgttttgcagtagcagtctcagccctcttctcgtctcattcccaaatcgtaatttcagttcacagctttttatctataatagctttatcaactctttttccgatgctctgcaccagatctcttaaaatataaaattaccttgcaaggtattgtttggaatacacggtattttcatgaagacaactattaatagaaaaatcagagtccagaactatggttctccatttctggtatactggtttgcagaagccttacattaagatttcataaatgattgtttgctgttaagtgcaacaacatcacagtagagctacataaagattgaaaggagaatatttatcaagtggcaccagaatggactgattaaaatagaatggcctaattggaaagaatttcaggatcaccggtttctcctgcttcatggacaggccttcagtatttggcatcacctttacatggagcacaaagatgatgatgatgatgatgtgtcttttgccaaatggatgagcagcttctggggccacagctggagagaggaggatcagagaggactccgggaacgccaccgactgcaagccaccagtcacaggaaaacctccctgccctgcccacttcctgtgcttcccagaattccatcatctgactgccatcctagaaggcattctcatgaggaccaggaattccgatgccgatcgtctgaccgtcttcctagaaggcattctcatgaggaccaagaatttcgatgccgtagccacgtacgggattacagaaaatactcagaggatggggtcattcaaggaggccactgggaatcaaaaggaagattcccattccaaaattgagaaattttcagagtccttttgaacggcaactgtgctttagaaccaagcgttctgcctctttgggacctgaaagcagaaaggagagaaatgaaagagaatgcctgaggatggagataaaatcccgaaagaaagtagaggaagaaaggagctctaggaaagaagaacatggagaagcacacatggctccctgtttgaaaaagggctgaataa

SEQ ID NO: 285668 - DNA, 1130 bp, Homo sapiens
ttccgggttaagggaaagcgtgggtgtgagtaggagtcttcggaaaccctttttctttcttttcgccccgctgctgttcgggagatggacttctggagtccccgtcgtagctggtgttgtcccctctaccttcaggaaagaagggcagatggccctcttgcctactgaagccgaggaggggcgcgtatacagcgggctaagggcgctcaagagatccgagtggaagaaaaagcagcggcacagcactggaatgggcgggagtggcagaagagttgtgaaggctattggctagcaagggtggtgggcggggcgtagaccgagctacccagtttactggtcgatttcggatccagttttccagttatagccacgttggcacctcttgaacctctgtggccgttagcacggttttctgcccgcgtgcccgagaaaccaacggattagaaggacttttaaagatgtgtgaggaaagagctcaccgctgaagaaggctgctgcatcactgaacttcttatcactaacatagcgagattttagtttggacgaatttgaggttataggggagatagcgatggcagaagactaggtggaaatggcacatctaggttggctgcagtcgaaacggtttgagcgtggtcgctgtggctcatcgtcggcaccaattaacgaagcgatgacatctgcgttgttaggggtttcttaaactgagttggtagaaatgcgaagcgtcagggttcccgccggcttcgagcctttcttggcgtatttgtatcttgagctgatttctgcgtcagcccacatctcgctctgatccgcacgccccccgggttgttttgcagtagcagtctcagccctcttctcgtctcattcccaaatcgtaatttcagttcacagctttttatctataatagctttatcaactctttttccgatgctctgcaccagatctcttaaaatataaaattaccttgcaaggtattgtttggaatacacggtattttaatagaataaagaaaaatttgaaaatataatggaaggtatttaaagagccacccacatagcttcaccaacccttctcacacatcaactcataaatcatcttaaataaaagtcattggtatgactcttga

SEQ ID NO: 285669 - DNA, 734 bp, Homo sapiens
atcggagaccattttaaaaagaccagtttcattttgtcttttgggagagatcctgggtttcattgtcagccctgttgggtgatatttccctctgtcgcatttagggacaggccttcagtatttggcatcacctttacatggagcacaaagatgatgatgatgatgatgtgtcttttgccaaatggatgagcagcttctggggccacagctggagagaggaggatcagagaggactccgggaacgccaccgactgcaagccaccagtcacaggaaaacctccctgccctgcccacttcctgtgcttcccagaattccatcatctgactgccatcctagaaggcattctcatgaggaccaggaattccgatgccgatcgtctgaccgtcttcctagaaggcattctcatgaggaccaagaatttcgatgccgtagccacgtacgggattacagaaaatactcagaggatggggtcattcaaggaggccactgggaatcaaaaggaagattcccattccaaaattgagaaattttcagagtccttttgaacggcaactgtgctttagaaccaagcgttctgcctctttgggacctgaaagcagaaaggagagaaatgaaagagaatgcctgaggatggagataaaatcccgaaagaaagtagaggaagaaaggagctctaggaaagaagaacatggagaagcacacatggctccctgtttgaaaaagggctgaataa

SEQ ID NO: 285670 - DNA, 678 bp, Homo sapiens
atcggagaccattttaaaaagaccagtttcattttgtcttttgggagagatcctgggtttcattgtcagccctgttgggtgatatttccctctgtcgcatttagggacaggccttcagtatttggcatcacctttacatggagcacaaagatgatgatgatgatgatgtgtcttttgccaaatggatgagcagcttctggggccacagctggagagaggaggatcagagaggactccgggaacgccaccgactgcaagccaccagtcacaggaaaacctccctgccctgcccacttcctgtgcttcccagaattccatcatctgactgccatcctagaaggcattctcattgaggaccaagaatttcgatgccgtagccacgtacgggattacagaaaatactcagaggatggggtcattcaaggaggccactgggaatcaaaaggaagattcccattccaaaattgagaaattttcagagtccttttgaacggcaactgtgctttagaaccaagcgttctgcctctttgggacctgaaagcagaaaggagagaaatgaaagagaatgcctgaggatggagataaaatcccgaaagaaagtagaggaagaaaggagctctaggaaagaagaacatggagaagcacacatggctccctgtttgaaaaagggctgaataa

SEQ ID NO: 285671 - DNA, 1943 bp, Homo sapiens
ttccgggttaagggaaagcgtgggtgtgagtaggagtcttcggaaaccctttttctttcttttcgccccgctgctgttcgggagatggacttctggagtccccgtcgtagctggtgttgtcccctctaccttcaggaaagaagggcagatggccctcttgcctactgaagccgaggaggggcgcgtatacagcgggctaagggcgctcaagagatccgagtggaagaaaaagcagcggcacagcactggaatgggcgggagtggcagaagagttgtgaaggctattggctagcaagggtggtgggcggggcgtagaccgagctacccagtttactggtcgatttcggatccagttttccagttatagccacgttggcacctcttgaacctctgtggccgttagcacggttttctgcccgcgtgcccgagaaaccaacggattagaaggacttttaaagatgtgtgaggaaagagctcaccgctgaagaaggctgctgcatcactgaacttcttatcactaacatagcgagattttagtttggacgaatttgaggttataggggagatagcgatggcagaagactaggtggaaatggcacatctaggttggctgcagtcgaaacggtttgagcgtggtcgctgtggctcatcgtcggcaccaattaacgaagcgatgacatctgcgttgttaggggtttcttaaactgagttggtagaaatgcgaagcgtcagggttcccgccggcttcgagcctttcttggcgtatttgtatcttgagctgatttctgcgtcagcccacatctcgctctgatccgcacgccccccgggttgttttgcagtagcagtctcagccctcttctcgtctcattcccaaatcgtaatttcagttcacagctttttatctataatagctttatcaactctttttccgatgctctgcaccagatctcttaaaatataaaattaccttgcaaggtattgtttggaatacacggtattttcatgaagacaactattaatagaaaaatcagagtccagaactatggttctccatttctggtatactggtttgcagaagccttacattaagatttcataaatgattgtttgctgttaagtgcaacaacatcacagtagagctacataaagattgaaaggagaatatttatcaagtggcaccagaatggactgattaaaatagaatggcctaattggaaagaatttcaggatcaccggtttctcctgcttcatgtttactcaaactcctagtagtaaagtggtaaattcagcgtatatgattcacattatacctgggacaggccttcagtatttggcatcacctttacatggagcacaaagatgatgatgatgatgatgtgtcttttgccaaatggatgagcagcttctggggccacagctggagagaggaggatcagagaggactccgggaacgccaccgactgcaagccaccagtcacaggaaaacctccctgccctgcccacttcctgtgcttcccagaattccatcatctgactgccatcctagaaggcattctcatgaggaccaggaattccgatgccgatcgtctgaccgtcttcctagaaggcattctcatgaggaccaagaatttcgatgccgtagccacgtacgggattacagaaaatactcagaggatggggtcattcaaggaggccactgggaatcaaaaggaagattcccattccaaaattgagaaattttcagagtccttttgaacggcaactgtgctttagaaccaagcgttctgcctctttgggacctgaaagcagaaaggagagaaatgaaagagaatgcctgaggatggagataaaatcccgaaagaaagtagaggaagaaaggagctctaggaaagaagaacatggagaagcacacatggctccctgtttgaaaaagggctgaataa

SEQ ID NO: 285672 - DNA, 2090 bp, Homo sapiens
ggccgctttgggggccgcggtctctccgcagctcgcgggtcacatggcccgcctgagcaaggggagccctgcgcctgagctgcgaggcgggaggaggtgaggctccggcgcacacccaaaccgcgctgcgcccgctccttccgggccccggagatggcgcctccaccgggatgagctagccagcctgggcaataccagaggcggccctcggcgcgcgcaggggaccgagctggtcgccccaaccgggtttgatttctgatgactctggcctgagttccaggatggttttttcttgggaccagacatgaacaaaagttgacctcatgagcacttcaacctctccagctgccatgctcctccggaggctgcggcgactgtcctggggcagcactgctgtccagctcttcatcctaacagtggtgacgtttggcctgctggcccccctggcctgtcaccgacttctacactcttacttctatctgcgccattggcatctgaaccaaatgagccaagagttcctgcagcaaagcttgaaagagggtgaggctgccctccactattttgaggagcttccctctgccaatggctcagtgcccattgtctggcaggccaccccccggccctggctggtgatcaccatcatcactgtggacaggcagcctggcttccactacgtcctgcaggttgtgtcccagttccaccggcttcttcagcaatgtggcccccagtgcgaggggcaccaactcttcctgtgcaacgtggagcgtagtgtgagccattttgatgccaagttgctctccaagtatgtccctgtggccaatcgctatgagggcactgaggatgattatggtgatgacccttcgaccaactcgtttgagaaagagaagcaggactatgtctattgcctggagtcatccctgcagacctacaacccagactacgtcctgatggtagaagacgatgctgtaccagaagagcagatcttcccagtcttggagcaccttctgcgggctcgcttctctgagccacatctcagagatgccctttatctcaagctgtatcaccccgagaggctccagcactacatcaatccagagcccatgcggatcctggaatgggttggtgtaggcatgttgctggggcccttactaacctggatatacatgaggtttgccagccgcccagggtttagctggcctgtaatgctcttcttctccctgtatagcatgggtctggtggagctggtgggtcggcactatttcctggaactgcggcggctgagtccttccctgtacagtgtggttcctgcctctcagtgttgcaccccagccatgctcttcccggcacctgcggcccgccggaccctcacctacctgtcccaagtgtactgccacaagggctttggcaaggacatggcactgtactcgctgttgagggccaagggagagagggcctatgtagtggagccgaacctcgtgaaacacatcgggctcttctccagtctccggtacaactttcatcccagtctcctctagggtgccaagagatgcctttctgaagttggccacttcttgaagattcaaatatttatctctttatttagacatggttgcctgcaggtatttcactgtttactgttgttagagatataggcactggggcagctgaggaacctcaatatgttaagagccttggctttggtagcctcctggcaggagcagcagtttgccacaggtccggacctctccctccacacagccacactgcctcatgcagtctgacccacccagtgagggtgcatttgaacactgattatattctccatttgtttttaagctctgctttgtgttagagcttgtgactgccaaaaattttgtgcacagtgatatgactgttttaggatcttaagggtagaattttgtgaaaggtgagatcctttggaattgagttctttctcattgggtatgaaaatggatgtatgtttagaatatatgcccaacgaggcaggaccatgtggatagattccatttgtttccttgacctgatgtaataaaaactgataaaagccgtgcagtgcccggcatcttgga

SEQ ID NO: 285673 - DNA, 2419 bp, Homo sapiens
ggccgctttgggggccgcggtctctccgcagctcgcgggtcacatggcccgcctgagcaaggggagccctgcgcctgagctgcgaggcgggaggaggtgaggctccggcgcacacccaaaccgcgctgcgcccgctccttccgggccccggagatggcgcctccaccgggatgagctagccagcctgggcaataccagaggcggccctcggcgcgcgcaggggaccgagctggtcgccccaaccgggtttgatttctgatgactctggcctgagttccaggatggttttttcttgggaccagacatgaacaaaagttgacctcatgagcacttcaacctctccagctgccatgctcctccggaggctgcggcgactgtcctggggcagcactgctgtccagctcttcatcctaacagtggtgacgtttggcctgctggcccccctggcctgtcaccgacttctacactcttacttctatctgcgccattggcatctgaaccaaatgagccaagagttcctgcagcaaagcttgaaagagggtgaggctgccctccactattttgaggagcttccctctgccaatggctcagtgcccattgtctggcaggccaccccccggccctggctggtgatcaccatcatcactgtggacaggcagcctggcttccactacgtcctgcaggttgtgtcccagttccaccggcttcttcagcaatgtggcccccagtgcgaggggcaccaactcttcctgtgcaacgtggagcgtagtgtgagccattttgatgccaagttgctctccaagtatgtccctgtggccaatcgctatgagggcactgaggatgattatggtgatgacccttcgaccaactcgtttgagaaagagaagcaggactatgtctattgcctggagtcatccctgcagacctacaacccagactacgtcctgatggtagaagacgatgctgtaccagaagagcagatcttcccagtcttggagcaccttctgcgggctcgcttctctgagccacatctcagagatgccctttatctcaagctgtatcaccccgagaggctccagcactacatcaatccagagcccatgcggatcctggaatgggttggtgtaggcatgttgctggggcccttactaacctggatatacatgaggtttgccagccgcccagggtttagctggcctgtaatgctcttcttctccctgtatagcatgggtctggtggagctggtgggtcggcactatttcctggaactgcggcggctgagtccttccctgtacagtgtggttcctgcctctcagtgttgcaccccagccatgctcttcccggcacctgcggcccgccggaccctcacctacctgtcccaagtgtactgccacaagggctttggcaaggacatggcactgtactcgctgttgagggccaagggagagagggcctatgtagtggagccgaacctcgtgaaacacatcgggctcttctccagtctccggtacaactttcatcccagtctcctctagggtgccaagagatgcctttctgaagttggccacttcttgaagattcaaatatttatctctttatttagacatggttgcctgcaggtatttcactgtttactgttgttagagatataggcactggggcagctgaggaacctcaatatgttaagagccttggctttggtagcctcctggcaggagcagcagtttgccacaggtccggacctctccctccacacagccacactgcctcatgcagtctgacccacccagtgagggtgcatttgaacactgattatattctccatttgtttttaagctctgctttgtgttagagcttgtgactgccaaaaattttgtgcacagtgatatgactgttttaggatcttaagggtagaattttgtgaaaggtgagatcctttggaattgagttctttctcattgggtatgaaaatggatgtatgtttagaatatatgcccaacgaggcaggaccatgtggatagattccatttgtttccttgacctgatgtaataaaaactgataaaagccgtgcagtgcccggcatcttggaggcaggtgatctggcttttctgttacctgggattttcttttcctatatatctgtagtgcactgataattgatattgttagtgagaactttaaggcacgacaagatctggaagagcttgtgaaccatcaaagtcagattgcttatgttgagtagtgatttaacattgaacatttctgtactactctgactctttgaaaattggacatttcagaatgatacaatataggggagctctttacaagtagcatatcatttttcctgactttcctggctgactgcttaccttcatttctttttcttctaggtagcatgatgttatagaaaaaaaa

SEQ ID NO: 285674 - DNA, 2145 bp, Homo sapiens
ggccgctttgggggccgcggtctctccgcagctcgcgggtcacatggcccgcctgagcaaggggagccctgcgcctgagctgcgaggcgggaggaggtgaggctccggcgcacacccaaaccgcgctgcgcccgctccttccgggccccggagatggcgcctccaccgggatgagctagccagcctgggcaataccagaggcggccctcggcgcgcgcaggggaccgagctggtcgccccaaccggcaaagcagtcatctaatcttgaatgaaggatctgatcccagctcctgtgtcctaggtttgatttctgatgactctggcctgagttccaggatggttttttcttgggaccagacatgaacaaaagttgacctcatgagcacttcaacctctccagctgccatgctcctccggaggctgcggcgactgtcctggggcagcactgctgtccagctcttcatcctaacagtggtgacgtttggcctgctggcccccctggcctgtcaccgacttctacactcttacttctatctgcgccattggcatctgaaccaaatgagccaagagttcctgcagcaaagcttgaaagagggtgaggctgccctccactattttgaggagcttccctctgccaatggctcagtgcccattgtctggcaggccaccccccggccctggctggtgatcaccatcatcactgtggacaggcagcctggcttccactacgtcctgcaggttgtgtcccagttccaccggcttcttcagcaatgtggcccccagtgcgaggggcaccaactcttcctgtgcaacgtggagcgtagtgtgagccattttgatgccaagttgctctccaagtatgtccctgtggccaatcgctatgagggcactgaggatgattatggtgatgacccttcgaccaactcgtttgagaaagagaagcaggactatgtctattgcctggagtcatccctgcagacctacaacccagactacgtcctgatggtagaagacgatgctgtaccagaagagcagatcttcccagtcttggagcaccttctgcgggctcgcttctctgagccacatctcagagatgccctttatctcaagctgtatcaccccgagaggctccagcactacatcaatccagagcccatgcggatcctggaatgggttggtgtaggcatgttgctggggcccttactaacctggatatacatgaggtttgccagccgcccagggtttagctggcctgtaatgctcttcttctccctgtatagcatgggtctggtggagctggtgggtcggcactatttcctggaactgcggcggctgagtccttccctgtacagtgtggttcctgcctctcagtgttgcaccccagccatgctcttcccggcacctgcggcccgccggaccctcacctacctgtcccaagtgtactgccacaagggctttggcaaggacatggcactgtactcgctgttgagggccaagggagagagggcctatgtagtggagccgaacctcgtgaaacacatcgggctcttctccagtctccggtacaactttcatcccagtctcctctagggtgccaagagatgcctttctgaagttggccacttcttgaagattcaaatatttatctctttatttagacatggttgcctgcaggtatttcactgtttactgttgttagagatataggcactggggcagctgaggaacctcaatatgttaagagccttggctttggtagcctcctggcaggagcagcagtttgccacaggtccggacctctccctccacacagccacactgcctcatgcagtctgacccacccagtgagggtgcatttgaacactgattatattctccatttgtttttaagctctgctttgtgttagagcttgtgactgccaaaaattttgtgcacagtgatatgactgttttaggatcttaagggtagaattttgtgaaaggtgagatcctttggaattgagttctttctcattgggtatgaaaatggatgtatgtttagaatatatgcccaacgaggcaggaccatgtggatagattccatttgtttccttgacctgatgtaataaaaactgataaaagccgtgcagtgcccggcatcttgga

SEQ ID NO: 285675 - DNA, 920 bp, Homo sapiens
tgcggccgctccaacatcagaaaggcatctcttggcaccctagaggagactgggatgaaagttggccacttcttgaagattcaaatatttatctctttatttagacatggttgcctgcaggtatttcactgtttactgttgttagagatataggcactggggcagctgaggaacctcaatatgttaagagccttggctttggtagcctcctggcaggagcagcagtttgccacaggtccggacctctccctccacacagccacactgcctcatgcagtctgacccacccagtgagggtgcatttgaacactgattatattctccatttgtttttaagctctgctttgtgttagagcttgtgactgccaaaaattttgtgcacagtgatatgactgttttaggatcttaagggtagaattttgtgaaaggtgagatcctttggaattgagttctttctcattgggtatgaaaatggatgtatgtttagaatatatgcccaacgaggcaggaccatgtggatagattccatttgtttccttgacctgatgtaataaaaactgataaaagccgtgcagtgcccggcatcttggaggcaggtgatctggcttttctgttacctgggattttcttttcctatatatctgtagtgcactgataattgatattgttagtgagaactttaaggcacgacaagatctggaagagcttgtgaaccatcaaagtcagattgcttatgttgagtagtgatttaacattgaacatttctgtactactctgactctttgaaaattggacatttcagaatgatacaatataggggagctctttacaagtagcatatcatttttcctgactttcctggctgactgcttaccttcatttctttttcttctaggtagcatgatgttatagaaaaaaaa

SEQ ID NO: 285676 - DNA, 630 bp, Homo sapiens
cagcttgtggctgatcagctgggagtccatcctgttccttttgacttcaccctgccatgctgctccacagcagggaagcccaggcggctgtcacattggatggaagaggaggccttgtattctggaagggagccatagacttccttttcgaaagaggcctgaaggccacctggacgagcctcccccagtaccagaacccctcaatgacattgccaagatacaattgttcagcttctgcttcaatattttcagcaacgggaactccctacttggatgcatctttgcaagccaggagaagaaggggctgcaacagcccgagcccctaggaatgcccaggaagctgaggtgagctcaacttgctttgaggatgaagttggtgcatctgcctcacctgcactcctcgccttccagcagcttgcggtaggtggcgatctccacgtccagggccagcttgatgttcatcagctcctggtactcacgcaggagccgagccatgtcctgcttggccttctgcagggcctcctcaaggtccaccagcttggcccgtgcatccttgagagccagttctccccgctgctctgcatcagcaatggccgtttgcaagctggaacactgtaaggacaggaggaa

SEQ ID NO: 285677 - DNA, 387 bp, Homo sapiens
ttttttagacagagtctcgatctgtcacccaggctgtaagtgaaactcagtcttcaaaaacaaaataaaaacaaaaacaaaaacaaaaaaaacaaacaaaaaaataaatacttaaactgttaactatcacataatgattgaggtagggaaattgaggaacaagaggcaacacttttccttttatttcataatgttcagtattgtttaaaaaaatgcatgtattacttctgtaatttaaatattttttaacacccaggataggggtgagagcaggggtgaagacaaaccaagaggtgctaggcttaatttctaaggaaatggatgtaaaaaatcatggaaaaattaactttttctaacttagtcatacatacccccaataatattttc

SEQ ID NO: 285678 - DNA, 1215 bp, Homo sapiens
gtgttcatgggcctcattaagctctgccttccttctgctttttggagcctggcctttggttggccttgaatgaagagtggggccccaaaagtaccactgtcagcactctccagcatcatctggctgtctggcaccatcaaagaattgcatttctgacccaagaagagcttatgggtggatgggggtgggatggaagctggggagaggattgatgccagccagctgcctcacagggtgctggaaacacgtggccatgccattagcatcctgttcggcttctggacgagtttcatctgtgacacctacatagtcctcgcttggatcagcaagataaaaggcagccctgatgttagtgcctcctctgatgagccatacgccagaatccagcagagcagaaggcaatgccacgcagaagaggaccaaagtcaggtgccagaagcaggctgacctggaaaggtggaggaaaagaaggcagaagggagagatgaagcccaagaacctgagtatttttctcaggcaagactcaggactgctctggacattcagaagctgagtgtgcaagtgtgctgtgtagttcaaggccaccaccactgaagaggccaaggacaccttagtaggaattctaacctggcttccagggagaggtgcttccaaattggccctgtaggcaaattcacttttttcaccctctaagcgagtaagtgcttgttcccaatttccatggtttagtcttcagtttcagtctttggtctcctctggtctatcagctcccatctctctcccagtctttttctttattctgtgacacctgttgaatgaggcacatagggtttgtagtcactgtagtgttccttgtggttgtgaggtaataggctaatattatcactttctcagaaagtcttcaaaattatcatgaggaggtgatgcattcatctgctgggaggtgtctgtgtggtcagataagatgatggctacattccattcctatcctgtcattcaatcattcttcctccagggagccactgagggacgtgatagtccaaagcactcagctaaaacggaattgcaaacatggtacccacaactttggtttcttatcatccatttgtatatctgcatgtagtctgtctctgatttagggtttaggttcctctgtatttttttttcttttcctgccctttgagagtttaataaaagccagaagcatcttgtaat

SEQ ID NO: 285679 - DNA, 496 bp, Homo sapiens
catgggtaatttatccagaccatggcccttagaatggattcagtgcactgttatagaaataagtcctaaaccaactagtatcataacctaatgccttagggtagtaaagtacctcttatctcatctggttgactggttaattaggtttgatttggcttgttttttaaaatcatttagaatgaataattttgagggtttgattacatctgtaaatggctaagttttgctgtattctaatataagaatagggctgataaaatattatctttgaaatgtattacacttaaaagattccagctactttttattgagttaaactattttttgtatattagatacaaatttcagtcatttatttccaattgagtatacttaagattttacagttgtggtttgccactggtcataggtgctttgatgatatatagtaagattagacctttaataaaattgtcaaatatataacatgaatattataggtattataaaaaagttg

SEQ ID NO: 285680 - DNA, 2724 bp, Homo sapiens
ggccgtgcaggggcgggctccgagcgtggggtgggcgcttgcgcactgccgctgcggctgttgctgcggagccaggaggggaagcgatggctgggcccgcgtggatctccaaggtctctcggctgctgggggcattccacaacccaaaacaggtgaccagaggttttactggtggtgttcagacagtaactttaattccaggagatggtattggcccagaaatttcagctgcagttatgaagatttttgatgctgccaaagcacctattcagtgggaggagcggaacgtcactgccattcaaggacctggaggaaagtggatgatcccttcagaggctaaagagtccatggataagaacaagatgggcttgaaaggccctttgaagaccccaatagcagccggtcacccatctatgaatttactgctgcgcaaaacatttgacctttacgcgaatgtccgaccatgtgtctctatcgaaggctataaaaccccttacaccgatgtaaatattgtgaccattcgagagaacacagaaggagaatacagtggaattgagcatgtgattgttgatggagtcgtgcagagtatcaagctcatcaccgagggggcgagcaagcgcattgctgagtttgcctttgagtatgcccggaacaaccaccggagcaacgtcacggcggtgcacaaagccaacatcatgcggatgtcagatgggctttttctacaaaaatgcagggaagttgcagaaagctgtaaagatattaaatttaatgagatgtaccttgatacagtatgtttgaatatggtacaagatccttcccaatttgatgttcttgttatgccaaatttgtatggagacatccttagtgacttgtgtgcaggattgatcggaggtctcggtgtgacaccaagtggcaacattggagccaatggggttgcaatttttgagtcggttcatgggacggctccagacattgcaggcaaggacatggcgaatcccacagccctcctgctcagtgccgtgatgatgctgcgccacatgggactttttgaccatgctgcaagaattgaggctgcgtgttttgctacaattaaggacggaaagagcttgacaaaagatttgggaggcaatgcaaaatgctcagacttcacagaggaaatctgtcgccgagtaaaagatttagattaacacttctacaactggcatttacatcagtcactctaaatggacaccacatgaacctctgtttagaatacctacgtatgtatgcattggtttgcttgtttcttgacagtacatttttagatctggccttttcttaacaaaatctgtgcaaaagatgcaggtggatgtccctaggtctgttttcaaagaactttttccaagtgcttgttttatttattaagtgtctacctggtaaatgttttttttgtaaactctgagtggactgtatcatttgctattctaaaccattttacacttaagttaaaatagtttctcttcagctgtaaataacaggatacagaattaacaagagaaaatgtctaactttttaagaaaaaccttattttcttcggtttttgaaaaacataatggaaataaaacaggatattgacataatagcacaaaatgacactcttctaaaactaaatgggcacaagagaattttcctgggaaagttcacatcaaaaagagtgaatgtggtatatttctaaatgatatggaaaatagagacagatttgtcctttacagaaattactgagtgtgaataaaaacttcagatccaagaaatatataatgagagatataatttttgttaataagacaaaggtaatatattggatacaaagacacaaatgtattgtgtgttcaattattttgttgtcttgagatttaatattctttccaagagcttttaatgaagcagagagctagtacttcattttcactggatacattttcagcatcatgagttgtcacagcctctgagcccctgatctgaagccagaagggctgagtgtattgtaaacttattcttgcatgttgctgtctgggaatggaccacactacagcaggtagttctgggggcgatactgccgaaaggcccgaacacatgtattttggctgcaattgaggaacttgggatgctattaattttgtatttcagcaactgccccttctcctatcccaaagcaccaattactgccctctgcctcagcagtaccagtataagatgacattccaaagactggaggcaactcagcctgagttaattcacaaaattatgccatgctggggcttgagcttgagcttgggcttaggcttgggctcagcttttgaccctcaggcatctcctttcccttcctgtcttcctctcccttctcctctgctgcagcatgattttcttaatcttcagacactcactattttcatgaacagttaccctctgtccccacaaccaaagacaactcatggcctcctttggcccttgtgtaacattgcaaacctgtggctttgcaaaatgtacccaggtcacaaggggatttttttttttttagcaatgatatccctgtctgggtcactttttaagcttgtaaccgcccccccagacttataatcttaaatgtattttcctttgtttaagctgctgcttcctctgtttcattggattgtgccagttatcagtggctcttgggttcaaagtaataaagaattccaaaactga

SEQ ID NO: 285681 - DNA, 2587 bp, Homo sapiens
aggcgacagagcgggactctatctcaaaaacgaagttgaaaaaagtttgttcatcattgcagtatgaatgccagtttcctttaagtctctccagctcactgtgctctgtgatgtggcatctaggcacctattcagtgggaggagcggaacgtcactgccattcaaggacctggaggaaagtggatgatcccttcagaggctaaagagtccatggataagaacaagatgggcttgaaaggccctttgaagaccccaatagcagccggtcacccatctatgaatttactgctgcgcaaaacatttgacctttacgcgaatgtccgaccatgtgtctctatcgaaggctataaaaccccttacaccgatgtaaatattgtgaccattcgagagaacacagaaggagaatacagtggaattgagcatgtgattgttgatggagtcgtgcagagtatcaagctcatcaccgagggggcgagcaagcgcattgctgagtttgcctttgagtatgcccggaacaaccaccggagcaacgtcacggcggtgcacaaagccaacatcatgcggatgtcagatgggctttttctacaaaaatgcagggaagttgcagaaagctgtaaagatattaaatttaatgagatgtaccttgatacagtatgtttgaatatggtacaagatccttcccaatttgatgttcttgttatgccaaatttgtatggagacatccttagtgacttgtgtgcaggattgatcggaggtctcggtgtgacaccaagtggcaacattggagccaatggggttgcaatttttgagtcggttcatgggacggctccagacattgcaggcaaggacatggcgaatcccacagccctcctgctcagtgccgtgatgatgctgcgccacatgggactttttgaccatgctgcaagaattgaggctgcgtgttttgctacaattaaggacggaaagagcttgacaaaagatttgggaggcaatgcaaaatgctcagacttcacagaggaaatctgtcgccgagtaaaagatttagattaacacttctacaactggcatttacatcagtcactctaaatggacaccacatgaacctctgtttagaatacctacgtatgtatgcattggtttgcttgtttcttgacagtacatttttagatctggccttttcttaacaaaatctgtgcaaaagatgcaggtggatgtccctaggtctgttttcaaagaactttttccaagtgcttgttttatttattaagtgtctacctggtaaatgttttttttgtaaactctgagtggactgtatcatttgctattctaaaccattttacacttaagttaaaatagtttctcttcagctgtaaataacaggatacagaattaacaagagaaaatgtctaactttttaagaaaaaccttattttcttcggtttttgaaaaacataatggaaataaaacaggatattgacataatagcacaaaatgacactcttctaaaactaaatgggcacaagagaattttcctgggaaagttcacatcaaaaagagtgaatgtggtatatttctaaatgatatggaaaatagagacagatttgtcctttacagaaattactgagtgtgaataaaaacttcagatccaagaaatatataatgagagatataatttttgttaataagacaaaggtaatatattggatacaaagacacaaatgtattgtgtgttcaattattttgttgtcttgagatttaatattctttccaagagcttttaatgaagcagagagctagtacttcattttcactggatacattttcagcatcatgagttgtcacagcctctgagcccctgatctgaagccagaagggctgagtgtattgtaaacttattcttgcatgttgctgtctgggaatggaccacactacagcaggtagttctgggggcgatactgccgaaaggcccgaacacatgtattttggctgcaattgaggaacttgggatgctattaattttgtatttcagcaactgccccttctcctatcccaaagcaccaattactgccctctgcctcagcagtaccagtataagatgacattccaaagactggaggcaactcagcctgagttaattcacaaaattatgccatgctggggcttgagcttgagcttgggcttaggcttgggctcagcttttgaccctcaggcatctcctttcccttcctgtcttcctctcccttctcctctgctgcagcatgattttcttaatcttcagacactcactattttcatgaacagttaccctctgtccccacaaccaaagacaactcatggcctcctttggcccttgtgtaacattgcaaacctgtggctttgcaaaatgtacccaggtcacaaggggatttttttttttttagcaatgatatccctgtctgggtcactttttaagcttgtaaccgcccccccagacttataatcttaaatgtattttcctttgtttaagctgctgcttcctctgtttcattggattgtgccagttatcagtggctcttgggttcaaagtaataaagaattccaaaactga

SEQ ID NO: 285682 - DNA, 938 bp, Homo sapiens
ggccgtgcaggggcgggctccgagcgtggggtgggcgcttgcgcactgccgctgcggctgttgctgcggagccaggaggggaagcgatggctgggcccgcgtggatctccaaggtctctcggctgctgggggcattccacaacccaaaacaggtgaccagaggttttactggtggtatcaactttgccaagcttatgtagattactcttagatttaagcagacagttttatagaggaactaagaaaaaaatggaagctctcttgataaaaagtctgattttccctgagtaccaaaacagacctcagtaatattttggaaatgtgtctgaaaatgttttgcaagactgaagaagttgcatgagaagctttccaggatcacaatggaaaggaaaggaaaacacttgccttcatgagaaaccgtctaaattttagttcagacagtaactttaattccaggagatggtattggcccagaaatttcagctgcagttatgaagatttttgatgctgccaaagcacctattcagtgggaggagcggaacgtcactgccattcaaggacctggaggaaagtggatgatcccttcagaggctaaagagtccatggataagaacaagatgggcttgaaaggccctttgaagaccccaatagcagccggtcacccatctatgaatttactgctgcgcaaaacatttgacctttacgcgaatgtccgaccatgtgtctctatcgaaggctataaaaccccttacaccgatgtaaatattgtgaccattcgagagaacacagaaggagaatacagtggaattgagcatgtgattgtccacttgacggcgtgcagagtattaagctcatcacccgagcgggaagcaaagcattgggagattggcttaagatggccggaaacccggggaccgcggggggcaaagacaatatgc

SEQ ID NO: 285683 - DNA, 2979 bp, Homo sapiens
ggccgtgcaggggcgggctccgagcgtggggtgggcgcttgcgcactgccgctgcggctgttgctgcggagccaggaggggaagcgatggctgggcccgcgtggatctccaaggtctctcggctgctgggggcattccacaacccaaaacaggtgaccagaggttttactggtggtatcaactttgccaagcttatgtagattactcttagatttaagcagacagttttatagaggaactaagaaaaaaatggaagctctcttgataaaaagtctgattttccctgagtaccaaaacagacctcagtaatattttggaaatgtgtctgaaaatgttttgcaagactgaagaagttgcatgagaagctttccaggatcacaatggaaaggaaaggaaaacacttgccttcatgagaaaccgtctaaattttagttcagacagtaactttaattccaggagatggtattggcccagaaatttcagctgcagttatgaagatttttgatgctgccaaagcacctattcagtgggaggagcggaacgtcactgccattcaaggacctggaggaaagtggatgatcccttcagaggctaaagagtccatggataagaacaagatgggcttgaaaggccctttgaagaccccaatagcagccggtcacccatctatgaatttactgctgcgcaaaacatttgacctttacgcgaatgtccgaccatgtgtctctatcgaaggctataaaaccccttacaccgatgtaaatattgtgaccattcgagagaacacagaaggagaatacagtggaattgagcatgtgattgttgatggagtcgtgcagagtatcaagctcatcaccgagggggcgagcaagcgcattgctgagtttgcctttgagtatgcccggaacaaccaccggagcaacgtcacggcggtgcacaaagccaacatcatgcggatgtcagatgggctttttctacaaaaatgcagggaagttgcagaaagctgtaaagatattaaatttaatgagatgtaccttgatacagtatgtttgaatatggtacaagatccttcccaatttgatgttcttgttatgccaaatttgtatggagacatccttagtgacttgtgtgcaggattgatcggaggtctcggtgtgacaccaagtggcaacattggagccaatggggttgcaatttttgagtcggttcatgggacggctccagacattgcaggcaaggacatggcgaatcccacagccctcctgctcagtgccgtgatgatgctgcgccacatgggactttttgaccatgctgcaagaattgaggctgcgtgttttgctacaattaaggacggaaagagcttgacaaaagatttgggaggcaatgcaaaatgctcagacttcacagaggaaatctgtcgccgagtaaaagatttagattaacacttctacaactggcatttacatcagtcactctaaatggacaccacatgaacctctgtttagaatacctacgtatgtatgcattggtttgcttgtttcttgacagtacatttttagatctggccttttcttaacaaaatctgtgcaaaagatgcaggtggatgtccctaggtctgttttcaaagaactttttccaagtgcttgttttatttattaagtgtctacctggtaaatgttttttttgtaaactctgagtggactgtatcatttgctattctaaaccattttacacttaagttaaaatagtttctcttcagctgtaaataacaggatacagaattaacaagagaaaatgtctaactttttaagaaaaaccttattttcttcggtttttgaaaaacataatggaaataaaacaggatattgacataatagcacaaaatgacactcttctaaaactaaatgggcacaagagaattttcctgggaaagttcacatcaaaaagagtgaatgtggtatatttctaaatgatatggaaaatagagacagatttgtcctttacagaaattactgagtgtgaataaaaacttcagatccaagaaatatataatgagagatataatttttgttaataagacaaaggtaatatattggatacaaagacacaaatgtattgtgtgttcaattattttgttgtcttgagatttaatattctttccaagagcttttaatgaagcagagagctagtacttcattttcactggatacattttcagcatcatgagttgtcacagcctctgagcccctgatctgaagccagaagggctgagtgtattgtaaacttattcttgcatgttgctgtctgggaatggaccacactacagcaggtagttctgggggcgatactgccgaaaggcccgaacacatgtattttggctgcaattgaggaacttgggatgctattaattttgtatttcagcaactgccccttctcctatcccaaagcaccaattactgccctctgcctcagcagtaccagtataagatgacattccaaagactggaggcaactcagcctgagttaattcacaaaattatgccatgctggggcttgagcttgagcttgggcttaggcttgggctcagcttttgaccctcaggcatctcctttcccttcctgtcttcctctcccttctcctctgctgcagcatgattttcttaatcttcagacactcactattttcatgaacagttaccctctgtccccacaaccaaagacaactcatggcctcctttggcccttgtgtaacattgcaaacctgtggctttgcaaaatgtacccaggtcacaaggggatttttttttttttagcaatgatatccctgtctgggtcactttttaagcttgtaaccgcccccccagacttataatcttaaatgtattttcctttgtttaagctgctgcttcctctgtttcattggattgtgccagttatcagtggctcttgggttcaaagtaataaagaattccaaaactga

SEQ ID NO: 285684 - DNA, 2955 bp, Homo sapiens
ggccgtgcaggggcgggctccgagcgtggggtgggcgcttgcgcactgccgctgcggctgttgctgcggagccaggaggggaagcgatggctgggcccgcgtggatctccaaggtctctcggctgctgggggcattccacaacccaaaacagatcaactttgccaagcttatgtagattactcttagatttaagcagacagttttatagaggaactaagaaaaaaatggaagctctcttgataaaaagtctgattttccctgagtaccaaaacagacctcagtaatattttggaaatgtgtctgaaaatgttttgcaagactgaagaagttgcatgagaagctttccaggatcacaatggaaaggaaaggaaaacacttgccttcatgagaaaccgtctaaattttagttcagacagtaactttaattccaggagatggtattggcccagaaatttcagctgcagttatgaagatttttgatgctgccaaagcacctattcagtgggaggagcggaacgtcactgccattcaaggacctggaggaaagtggatgatcccttcagaggctaaagagtccatggataagaacaagatgggcttgaaaggccctttgaagaccccaatagcagccggtcacccatctatgaatttactgctgcgcaaaacatttgacctttacgcgaatgtccgaccatgtgtctctatcgaaggctataaaaccccttacaccgatgtaaatattgtgaccattcgagagaacacagaaggagaatacagtggaattgagcatgtgattgttgatggagtcgtgcagagtatcaagctcatcaccgagggggcgagcaagcgcattgctgagtttgcctttgagtatgcccggaacaaccaccggagcaacgtcacggcggtgcacaaagccaacatcatgcggatgtcagatgggctttttctacaaaaatgcagggaagttgcagaaagctgtaaagatattaaatttaatgagatgtaccttgatacagtatgtttgaatatggtacaagatccttcccaatttgatgttcttgttatgccaaatttgtatggagacatccttagtgacttgtgtgcaggattgatcggaggtctcggtgtgacaccaagtggcaacattggagccaatggggttgcaatttttgagtcggttcatgggacggctccagacattgcaggcaaggacatggcgaatcccacagccctcctgctcagtgccgtgatgatgctgcgccacatgggactttttgaccatgctgcaagaattgaggctgcgtgttttgctacaattaaggacggaaagagcttgacaaaagatttgggaggcaatgcaaaatgctcagacttcacagaggaaatctgtcgccgagtaaaagatttagattaacacttctacaactggcatttacatcagtcactctaaatggacaccacatgaacctctgtttagaatacctacgtatgtatgcattggtttgcttgtttcttgacagtacatttttagatctggccttttcttaacaaaatctgtgcaaaagatgcaggtggatgtccctaggtctgttttcaaagaactttttccaagtgcttgttttatttattaagtgtctacctggtaaatgttttttttgtaaactctgagtggactgtatcatttgctattctaaaccattttacacttaagttaaaatagtttctcttcagctgtaaataacaggatacagaattaacaagagaaaatgtctaactttttaagaaaaaccttattttcttcggtttttgaaaaacataatggaaataaaacaggatattgacataatagcacaaaatgacactcttctaaaactaaatgggcacaagagaattttcctgggaaagttcacatcaaaaagagtgaatgtggtatatttctaaatgatatggaaaatagagacagatttgtcctttacagaaattactgagtgtgaataaaaacttcagatccaagaaatatataatgagagatataatttttgttaataagacaaaggtaatatattggatacaaagacacaaatgtattgtgtgttcaattattttgttgtcttgagatttaatattctttccaagagcttttaatgaagcagagagctagtacttcattttcactggatacattttcagcatcatgagttgtcacagcctctgagcccctgatctgaagccagaagggctgagtgtattgtaaacttattcttgcatgttgctgtctgggaatggaccacactacagcaggtagttctgggggcgatactgccgaaaggcccgaacacatgtattttggctgcaattgaggaacttgggatgctattaattttgtatttcagcaactgccccttctcctatcccaaagcaccaattactgccctctgcctcagcagtaccagtataagatgacattccaaagactggaggcaactcagcctgagttaattcacaaaattatgccatgctggggcttgagcttgagcttgggcttaggcttgggctcagcttttgaccctcaggcatctcctttcccttcctgtcttcctctcccttctcctctgctgcagcatgattttcttaatcttcagacactcactattttcatgaacagttaccctctgtccccacaaccaaagacaactcatggcctcctttggcccttgtgtaacattgcaaacctgtggctttgcaaaatgtacccaggtcacaaggggatttttttttttttagcaatgatatccctgtctgggtcactttttaagcttgtaaccgcccccccagacttataatcttaaatgtattttcctttgtttaagctgctgcttcctctgtttcattggattgtgccagttatcagtggctcttgggttcaaagtaataaagaattccaaaactga

SEQ ID NO: 285685 - DNA, 2573 bp, Homo sapiens
cattccacaacccacagcaggactggttcagacagtaactttaattccaggagatggtattggcccagaaatttcagctgcagttatgaagatttttgatgctgccaaagcacctattcagtgggaggagcggaacgtcactgccattcaaggacctggaggaaagtggatgatcccttcagaggctaaagagtccatggataagaacaagatgggcttgaaaggccctttgaagaccccaatagcagccggtcacccatctatgaatttactgctgcgcaaaacatttgacctttacgcgaatgtccgaccatgtgtctctatcgaaggctataaaaccccttacaccgatgtaaatattgtgaccattcgagagaacacagaaggagaatacagtggaattgagcatgtgattgttgatggagtcgtgcagagtatcaagctcatcaccgagggggcgagcaagcgcattgctgagtttgcctttgagtatgcccggaacaaccaccggagcaacgtcacggcggtgcacaaagccaacatcatgcggatgtcagatgggctttttctacaaaaatgcagggaagttgcagaaagctgtaaagatattaaatttaatgagatgtaccttgatacagtatgtttgaatatggtacaagatccttcccaatttgatgttcttgttatgccaaatttgtatggagacatccttagtgacttgtgtgcaggattgatcggaggtctcggtgtgacaccaagtggcaacattggagccaatggggttgcaatttttgagtcggttcatgggacggctccagacattgcaggcaaggacatggcgaatcccacagccctcctgctcagtgccgtgatgatgctgcgccacatgggactttttgaccatgctgcaagaattgaggctgcgtgttttgctacaattaaggacggaaagagcttgacaaaagatttgggaggcaatgcaaaatgctcagacttcacagaggaaatctgtcgccgagtaaaagatttagattaacacttctacaactggcatttacatcagtcactctaaatggacaccacatgaacctctgtttagaatacctacgtatgtatgcattggtttgcttgtttcttgacagtacatttttagatctggccttttcttaacaaaatctgtgcaaaagatgcaggtggatgtccctaggtctgttttcaaagaactttttccaagtgcttgttttatttattaagtgtctacctggtaaatgttttttttgtaaactctgagtggactgtatcatttgctattctaaaccattttacacttaagttaaaatagtttctcttcagctgtaaataacaggatacagaattaacaagagaaaatgtctaactttttaagaaaaaccttattttcttcggtttttgaaaaacataatggaaataaaacaggatattgacataatagcacaaaatgacactcttctaaaactaaatgggcacaagagaattttcctgggaaagttcacatcaaaaagagtgaatgtggtatatttctaaatgatatggaaaatagagacagatttgtcctttacagaaattactgagtgtgaataaaaacttcagatccaagaaatatataatgagagatataatttttgttaataagacaaaggtaatatattggatacaaagacacaaatgtattgtgtgttcaattattttgttgtcttgagatttaatattctttccaagagcttttaatgaagcagagagctagtacttcattttcactggatacattttcagcatcatgagttgtcacagcctctgagcccctgatctgaagccagaagggctgagtgtattgtaaacttattcttgcatgttgctgtctgggaatggaccacactacagcaggtagttctgggggcgatactgccgaaaggcccgaacacatgtattttggctgcaattgaggaacttgggatgctattaattttgtatttcagcaactgccccttctcctatcccaaagcaccaattactgccctctgcctcagcagtaccagtataagatgacattccaaagactggaggcaactcagcctgagttaattcacaaaattatgccatgctggggcttgagcttgagcttgggcttaggcttgggctcagcttttgaccctcaggcatctcctttcccttcctgtcttcctctcccttctcctctgctgcagcatgattttcttaatcttcagacactcactattttcatgaacagttaccctctgtccccacaaccaaagacaactcatggcctcctttggcccttgtgtaacattgcaaacctgtggctttgcaaaatgtacccaggtcacaaggggatttttttttttttagcaatgatatccctgtctgggtcactttttaagcttgtaaccgcccccccagacttataatcttaaatgtattttcctttgtttaagctgctgcttcctctgtttcattggattgtgccagttatcagtggctcttgggttcaaagtaataaagaattccaaaactga

SEQ ID NO: 285686 - DNA, 2511 bp, Homo sapiens
  misc_feature (1431)..(1431): n is a, c, g, or t
ggccgtgcaggggcgggctccgagcgtggggtgggcgcttgcgcactgccgctgcggctgttgctgcggagccaggaggggaagcgatggctgggcccgcgtggatctccaaggtctctcggctgctgggggcattccacaacccaaaacaggtgaccagaggttttactggtggtgttcagacagtaactttaattccaggagatggtattggcccagaaatttcagctgcagttatgaagatttttgatgctgccaaagcacctattcagtgggaggagcggaacgtcactgccattcaaggacctggaggaaagtggatgatcccttcagaggctaaagagtccatggataagaacaagatgggcttgaaaggccctttgaagaccccaatagcagccggtcacccatctatgaatttactgctgcgcaaaacatttgacctttacgcgaatgtccgaccatgtgtctctatcgaaggctataaaaccccttacaccgatgtaaatattgtgaccattcgagagaacacagaaggagaatacagtggaattgagcatgtgattgttgatggagtcgtgcagagtatcaagctcatcaccgagggggcgagcaagcgcattgctgagtttgcctttgagtatgcccggaacaaccaccggagcaacgtcacggcggtgcacaaagccaacatcatgcggatgtcagatgggctttttctacaaaaatgcagggaagttgcagaaagctgtaaagatattaaatttaatgagatgtaccttgatacagtatgtttgaatatggtacaagatccttcccaatttgatgttcttgttatgccaaatttgtatggagacatccttagtgacttgtgtgcaggattgatcggaggtctcggtgtgacaccaagtggcaacattggagccaatggggttgcaatttttgagtcggttcatgggacggctccagacattgcaggcaaggacatggcgaatcccacagccctcctgctcagtgccgtgatgatgctgcgccacatgggactttttgaccatgctgcaagaattgaggctgcgtgttttgctacaattaaggacggaaagagcttgacaaaagatttgggaggcaatgcaaaatgctcagacttcacagaggaaatctgtcgccgagtaaaagatttagattaacacttctacaactggcatttacatcagtcactctaaatggacaccacatgaacctctgtttagaatacctacgtatgtatgcattggtttgcttgtttcttgacagtacatttttagatctggccttttcttaacaaaatctgtgcaaaagatgcaggtggatgtccctaggtctgttttcaaagaactttttccaggtagacacttaataaataaaacagcacttggacaaagttctttgaanacgaccggtaccgaagagaattttcctgggaaagttcacatcaaaaagagtgaatgtggtatatttctaaatgatatggaaaatagagacagatttgtcctttacagaaattactgagtgtgaataaaaacttcagatccaagaaatatataatgagagatataatttttgttaataagacaaaggtaatatattggatacaaagacacaaatgtattgtgtgttcaattattttgttgtcttgagatttaatattctttccaagagcttttaatgaagcagagagctagtacttcattttcactggatacattttcagcatcatgagttgtcacagcctctgagcccctgatctgaagccagaagggctgagtgtattgtaaacttattcttgcatgttgctgtctgggaatggaccacactacagcaggtagttctgggggcgatactgccgaaaggcccgaacacatgtattttggctgcaattgaggaacttgggatgctattaattttgtatttcagcaactgccccttctcctatcccaaagcaccaattactgccctctgcctcagcagtaccagtataagatgacattccaaagactggaggcaactcagcctgagttaattcacaaaattatgccatgctggggcttgagcttgagcttgggcttaggcttgggctcagcttttgaccctcaggcatctcctttcccttcctgtcttcctctcccttctcctctgctgcagcatgattttcttaatcttcagacactcactattttcatgaacagttaccctctgtccccacaaccaaagacaactcatggcctcctttggcccttgtgtaacattgcaaacctgtggctttgcaaaatgtacccaggtcacaaggggatttttttttttttagcaatgatatccctgtctgggtcactttttaagcttgtaaccgcccccccagacttataatcttaaatgtattttcctttgtttaagctgctgcttcctctgtttcattggattgtgccagttatcagtggctcttgggttcaaagtaataaagaattccaaaactga

SEQ ID NO: 285687 - DNA, 2570 bp, Homo sapiens
ggccgtgcaggggcgggctccgagcgtggggtgggcgcttgcgcactgccgctgcggctgttgctgcggagccaggaggggaagcgatggctgggcccgcgtggatctccaaggtctctcggctgctgggggcattccacaacccaaaacaggtgaccagaggttttactggtggtgttcagacagtaactttaattccaggagatggtattggcccagaaatttcagctgcagttatgaagatttttgatgctgccaaagcacctattcagtgggaggagcggaacgtcactgccattcaaggacctggaggaaagtggatgatcccttcagaggctaaagagtccatggataagaacaagatgggcttgaaaggccctttgaagaccccaatagcagccggtcacccatctatgaatttactgctgcgcaaaacatttgacctttacgcgaatgtccgaccatgtgtctctatcgaaggctataaaaccccttacaccgatgtaaatattgtgaccattcgagagaacacagaaggagaatacagtggaattgagcatgtgattgttgatggagtcgtgcagagtatcaagctcatcaccgagggggcgagcaagcgcattgctgagtttgcctttgagtatgcccggaacaaccaccggagcaacgtcacggcggtgcacaaagccaacatcatgcggatgtcagatgggctttttctacaaaaatgcagggaagttgcagaaagctgtaaagatattaaatttaatgagatgtaccttgatacagtatgtttgaatatggtacaagatccttcccaatttgatgttcttgttatgccaaatttgtatggagacatccttagtgacttgtgtgcaggattgatcggaggtctcggtgtgacaccaagtggcaacattggagccaatggggttgcaatttttgagtcggttcatgggacggctccagacattgcaggcaaggacatggcgaatcccacagccctcctgctcagtgccgtgatgatgctgcgccacatgggactttttgaccatgctgcaagaattgaggctgcgtgttttgctacaattaaggacggaaagagcttgacaaaagatttgggaggcaatgcaaaatgctcagacttcacagaggaaatctgtcgccgagtaaaagatttagattaacacttctacaactggcatttacatcagtcactctaaatggacaccacatgaacctctgtttagaatacctacgtatgtatgcattggtttgcttgtttcttgacagtacatttttagatctggccttttcttaacaaaatctgtgcaaaagatgcaggtggatgtccctaggtctgttttcaaagaactttttccaagtgcttgttttatttattaagtgtctacctggtaaatgttttttttgtaaactctgagtggactgtatcatttgctattctaaaccattttacacttaagttaaaatagtttctcttcagctgtaaataacaggatacagaattaacaagagaaaatgtctaactttttaagaaaaaccttattttcttcggtttttgaaaaacataatggaaataaaacaggatattgacataatagcacaaaatgacactcttctaaaactaaatgggcacaagagaattttcctgggaaagttcacatcaaaaagagtgaatgtggtatatttctaaatgatatggaaaatagagacagatttgtcctttacagaaattactgagtgtgaataaaaacttcagatccaagaaatatataatgagagatataatttttgttaataagacaaaggtaatatattggatacaaagacacaaatgtattgtgtgttcaattattttgttgtcttgagatttaatattctttccaagagcttttaatgaagcagagagctagtacttcattttcactggatacattttcagcatcatgagttgtcacagcctctgagcccctgatctgaagccagaagggctgagtgtattgtaaacttattcttgcatgttgctgtctgggaatggaccacactacagcaggtagttctgggggcgatactgccgaaaggcccgaacacatgtattttggctgcaattgaggaacttgggatgctattaattttgtatttcagcaactgccccttctcctatcccaaagcaccaattactgccctctgcctcagcagtaccagtataagatgacattccaaagactggaggcaactcagcctgagttaattcacaaaattatgccatgctggggcttgagcttgagcttgggcttaggcttgggctcagcttttgaccctcaggcatctcctttcccttcctgtcttcctctcccttctcctctgctgcagcatgattttcttaatcttcagacactcactattttcatgaacagttaccctctgtccccacaaccaaagacaactcatggcctcctttggcccttgtgtaacattgcaaacctgtggctttgcaaaatgtacccaggtcacagaggccaaaggaggccatgagttgtcttgtcgac

SEQ ID NO: 285688 - DNA, 1670 bp, Homo sapiens
ccacgcgtcggacccacgcgtcgtgtttgctacaattaaggacggaaagagcttgacaaaagatttgggaggcaatgcaaaatgctcagacttcacagaggaaatctgtcgccgagtaaaagatttagattaacacttctacaactggcatttacatcagtcactctaaatggacaccacatgaacctctgtttagaatacctacgtatgtatgcattggtttgcttgtttcttgacagtacatttttagatctggccttttcttaacaaaatctgtgcaaaagatgcaggtggatgtccctaggtctgttttcaaagaactttttccaagtgcttgttttatttattaagtgtctacctggtaaatgttttttttgtaaactctgagtggactgtatcatttgctattctaaaccattttacacttaagttaaaatagtttctcttcagctgtaaataacaggatacagaattaacaagagaaaatgtctaactttttaagaaaaaccttattttcttcggtttttgaaaaacataatggaaataaaacaggatattgacataatagcacaaaatgacactcttctaaaactaaatgggcacaagagaattttcctgggaaagttcacatcaaaaagagtgaatgtggtatatttctaaatgatatggaaaatagagacagatttgtcctttacagaaattactgagtgtgaataaaaacttcagatccaagaaatatataatgagagatataatttttgttaataagacaaaggtaatatattggatacaaagacacaaatgtattgtgtgttcaattattttgttgtcttgagatttaatattctttccaagagcttttaatgaagcagagagctagtacttcattttcactggatacattttcagcatcatgagttgtcacagcctctgagcccctgatctgaagccagaagggctgagtgtattgtaaacttattcttgcatgttgctgtctgggaatggaccacactacagcaggtagttctgggggcgatactgccgaaaggcccgaacacatgtattttggctgcaattgaggaacttgggatgctattaattttgtatttcagcaactgccccttctcctatcccaaagcaccaattactgccctctgcctcagcagtaccagtataagatgacattccaaagactggaggcaactcagcctgagttaattcacaaaattatgccatgctggggcttgagcttgagcttgggcttaggcttgggctcagcttttgaccctcaggcatctcctttcccttcctgtcttcctctcccttctcctctgctgcagcatgattttcttaatcttcagacactcactattttcatgaacagttaccctctgtccccacaaccaaagacaactcatggcctcctttggcccttgtgtaacattgcaaacctgtggctttgcaaaatgtacccaggtcacaaggggatttttttttttttagcaatgatatccctgtctgggtcactttttaagcttgtaaccgcccccccagacttataatcttaaatgtattttcctttgtttaagctgctgcttcctctgtttcattggattgtgccagttatcagtggctcttgggttcaaagtaataaagaattccaaaactga

SEQ ID NO: 285689 - DNA, 1886 bp, Homo sapiens
ttggtaagaagtgggctagggcattattaatcttagggcgaaagcctataatcactgcgccgctcataaggggatggccatggctaggtttatagatagttgggtggttggtgtaaataagtgaggcaggagtccgaggaggttagttgtggcaataaaaatgattaaggatactagtataagagatcaggttcgtcctttagtgttgtgtatggttatcatttgttttgaggctgcgtgttttgctacaattaaggacggaaagagcttgacaaaagatttgggaggcaatgcaaaatgctcagacttcacagaggaaatctgtcgccgagtaaaagatttagattaacacttctacaactggcatttacatcagtcactctaaatggacaccacatgaacctctgtttagaatacctacgtatgtatgcattggtttgcttgtttcttgacagtacatttttagatctggccttttcttaacaaaatctgtgcaaaagatgcaggtggatgtccctaggtctgttttcaaagaactttttccaagtgcttgttttatttattaagtgtctacctggtaaatgttttttttgtaaactctgagtggactgtatcatttgctattctaaaccattttacacttaagttaaaatagtttctcttcagctgtaaataacaggatacagaattaacaagagaaaatgtctaactttttaagaaaaaccttattttcttcggtttttgaaaaacataatggaaataaaacaggatattgacataatagcacaaaatgacactcttctaaaactaaatgggcacaagagaattttcctgggaaagttcacatcaaaaagagtgaatgtggtatatttctaaatgatatggaaaatagagacagatttgtcctttacagaaattactgagtgtgaataaaaacttcagatccaagaaatatataatgagagatataatttttgttaataagacaaaggtaatatattggatacaaagacacaaatgtattgtgtgttcaattattttgttgtcttgagatttaatattctttccaagagcttttaatgaagcagagagctagtacttcattttcactggatacattttcagcatcatgagttgtcacagcctctgagcccctgatctgaagccagaagggctgagtgtattgtaaacttattcttgcatgttgctgtctgggaatggaccacactacagcaggtagttctgggggcgatactgccgaaaggcccgaacacatgtattttggctgcaattgaggaacttgggatgctattaattttgtatttcagcaactgccccttctcctatcccaaagcaccaattactgccctctgcctcagcagtaccagtataagatgacattccaaagactggaggcaactcagcctgagttaattcacaaaattatgccatgctggggcttgagcttgagcttgggcttaggcttgggctcagcttttgaccctcaggcatctcctttcccttcctgtcttcctctcccttctcctctgctgcagcatgattttcttaatcttcagacactcactattttcatgaacagttaccctctgtccccacaaccaaagacaactcatggcctcctttggcccttgtgtaacattgcaaacctgtggctttgcaaaatgtacccaggtcacaaggggatttttttttttttagcaatgatatccctgtctgggtcactttttaagcttgtaaccgcccccccagacttataatcttaaatgtattttcctttgtttaagctgctgcttcctctgtttcattggattgtgccagttatcagtggctcttgggttcaaagtaataaagaattccaaaactga

SEQ ID NO: 285690 - DNA, 1264 bp, Homo sapiens
tgaagagaattaacaagagaaaaagttagacattttctcttgttaattctgtatcctgttatttacagctgaagagaaaatgtctaactttttaagaaaaaccttattttcttcggtttttgaaaaacataatggaaataaaacaggatattgacataatagcacaaaatgacactcttctaaaactaaatgggcacaagagaattttcctgggaaagttcacatcaaaaagagtgaatgtggtatatttctaaatgatatggaaaatagagacagatttgtcctttacagaaattactgagtgtgaataaaaacttcagatccaagaaatatataatgagagatataatttttgttaataagacaaaggtaatatattggatacaaagacacaaatgtattgtgtgttcaattattttgttgtcttgagatttaatattctttccaagagcttttaatgaagcagagagctagtacttcattttcactggatacattttcagcatcatgagttgtcacagcctctgagcccctgatctgaagccagaagggctgagtgtattgtaaacttattcttgcatgttgctgtctgggaatggaccacactacagcaggtagttctgggggcgatactgccgaaaggcccgaacacatgtattttggctgcaattgaggaacttgggatgctattaattttgtatttcagcaactgccccttctcctatcccaaagcaccaattactgccctctgcctcagcagtaccagtataagatgacattccaaagactggaggcaactcagcctgagttaattcacaaaattatgccatgctggggcttgagcttgagcttgggcttaggcttgggctcagcttttgaccctcaggcatctcctttcccttcctgtcttcctctcccttctcctctgctgcagcatgattttcttaatcttcagacactcactattttcatgaacagttaccctctgtccccacaaccaaagacaactcatggcctcctttggcccttgtgtaacattgcaaacctgtggctttgcaaaatgtacccaggtcacaaggggatttttttttttttagcaatgatatccctgtctgggtcactttttaagcttgtaaccgcccccccagacttataatcttaaatgtattttcctttgtttaagctgctgcttcctctgtttcattggattgtgccagttatcagtggctcttgggttcaaagtaataaagaattccaaaactga

SEQ ID NO: 285691 - DNA, 1222 bp, Homo sapiens
  misc_feature (142)..(142): n is a, c, g, or t
agctgaagagaaactattttaacttaagtgtaaaatggtttagaatagcaaatgatacagtccactcagagtttacaaaaaaaaacatttaccaggtagacacttaataaataaaacagcacttggacaaagttctttgaanacgaccggtaccgaagagaattttcctgggaaagttcacatcaaaaagagtgaatgtggtatatttctaaatgatatggaaaatagagacagatttgtcctttacagaaattactgagtgtgaataaaaacttcagatccaagaaatatataatgagagatataatttttgttaataagacaaaggtaatatattggatacaaagacacaaatgtattgtgtgttcaattattttgttgtcttgagatttaatattctttccaagagcttttaatgaagcagagagctagtacttcattttcactggatacattttcagcatcatgagttgtcacagcctctgagcccctgatctgaagccagaagggctgagtgtattgtaaacttattcttgcatgttgctgtctgggaatggaccacactacagcaggtagttctgggggcgatactgccgaaaggcccgaacacatgtattttggctgcaattgaggaacttgggatgctattaattttgtatttcagcaactgccccttctcctatcccaaagcaccaattactgccctctgcctcagcagtaccagtataagatgacattccaaagactggaggcaactcagcctgagttaattcacaaaattatgccatgctggggcttgagcttgagcttgggcttaggcttgggctcagcttttgaccctcaggcatctcctttcccttcctgtcttcctctcccttctcctctgctgcagcatgattttcttaatcttcagacactcactattttcatgaacagttaccctctgtccccacaaccaaagacaactcatggcctcctttggcccttgtgtaacattgcaaacctgtggctttgcaaaatgtacccaggtcacaaggggatttttttttttttagcaatgatatccctgtctgggtcactttttaagcttgtaaccgcccccccagacttataatcttaaatgtattttcctttgtttaagctgctgcttcctctgtttcattggattgtgccagttatcagtggctcttgggttcaaagtaataaagaattccaaaactga

SEQ ID NO: 285692 - DNA, 1019 bp, Homo sapiens
cactcatggcctcctttggttgtagagacagatttgtcctttacagaaattactgagtgtgaataaaaacttcagatccaagaaatatataatgagagatataatttttgttaataagacaaaggtaatatattggatacaaagacacaaatgtattgtgtgttcaattattttgttgtcttgagatttaatattctttccaagagcttttaatgaagcagagagctagtacttcattttcactggatacattttcagcatcatgagttgtcacagcctctgagcccctgatctgaagccagaagggctgagtgtattgtaaacttattcttgcatgttgctgtctgggaatggaccacactacagcaggtagttctgggggcgatactgccgaaaggcccgaacacatgtattttggctgcaattgaggaacttgggatgctattaattttgtatttcagcaactgccccttctcctatcccaaagcaccaattactgccctctgcctcagcagtaccagtataagatgacattccaaagactggaggcaactcagcctgagttaattcacaaaattatgccatgctggggcttgagcttgagcttgggcttaggcttgggctcagcttttgaccctcaggcatctcctttcccttcctgtcttcctctcccttctcctctgctgcagcatgattttcttaatcttcagacactcactattttcatgaacagttaccctctgtccccacaaccaaagacaactcatggcctcctttggcccttgtgtaacattgcaaacctgtggctttgcaaaatgtacccaggtcacaaggggatttttttttttttagcaatgatatccctgtctgggtcactttttaagcttgtaaccgcccccccagacttataatcttaaatgtattttcctttgtttaagctgctgcttcctctgtttcattggattgtgccagttatcagtggctcttgggttcaaagtaataaagaattccaaaactga

SEQ ID NO: 285693 - DNA, 1470 bp, Homo sapiens
ggccgtgcaggggcgggctccgagcgtggggtgggcgcttgcgcactgccgctgcggctgttgctgcggagccaggaggggaagcgatggctgggcccgcgtggatctccaaggtctctcggctgctgggggcattccacaacccaaaacaggtgaccagaggttttactggtggtgttcagacagtaactttaattccaggagatggtattggcccagaaatttcagctgcagttatgaagatttttgatgctgccaaagcacctattcagtgggaggagcggaacgtcactgccattcaaggacctggaggaaagtggatgatcccttcagaggctaaagagtccatggataagaacaagatgggcttgaaaggccctttgaagaccccaatagcagccggtcacccatctatgaatttactgctgcgcaaaacatttgacctttacgcgaatgtccgaccatgtgtctctatcgaaggctataaaaccccttacaccgatgtaaatattgtgaccattcgagagaacacagaaggagaatacagtggaattgagcatgtgattgttgatggagtcgtgcagagtatcaagctcatcaccgagggggcgagcaagcgcattgctgagtttgcctttgagtatgcccggaacaaccaccggagcaacgtcacggcggtgcacaaagccaacatcatgcggatgtcagatgggctttttctacaaaaatgcagggaagttgcagaaagctgtaaagatattaaatttaatgagatgtaccttgatacagtatgtttgaatatggtacaagatccttcccaatttgatgttcttgttatgccaaatttgtatggagacatccttagtgacttgtgtgcaggattgatcggaggtctcggtgtgacaccaagtggcaacattggagccaatggggttgcaatttttgagtcggttcatgggacggctccagacattgcaggcaaggacatggcgaatcccacagccctcctgctcagtgccgtgatgatgctgcgccacatgggactttttgaccatgctgcaagaattgaggctgcgtgttttgctacaattaaggacggaaagagcttgacaaaagatttgggaggcaatgcaaaatgctcagacttcacagaggaaatctgtcgccgagtaaaagatttagattaacacttctacaactggcatttacatcagtcactctaaatggacaccacatgaacctctgtttagaatacctaccgcacgtgagcagtatcagccatctctctcctacccgctccacagcctactgctggctgtcctgtatgtgagctagcagctttttaatctacctggaactaaggccaaaaattatcagccctttcgttctggaaggagagctgatctcatttgtcacctgaacaaaaagcaatacttaaactgaattaaaactacccacacgtgaagcttc

SEQ ID NO: 285694 - DNA, 1189 bp, Homo sapiens
ggccgtgcaggggcgggctccgagcgtggggtgggcgcttgcgcactgccgctgcggctgttgctgcggagccaggaggggaagcgatggctgggcccgcgtggatctccaaggtctctcggctgctgggggcattccacaacccaaaacaggtgaccagaggttttactggtggtgttcagacagtaactttaattccaggagatggtattggcccagaaatttcagctgcagttatgaagatttttgatgctgccaaagcacctattcagtgggaggagcggaacgtcactgccattcaaggacctggaggaaagtggatgatcccttcagaggctaaagagtccatggataagaacaagatgggcttgaaaggccctttgaagaccccaatagcagccggtcacccatctatgaatttactgctgcgcaaaacatttgacctttacgcgaatgtccgaccatgtgtctctatcgaaggctataaaaccccttacaccgatgtaaatattgtgaccattcgagagaacacagaaggagaatacagtggaattgagcatgtgattgttgatggagtcgtgcagagtatcaagctcatcaccgagggggcgagcaagcgcattgctgagtttgcctttgagtatgcccggaacaaccaccggagcaacgtcacggcggtgcacaaagccaacatcatgcggatgtcagatgggctttttctacaaaaatgcagggaagttgcagaaagctgtaaagatattaaatttaatgagatgtaccttgatacagtatgtttgaatatggtacaagatccttcccaatttgatgttcttgttatgccaaatttgtatggagacatccttaggttcatgggacggctccagacattgcaggcaaggacatggcgaatcccacagccctcctgctcagtgccgtgatgatgctgcgccacatgggactttttgaccatgctgcaagaattgaggctgcgtgttttgctacaattaaggacggaaaggtaacaggaatcttgatttacttgtgctgggtaaaatgcattgcttccatgtgttttatctgagtgaaagggacagtgacagataatagttctcaggcgggcccaagcatttgatgttgaacaaggattcttaacgtgggtcccagattgaacagggtatgtgtgcacatg

SEQ ID NO: 285695 - DNA, 889 bp, Homo sapiens
ggccgtgcaggggcgggctccgagcgtggggtgggcgcttgcgcactgccgctgcggctgttgctgcggagccaggaggggaagcgatggctgggcccgcgtggatctccaaggtctctcggctgctgggggcattccacaacccaaaacaggtgaccagaggttttactggtggtatcaactttgccaagcttatgtagattactcttagatttaagcagacagttttatagaggaactaagaaaaaaatggaagctctcttgataaaaagtctgattttccctgagtaccaaaacagacctcagtaatattttggaaatgtgtctgaaaatgttttgcaagactgaagaagttgcatgagaagctttccaggatcacaatggaaaggaaaggaaaacacttgccttcatgagaaaccgtctaaattttagttcagacagtaactttaattccaggagatggtattggcccagaaatttcagctgcagttatgaagatttttgatgctgccaaagcacctattcagtgggaggagcggaacgtcactgccattcaaggacctggaggaaagtggatgatcccttcagaggctaaagagtccatggataagaacaagatgggcttgaaaggccctttgaagaccccaatagcagccggtcacccatctatgaatttactgctgcgcaaaacatttgacctttacgcgaatgtccgaccatgtgtctctatcgaaggctataaaaccccttacaccgatgtaaatattgtgaccattcgagagaacacagaaggagaatacagtggaattgagcatgtgattgttgatggagtcgtgcagagtatcaagctcatcaccgaggggaccagactctttcctcttaacacgcg

SEQ ID NO: 285696 - DNA, 2612 bp, Homo sapiens
ggccgtgcaggggcgggctccgagcgtggggtgggcgcttgcgcactgccgctgcggctgttgctgcggagccaggaggggaagcgatggctgggcccgcgtggatctccaaggtctctcggctgctgggggcattccacaacccaaaacaggtgaccagaggttttactggtggtgttcagacagtaactttaattccaggagatggtattggcccagaaatttcagctgcagttatgaagatttttgatgctgccaaagaggccctttgaagaccccaatagcagccggtcacccatctatgaatttactgctgcgcaaaacatttgacctttacgcgaatgtccgaccatgtgtctctatcgaaggctataaaaccccttacaccgatgtaaatattgtgaccattcgagagaacacagaaggagaatacagtggaattgagcatgtgattgttgatggagtcgtgcagagtatcaagctcatcaccgagggggcgagcaagcgcattgctgagtttgcctttgagtatgcccggaacaaccaccggagcaacgtcacggcggtgcacaaagccaacatcatgcggatgtcagatgggctttttctacaaaaatgcagggaagttgcagaaagctgtaaagatattaaatttaatgagatgtaccttgatacagtatgtttgaatatggtacaagatccttcccaatttgatgttcttgttatgccaaatttgtatggagacatccttagtgacttgtgtgcaggattgatcggaggtctcggtgtgacaccaagtggcaacattggagccaatggggttgcaatttttgagtcggttcatgggacggctccagacattgcaggcaaggacatggcgaatcccacagccctcctgctcagtgccgtgatgatgctgcgccacatgggactttttgaccatgctgcaagaattgaggctgcgtgttttgctacaattaaggacggaaagagcttgacaaaagatttgggaggcaatgcaaaatgctcagacttcacagaggaaatctgtcgccgagtaaaagatttagattaacacttctacaactggcatttacatcagtcactctaaatggacaccacatgaacctctgtttagaatacctacgtatgtatgcattggtttgcttgtttcttgacagtacatttttagatctggccttttcttaacaaaatctgtgcaaaagatgcaggtggatgtccctaggtctgttttcaaagaactttttccaagtgcttgttttatttattaagtgtctacctggtaaatgttttttttgtaaactctgagtggactgtatcatttgctattctaaaccattttacacttaagttaaaatagtttctcttcagctgtaaataacaggatacagaattaacaagagaaaatgtctaactttttaagaaaaaccttattttcttcggtttttgaaaaacataatggaaataaaacaggatattgacataatagcacaaaatgacactcttctaaaactaaatgggcacaagagaattttcctgggaaagttcacatcaaaaagagtgaatgtggtatatttctaaatgatatggaaaatagagacagatttgtcctttacagaaattactgagtgtgaataaaaacttcagatccaagaaatatataatgagagatataatttttgttaataagacaaaggtaatatattggatacaaagacacaaatgtattgtgtgttcaattattttgttgtcttgagatttaatattctttccaagagcttttaatgaagcagagagctagtacttcattttcactggatacattttcagcatcatgagttgtcacagcctctgagcccctgatctgaagccagaagggctgagtgtattgtaaacttattcttgcatgttgctgtctgggaatggaccacactacagcaggtagttctgggggcgatactgccgaaaggcccgaacacatgtattttggctgcaattgaggaacttgggatgctattaattttgtatttcagcaactgccccttctcctatcccaaagcaccaattactgccctctgcctcagcagtaccagtataagatgacattccaaagactggaggcaactcagcctgagttaattcacaaaattatgccatgctggggcttgagcttgagcttgggcttaggcttgggctcagcttttgaccctcaggcatctcctttcccttcctgtcttcctctcccttctcctctgctgcagcatgattttcttaatcttcagacactcactattttcatgaacagttaccctctgtccccacaaccaaagacaactcatggcctcctttggcccttgtgtaacattgcaaacctgtggctttgcaaaatgtacccaggtcacaaggggatttttttttttttagcaatgatatccctgtctgggtcactttttaagcttgtaaccgcccccccagacttataatcttaaatgtattttcctttgtttaagctgctgcttcctctgtttcattggattgtgccagttatcagtggctcttgggttcaaagtaataaagaattccaaaactga

SEQ ID NO: 285697 - DNA, 2437 bp, Homo sapiens
ggccgtgcaggggcgggctccgagcgtggggtgggcgcttgcgcactgccgctgcggctgttgctgcggagccaggaggggaagcgatggctgggcccgcgtggatctccaaggtctctcggctgctgggggcattccacaacccaaaacaggtgaccagaggttttactggtggtgttcagacagtaactttaattccaggagatggtattggcccagaaatttcagctgcagttatgaagatttttgatgctgccaaagcacctattcagtgggaggagcggaacgtcactgccattcaaggacctggaggaaagtggatgatcccttcagaggctaaagagtccatggataagaacaagatgggcttgaaaggccctttgaagaccccaatagcagccggtcacccatctatgaatttactgctgcgcaaaacatttgacctttacgcgaatgtccgaccatgtgtctctatcgaaggctataaaaccccttacaccgatgtaaatattgtgaccattcgagagaacacagaaggagaatacagtggaattgagcatgtgattgttgatggagtcgtgcagagtatcaagctcatcaccgagggggcgagcaagcgcattgctgagtttgcctttgagtatgcccggaacaaccaccggagcaacgtcacggcggtgcacaaagccaacatcatgcggatgtcagatgggctttttctacaaaaatgcagggaagttgcagaaagctgtaaagatattaaatttaatgagatgtaccttgatacagtatgtttgaatatggtacaagatccttcccaatttgatgttcttgttatgccaaatttgtatggagacatccttagtgacttgtgtgcaggattgatcggaggtctcggtgtgacaccaagtggcaacattggagccaatggggttgcaatttttgagtcggttcatgggacggctccagacattgcaggcaaggacatggcgaatcccacagccctcctgctcagtgccgtgatgatgctgcgccacatgggactttttgaccatgctgcaagaattgaggctgcgtgttttgctacaattaaggacggaaagagcttgacaaaagatttgggaggcaatgcaaaatgctcagacttcacagaggaaatctgtcgccgagtaaaagatttagattaacacttctacaactggcatttacatcagtcactctaaatggacaccacatgaacctctgtttagaatacctacgtatgtatgcattggtttgcttgtttcttgacagtacatttttagatctggccttttcttaacaaaatctgtgcaaaagatgcaggtggatgtccctaggtctgttttcaaagaactttttccaagtgcttgttttatttattaagtgtctacctggtaaatgttttttttgtaaactctgagtggactgtatcatttgctattctaaaccattttacacttaagttaaaatagtttctcttcagctgtaaataacaggatacagaattaacaagagaaaatgtctaactttttaagaaaaaccttattttcttcggtttttgaaaaacataatggaaataaaacaggatattgacataatagcacaaaatgacactcttctaaaactaaatgggcacaagagaattttcctgggaaagttcacatcaaaaagagtgaatgtggtatatttctaaatgatatggaaaatagagacagatttgtcctttacagaaattactgagtgtgaataaaaacttcagatccaagaaatatataatgagagatataatttttgttaataagacaaaggtaatatattggatacaaagacacaaatgtattgtgtgttcaattattttgttgtcttgagatttaatattctttccaagagcttttaatgaagcagagagctagtacttcattttcactggatacattttcagcatcatgagttgtcacagcctctgagcccctgatctgaagccagaagggctgagtgtattgtaaacttattcttgcatgttgctgtctgggaatggaccacactacagcaggtagttctgggggcgatactgccgaaaggcccgaacacatgtattttggctgcaattgaggaacttgggatgctattaattttgtatttcagcaactgccccttctcctatcccaaagcaccaattactgccctctgcctcagcagtaccagtataagatgacattccaaagactggaggcaactcagcctgagttaattcacaaaattatgccatgctggggcttgagcttgagcttgggcttaggcttgggctcagcttttgaccctcaggcatctcccagctctgcctgtgttttcgtatcctaacctcggccggcgtctaccagcgggctgctctagagttctccagccagcatgcctg

SEQ ID NO: 285698 - DNA, 886 bp, Homo sapiens
tactccactagatgctactgctgatgatgttgaagacaaaaaagtcatgatggttgttgatgatagaggaaatcattgttgccgttgttttctttcattttttttttttgtagatggggtctcactctgtcacccaggctggagtgaagtggcgtgatcttggctcaccacatcctgcacctgctgggctcaatcgaccctcccgccttagcctccttagtggctgggaccacaggtgcatgccatcacacctggctaatttttgtgtttttggtagagacagagtttctccatgttgcccagcctggtctcaaactactgagctcaacaactgccccttctcctatcccaaagcaccaattactgccctctgcctcagcagtaccagtataagatgacattccaaagactggaggcaactcagcctgagttaattcacaaaattatgccatgctggggcttgagcttgagcttgggcttaggcttgggctcagcttttgaccctcaggcatctcctttcccttcctgtcttcctctcccttctcctctgctgcagcatgattttcttaatcttcagacactcactattttcatgaacagttaccctctgtccccacaaccaaagacaactcatggcctcctttggcccttgtgtaacattgcaaacctgtggctttgcaaaatgtacccaggtcacaaggggatttttttttttttagcaatgatatccctgtctgggtcactttttaagcttgtaaccgcccccccagacttataatcttaaatgtattttcctttgtttaagctgctgcttcctctgtttcattggattgtgccagttatcagtggctcttgggttcaaagtaataaagaattccaaaactga

SEQ ID NO: 285699 - DNA, 938 bp, Homo sapiens
ggccgtgcaggggcgggctccgagcgtggggtgggcgcttgcgcactgccgctgcggctgttgctgcggagccaggaggggaagcgatggctgggcccgcgtggatctccaaggtctctcggctgctgggggcattccacaacccaaaacaggtgaccagaggttttactggtggtgttcagacagtaactttaattccaggagatggtattggcccagaaatttcagctgcagttatgaagatttttgatgctgccaaagcacctattcagtgggaggagcggaacgtcactgccattcaaggacctggaggaaagtggatgatcccttcagaggctaaagagtccatggataagaacaagatgggcttgaaaggccctttgaagaccccaatagcagccggtcacccatctatgaatttactgctgcgcaaaacatttgacctttacgcgaatgtccgaccatgtgtctctatcgaaggctataaaaccccttacaccgatgtaaatattgtgaccattcgagagaacacagaaggagaatacagtggaattgagcatgtgattgttgatggagtcgtgcagagtatcaagctcatcaccgagggggcgagcaagcgcattgctgagtttgcctttgagtatgcccggaacaaccaccggagcaacgtcacggcggtgcacaaagccaacatcattttattgattacattacggcggatgtcagatgggttttctaaaagaatgcggaacgtgagaaagctgtaaagattaaattaatgaatgtgcttgatacggctgttgatttggacagatctgcaatggagtgtgttgcaatgttgggatcttatgttggtgagatgaggggtcggtgaaaggaatggcaagggtgattgttttgggtcactgggcgaggaacagcgggagatggacggtaga

SEQ ID NO: 285700 - DNA, 476 bp, Homo sapiens
ggccagctccgactcctccagaacccgacgctgtgcagtctcctttttcaggaactcgatctccctgggcacaggcaagggacagatggcagagccccatgccagcgtgtgatgatgacacagtcactggtttgcagatgcacaagaacaacgatcaactatggctttgcccatcatggtgatgagaacaatactggacatctagaagctccacagggaacagctccaacctctccacacgcttctccagctcgtactcagcagaggctgccatgggatccacatcctcgttgcgacgatcgtaatcctcgttggaggggcccaggagactgaggaggggacagcctctgacactgcccacagcgaacccaggcgccatggggctccgaggccacccctgccttggcatctcctgtacccctctgttgtctctctccaatgtctctcagcaaaaagaggaattcctcagctctgac

SEQ ID NO: 285701 - DNA, 761 bp, Homo sapiens
aaacctatgcctcctttcctgacttgctctgttaaaaggcgccacaacctcatagccatgttggcactcagtctcaggccagtatttgctgcaaacatcccttgctctctgtcccccagccacacaggccttcctgcagatcctcagacttgccacagggcctttacgtgtgctgtcccctctgcctggaatgtcccccatctaccctcctgcttgcctagttatttccctctagctcacccttcagctctctgctgtgtgtcacttctccaaaaaagcccccacagctccctccaacagcacagccctactcccacctccacccgaatcaggttcctcctgctttagcagctcagtaagcctgttctctcctacagagccccatgccagcgtgtgatgatgacacagtcactggtttgcagatgcacaagaacaacgatcaactatggctttgcccatcatggtgatgagaacaatactggacatctagaagctccacagggaacagctccaacctctccacacgcttctccagctcgtactcagcagaggctgccatgggatccacatcctcgttgcgacgatcgtaatcctcgttggaggggcccaggagactgaggaggggacagcctctgacactgcccacagcgaacccaggcgccatggggctccgaggccacccctgccttggcatctcctgtacccctctgttgtctctctccaatgtctctcagcaaaaagaggaattcctcagctctgac

SEQ ID NO: 285702 - DNA, 743 bp, Homo sapiens
ctcagacgccccctcttgaactggcttttcccactcctccctttctaaaacgaagatgcggctgggggccttcccctccaacgagggatcgagggccgcggggcgagcactgagtcggatccctggctctggggccaggccaggccttggcccgctgatagacctcgaagatggccatcatcttttctccttacctcagtgtccttggctcggggcccagggaactggcagcctggtctccggcatcggatgggaccggggggcggggagggggtgaatggggcagtgatttgaagaggggtcgcggaggctgggcctgaggcgcggctgtcctcaccgctcccgcagacagcgtggacgatgaatttgaattgtccaccgtgtgtcaccggcctgagggtctggagcagctgcaggagcaaaccaaattcacgcgcaaggagttgcaggtcctgtaccggggcttcaagaacgaatgtcccagcggaattgtcaatgaggagaacttcaagcagatttactcccagttctttcctcaaggagactccagcacctatgccacttttctcttcaatgcctttgacaccaaccatgatggctcggtcagttttgaggtgagctgggcgaggtgggccagggaagcctgtttcctggagttcagggccaggatctccaggccaaacccagagaaggagttgggtgaagagtacccgaggacacagctccctcctgcctccttccca

SEQ ID NO: 285703 - DNA, 2572 bp, Homo sapiens
ctttcaccgggtgcctcccccgggctgcaaagggtggggggcgggggtagggggagccaatcccggcagcgccaaagaggggaggaggcggtgacagccgcggggagggggcgggaggagagagtgccgctcgtgctcggctccgcgctcagctccgctctgcctccggctctgcgctcacctgctgcctagtgttccctctcctgctccaggacctccgggtagacctcagaccccgggcccattcccagactcagcctcagcccggacttccccagccccgacagcacagtaggccgccagggggcgccgtgtgagcgccctatcccggccacccggcgccccctcccacggcccgggcgggagcggggcgccgggggccatgcggggccagggccgcaaggagagtttgtccgattcccgagacctggacggctcctacgaccagctcacgggccaccctccagggcccactaaaaaagcgctgaagcagcgattcctcaagctgctgccgtgctgcgggccccaagccctgccctcagtcagtgaaacattagccgccccagcctccctccgcccccacagaccccgcctgctggacccagacagcgtggacgatgaatttgaattgtccaccgtgtgtcaccggcctgagggtctggagcagctgcaggagcaaaccaaattcacgcgcaaggagttgcaggtcctgtaccggggcttcaagaacgaatgtcccagcggaattgtcaatgaggagaacttcaagcagatttactcccagttctttcctcaaggagactccagcacctatgccacttttctcttcaatgcctttgacaccaaccatgatggctcggtcagttttgaggactttgtggctggtttgtccgtgattcttcggggaactgtagatgacaggcttaattgggccttcaacctgtatgaccttaacaaggacggctgcatcaccaaggaggaaatgcttgacatcatgaagtccatctatgacatgatgggcaagtacacgtaccctgcactccgggaggaggccccaagggaacacgtggagagcttcttccagaagatggacagaaacaaggatggtgtggtgaccattgaggaattcattgagtcttgtcaaaaggatgagaacatcatgaggtccatgcagctctttgacaatgtcatctagcccccaggagagggggtcagtgtttcctggggggaccatgctctaaccctagtccaggcggacctcacccttctcttcccaggtctatcctcatcctacgcctccctgggggctggagggatccaagagcttggggattcagtagtccagatctctggagctgaaggggccagagagtgggcagagtgcatctcggggggtgttcccaactcccaccagctctcacccccttcctgcctgacacccagtgttgagagtgcccctcctgtaggaattgagcggttccccacctcctacccctactctagaaacacactagacagatgtctcctgctatggtgcttcccccatccctgacctcataaacatttcccctaagactcccctctcagagagaatgctccattcttggcactggctggcttctcagaccagccattgagagccctgtgggagggggacaagaatgtatagggagaaatcttgggcctgagtcaatggataggtcctaggaggtggctggggttgagaatagaagggcctggacagattatgattgctcaggcataccaggttatagctccaagttccacaggtctgctaccacaggccatcaaaatataagtttccaggctttgcagaagaccttgtctccttagaaatgccccagaaattttccacaccctcctcggtatccatggagagcctggggccagatatctggctcatctctggcattgcttcctctccttccttcctgcatgtgttggtggtggttgtggtgggggaatgtggatgggggatgtcctggctgatgcctgccaaaatttcatcccaccctccttgcttatcgtccctgttttgagggctatgacttgagtttttgtttcccatgttctctatagacttgggaccttcctgaacttggggcctatcactccccacagtggatgccttagaagggagagggaaggagggaggcaggcatagcatctgaacccagtgtgggggcattcactagaatcttcaatcaacctgggctctccccaccccaccccagataacctcctcagttccctagggtctcttcttgcttgactcaatctacccagagatgccccttagcacacctagagggcagggaccataggacccaggttccaaccccattgtcagcaccccagccatgcggccaccccttagcacacctgctcgtcccatttagcttaccctcccagttggccagaatctgaggggagagcccccagagagcccccttccccatcagaagactgttgactgctttgcattttgggctcttctatatattttgtaaagtaagaaatataccagatctaataaaacacaatggctatg

SEQ ID NO: 285704 - DNA, 2518 bp, Homo sapiens
ctttcaccgggtgcctcccccgggctgcaaagggtggggggcgggggtagggggagccaatcccggcagcgccaaagaggggaggaggcggtgacagccgcggggagggggcgggaggagagagtgccgctcgtgctcggctccgcgctcagctccgctctgcctccggctctgcgctcacctgctgcctagtgttccctctcctgctccaggacctccgggtagacctcagaccccgggcccattcccagactcagcctcagcccggacttccccagccccgacagcacagtaggccgccagggggcgccgtgtgagcgccctatcccggccacccggcgccccctcccacggcccgggcgggagcggggcgccgggggccatgcggggccagggccgcaaggagagtttgtccgattcccgagacctggacggctcctacgaccagctcacgggccaccctccagggcccactaaaaaagcgctgaagcagcgattcctcaagctgctgccgtgctgcgggccccaagccctgccctcagtcagtgaaaacagcgtggacgatgaatttgaattgtccaccgtgtgtcaccggcctgagggtctggagcagctgcaggagcaaaccaaattcacgcgcaaggagttgcaggtcctgtaccggggcttcaagaacgaatgtcccagcggaattgtcaatgaggagaacttcaagcagatttactcccagttctttcctcaaggagactccagcacctatgccacttttctcttcaatgcctttgacaccaaccatgatggctcggtcagttttgaggactttgtggctggtttgtccgtgattcttcggggaactgtagatgacaggcttaattgggccttcaacctgtatgaccttaacaaggacggctgcatcaccaaggaggaaatgcttgacatcatgaagtccatctatgacatgatgggcaagtacacgtaccctgcactccgggaggaggccccaagggaacacgtggagagcttcttccagaagatggacagaaacaaggatggtgtggtgaccattgaggaattcattgagtcttgtcaaaaggatgagaacatcatgaggtccatgcagctctttgacaatgtcatctagcccccaggagagggggtcagtgtttcctggggggaccatgctctaaccctagtccaggcggacctcacccttctcttcccaggtctatcctcatcctacgcctccctgggggctggagggatccaagagcttggggattcagtagtccagatctctggagctgaaggggccagagagtgggcagagtgcatctcggggggtgttcccaactcccaccagctctcacccccttcctgcctgacacccagtgttgagagtgcccctcctgtaggaattgagcggttccccacctcctacccctactctagaaacacactagacagatgtctcctgctatggtgcttcccccatccctgacctcataaacatttcccctaagactcccctctcagagagaatgctccattcttggcactggctggcttctcagaccagccattgagagccctgtgggagggggacaagaatgtatagggagaaatcttgggcctgagtcaatggataggtcctaggaggtggctggggttgagaatagaagggcctggacagattatgattgctcaggcataccaggttatagctccaagttccacaggtctgctaccacaggccatcaaaatataagtttccaggctttgcagaagaccttgtctccttagaaatgccccagaaattttccacaccctcctcggtatccatggagagcctggggccagatatctggctcatctctggcattgcttcctctccttccttcctgcatgtgttggtggtggttgtggtgggggaatgtggatgggggatgtcctggctgatgcctgccaaaatttcatcccaccctccttgcttatcgtccctgttttgagggctatgacttgagtttttgtttcccatgttctctatagacttgggaccttcctgaacttggggcctatcactccccacagtggatgccttagaagggagagggaaggagggaggcaggcatagcatctgaacccagtgtgggggcattcactagaatcttcaatcaacctgggctctccccaccccaccccagataacctcctcagttccctagggtctcttcttgcttgactcaatctacccagagatgccccttagcacacctagagggcagggaccataggacccaggttccaaccccattgtcagcaccccagccatgcggccaccccttagcacacctgctcgtcccatttagcttaccctcccagttggccagaatctgaggggagagcccccagagagcccccttccccatcagaagactgttgactgctttgcattttgggctcttctatatattttgtaaagtaagaaatataccagatctaataaaacacaatggctatg

SEQ ID NO: 285705 - DNA, 2397 bp, Homo sapiens
ctttcaccgggtgcctcccccgggctgcaaagggtggggggcgggggtagggggagccaatcccggcagcgccaaagaggggaggaggcggtgacagccgcggggagggggcgggaggagagagtgccgctcgtgctcggctccgcgctcagctccgctctgcctccggctctgcgctcacctgctgcctagtgttccctctcctgctccaggacctccgggtagacctcagaccccgggcccattcccagactcagcctcagcccggacttccccagccccgacagcacagtaggccgccagggggcgccgtgtgagcgccctatcccgggggccatgcggggccagggccgcaaggagagtttgtccgattcccgagacctggacggctcctacgaccagctcacggacagcgtggacgatgaatttgaattgtccaccgtgtgtcaccggcctgagggtctggagcagctgcaggagcaaaccaaattcacgcgcaaggagttgcaggtcctgtaccggggcttcaagaaccctggtgccctctccttccaggaatgtcccagcggaattgtcaatgaggagaacttcaagcagatttactcccagttctttcctcaaggagactccagcacctatgccacttttctcttcaatgcctttgacaccaaccatgatggctcggtcagttttgaggactttgtggctggtttgtccgtgattcttcggggaactgtagatgacaggcttaattgggccttcaacctgtatgaccttaacaaggacggctgcatcaccaaggaggaaatgcttgacatcatgaagtccatctatgacatgatgggcaagtacacgtaccctgcactccgggaggaggccccaagggaacacgtggagagcttcttccagaagatggacagaaacaaggatggtgtggtgaccattgaggaattcattgagtcttgtcaaaaggatgagaacatcatgaggtccatgcagctctttgacaatgtcatctagcccccaggagagggggtcagtgtttcctggggggaccatgctctaaccctagtccaggcggacctcacccttctcttcccaggtctatcctcatcctacgcctccctgggggctggagggatccaagagcttggggattcagtagtccagatctctggagctgaaggggccagagagtgggcagagtgcatctcggggggtgttcccaactcccaccagctctcacccccttcctgcctgacacccagtgttgagagtgcccctcctgtaggaattgagcggttccccacctcctacccctactctagaaacacactagacagatgtctcctgctatggtgcttcccccatccctgacctcataaacatttcccctaagactcccctctcagagagaatgctccattcttggcactggctggcttctcagaccagccattgagagccctgtgggagggggacaagaatgtatagggagaaatcttgggcctgagtcaatggataggtcctaggaggtggctggggttgagaatagaagggcctggacagattatgattgctcaggcataccaggttatagctccaagttccacaggtctgctaccacaggccatcaaaatataagtttccaggctttgcagaagaccttgtctccttagaaatgccccagaaattttccacaccctcctcggtatccatggagagcctggggccagatatctggctcatctctggcattgcttcctctccttccttcctgcatgtgttggtggtggttgtggtgggggaatgtggatgggggatgtcctggctgatgcctgccaaaatttcatcccaccctccttgcttatcgtccctgttttgagggctatgacttgagtttttgtttcccatgttctctatagacttgggaccttcctgaacttggggcctatcactccccacagtggatgccttagaagggagagggaaggagggaggcaggcatagcatctgaacccagtgtgggggcattcactagaatcttcaatcaacctgggctctccccaccccaccccagataacctcctcagttccctagggtctcttcttgcttgactcaatctacccagagatgccccttagcacacctagagggcagggaccataggacccaggttccaaccccattgtcagcaccccagccatgcggccaccccttagcacacctgctcgtcccatttagcttaccctcccagttggccagaatctgaggggagagcccccagagagcccccttccccatcagaagactgttgactgctttgcattttgggctcttctatatattttgtaaagtaagaaatataccagatctaataaaacacaatggctatg

SEQ ID NO: 285706 - DNA, 2347 bp, Homo sapiens
ctttcaccgggtgcctcccccgggctgcaaagggtggggggcgggggtagggggagccaatcccggcagcgccaaagaggggaggaggcggtgacagccgcggggagggggcgggaggagagagtgccgctcgtgctcggctccgcgctcagctccgctctgcctccggctctgcgctcacctgctgcctagtgttccctctcctgctccaggacctccgggtagacctcagaccccgggcccattcccagactcagcctcagcccggacttccccagccccgacagcacagtaggccgccagggggcgccgtgtgagcgccctatcccggccacccggcgccccctcccacggcccgggcgggagcggggcgccgggggccatgcggggccagggccgcaaggagagtttgtccgattcccgagacctggacggctcctacgaccagctcacggacagcgtggacgatgaatttgaattgtccaccgtgtgtcaccggcctgagggtctggagcagctgcaggagcaaaccaaattcacgcgcaaggagttgcaggtcctgtaccggggcttcaagaacgaatgtcccagcggaattgtcaatgaggagaacttcaagcagatttactcccagttctttcctcaaggagactccagcacctatgccacttttctcttcaatgcctttgacaccaaccatgatggctcggtcagttttgaggactttgtggctggtttgtccgtgattcttcggggaactgtagatgacaggcttaattgggccttcaacctgtatgaccttaacaaggacggctgcatcaccaaggaggaaatgcttgacatcatgaagtccatctatgacatgatgggcaagtacacgtaccctgcactccgggaggaggccccaagggaacacgtggagagcttcttccagaagatggacagaaacaaggatggtgtggtgaccattgaggaattcattgagtcttgtcaaaaggatgagaacatcatgaggtccatgcagctctttgacaatgtcatctagcccccaggagagggggtcagtgtttcctggggggaccatgctctaaccctagtccaggcggacctcacccttctcttcccaggtctatcctcatcctacgcctccctgggggctggagggatccaagagcttggggattcagtagtccagatctctggagctgaaggggccagagagtgggcagagtgcatctcggggggtgttcccaactcccaccagctctcacccccttcctgcctgacacccagtgttgagagtgcccctcctgtaggaattgagcggttccccacctcctacccctactctagaaacacactagacagatgtctcctgctatggtgcttcccccatccctgacctcataaacatttcccctaagactcccctctcagagagaatgctccattcttggcactggctggcttctcagaccagccattgagagccctgtgggagggggacaagaatgtatagggagaaatcttgggcctgagtcaatggatagctccaagttccacaggtctgctaccacaggccatcaaaatataagtttccaggctttgcagaagaccttgtctccttagaaatgccccagaaattttccacaccctcctcggtatccatggagagcctggggccagatatctggctcatctctggcattgcttcctctccttccttcctgcatgtgttggtggtggttgtggtgggggaatgtggatgggggatgtcctggctgatgcctgccaaaatttcatcccaccctccttgcttatcgtccctgttttgagggctatgacttgagtttttgtttcccatgttctctatagacttgggaccttcctgaacttggggcctatcactccccacagtggatgccttagaagggagagggaaggagggaggcaggcatagcatctgaacccagtgtgggggcattcactagaatcttcaatcaacctgggctctccccaccccaccccagataacctcctcagttccctagggtctcttcttgcttgactcaatctacccagagatgccccttagcacacctagagggcagggaccataggacccaggttccaaccccattgtcagcaccccagccatgcggccaccccttagcacacctgctcgtcccatttagcttaccctcccagttggccagaatctgaggggagagcccccagagagcccccttccccatcagaagactgttgactgctttgcattttgggctcttctatatattttgtaaagtaagaaatataccagatctaataaaacacaatggctatg

SEQ ID NO: 285707 - DNA, 2314 bp, Homo sapiens
ctttcaccgggtgcctcccccgggctgcaaagggtggggggcgggggtagggggagccaatcccggcagcgccaaagaggggaggaggcggtgacagccgcggggagggggcgggaggagagagtgccgctcgtgctcggctccgcgctcagctccgctctgcctccggctctgcgctcacctgctgcctagtgttccctctcctgctccaggacctccgggtagacctcagaccccgggcccattcccagactcagcctcagcccggacttccccagccccgacagcacagtaggccgccagggggcgccgtgtgagcgccctatcccggccacccggcgccccctcccacggcccgggcgggagcggggcgccgggggccatgcggggccagggccgcaaggagagtttgtccgattcccgagacctggacggctcctacgaccagctcacggacagcgtggacgatgaatttgaattgtccaccgtgtgtcaccggcctgagggtctggagcagctgcaggagcaaaccaaattcacgcgcaaggagttgcaggtcctgtaccggggcttcaagaacgaatgtcccagcggaattgtcaatgaggagaacttcaagcagatttactcccagttctttcctcaaggagactccagcacctatgccacttttctcttcaatgcctttgacaccaaccatgatggctcggtcagttttgaggaaatgcttgacatcatgaagtccatctatgacatgatgggcaagtacacgtaccctgcactccgggaggaggccccaagggaacacgtggagagcttcttccagaagatggacagaaacaaggatggtgtggtgaccattgaggaattcattgagtcttgtcaaaaggatgagaacatcatgaggtccatgcagctctttgacaatgtcatctagcccccaggagagggggtcagtgtttcctggggggaccatgctctaaccctagtccaggcggacctcacccttctcttcccaggtctatcctcatcctacgcctccctgggggctggagggatccaagagcttggggattcagtagtccagatctctggagctgaaggggccagagagtgggcagagtgcatctcggggggtgttcccaactcccaccagctctcacccccttcctgcctgacacccagtgttgagagtgcccctcctgtaggaattgagcggttccccacctcctacccctactctagaaacacactagacagatgtctcctgctatggtgcttcccccatccctgacctcataaacatttcccctaagactcccctctcagagagaatgctccattcttggcactggctggcttctcagaccagccattgagagccctgtgggagggggacaagaatgtatagggagaaatcttgggcctgagtcaatggataggtcctaggaggtggctggggttgagaatagaagggcctggacagattatgattgctcaggcataccaggttatagctccaagttccacaggtctgctaccacaggccatcaaaatataagtttccaggctttgcagaagaccttgtctccttagaaatgccccagaaattttccacaccctcctcggtatccatggagagcctggggccagatatctggctcatctctggcattgcttcctctccttccttcctgcatgtgttggtggtggttgtggtgggggaatgtggatgggggatgtcctggctgatgcctgccaaaatttcatcccaccctccttgcttatcgtccctgttttgagggctatgacttgagtttttgtttcccatgttctctatagacttgggaccttcctgaacttggggcctatcactccccacagtggatgccttagaagggagagggaaggagggaggcaggcatagcatctgaacccagtgtgggggcattcactagaatcttcaatcaacctgggctctccccaccccaccccagataacctcctcagttccctagggtctcttcttgcttgactcaatctacccagagatgccccttagcacacctagagggcagggaccataggacccaggttccaaccccattgtcagcaccccagccatgcggccaccccttagcacacctgctcgtcccatttagcttaccctcccagttggccagaatctgaggggagagcccccagagagcccccttccccatcagaagactgttgactgctttgcattttgggctcttctatatattttgtaaagtaagaaatataccagatctaataaaacacaatggctatg

SEQ ID NO: 285708 - DNA, 2442 bp, Homo sapiens
ctttcaccgggtgcctcccccgggctgcaaagggtggggggcgggggtagggggagccaatcccggcagcgccaaagaggggaggaggcggtgacagccgcggggagggggcgggaggagagagtgccgctcgtgctcggctccgcgctcagctccgctctgcctccggctctgcgctcacctgctgcctagtgttccctctcctgctccaggacctccgggtagacctcagaccccgggcccattcccagactcagcctcagcccggacttccccagccccgacagcacagtaggccgccagggggcgccgtgtgagcgccctatcccggccacccggcgccccctcccacggcccgggcgggagcggggcgccgggggccatgcggggccagggccgcaaggagagtttgtccgattcccgagacctggacggctcctacgaccagctcacgggccaccctccagggcccactaaaaaagcgctgaagcagcgattcctcaagctgctgccgtgctgcgggccccaagccctgccctcagtcagtgaaacattagccgccccagcctccctccgcccccacagaccccgcctgctggacccagacagcgtggacgatgaatttgaattgtccaccgtgtgtcaccggcctgagggtctggagcagctgcaggagcaaaccaaattcacgcgcaaggagttgcaggtcctgtaccggggcttcaagaacgaatgtcccagcggaattgtcaatgaggagaacttcaagcagatttactcccagttctttcctcaaggagactccagcacctatgccacttttctcttcaatgcctttgacaccaaccatgatggctcggtcagttttgaggactttgtggctggtttgtccgtgattcttcggggaactgtagatgacaggcttaattgggccttcaacctgtatgaccttaacaaggacggctgcatcaccaaggaggaaatgcttgacatcatgaagtccatctatgacatgatgggcaagtacacgtaccctgcactccgggaggaggccccaagggaacacgtggagagcttcttccagaagatggacagaaacaaggatggtgtggtgaccattgaggaattcattgagtcttgtcaaaaggtctatcctcatcctacgcctccctgggggctggagggatccaagagcttggggattcagtagtccagatctctggagctgaaggggccagagagtgggcagagtgcatctcggggggtgttcccaactcccaccagctctcacccccttcctgcctgacacccagtgttgagagtgcccctcctgtaggaattgagcggttccccacctcctacccctactctagaaacacactagacagatgtctcctgctatggtgcttcccccatccctgacctcataaacatttcccctaagactcccctctcagagagaatgctccattcttggcactggctggcttctcagaccagccattgagagccctgtgggagggggacaagaatgtatagggagaaatcttgggcctgagtcaatggataggtcctaggaggtggctggggttgagaatagaagggcctggacagattatgattgctcaggcataccaggttatagctccaagttccacaggtctgctaccacaggccatcaaaatataagtttccaggctttgcagaagaccttgtctccttagaaatgccccagaaattttccacaccctcctcggtatccatggagagcctggggccagatatctggctcatctctggcattgcttcctctccttccttcctgcatgtgttggtggtggttgtggtgggggaatgtggatgggggatgtcctggctgatgcctgccaaaatttcatcccaccctccttgcttatcgtccctgttttgagggctatgacttgagtttttgtttcccatgttctctatagacttgggaccttcctgaacttggggcctatcactccccacagtggatgccttagaagggagagggaaggagggaggcaggcatagcatctgaacccagtgtgggggcattcactagaatcttcaatcaacctgggctctccccaccccaccccagataacctcctcagttccctagggtctcttcttgcttgactcaatctacccagagatgccccttagcacacctagagggcagggaccataggacccaggttccaaccccattgtcagcaccccagccatgcggccaccccttagcacacctgctcgtcccatttagcttaccctcccagttggccagaatctgaggggagagcccccagagagcccccttccccatcagaagactgttgactgctttgcattttgggctcttctatatattttgtaaagtaagaaatataccagatctaataaaacacaatggctatg

SEQ ID NO: 285709 - DNA, 1311 bp, Homo sapiens
ctttcaccgggtgcctcccccgggctgcaaagggtggggggcgggggtagggggagccaatcccggcagcgccaaagaggggaggaggcggtgacagccgcggggagggggcgggaggagagagtgccgctcgtgctcggctccgcgctcagctccgctctgcctccggctctgcgctcacctgctgcctagtgttccctctcctgctccaggacctccgggtagacctcagaccccgggcccattcccagactcagcctcagcccggacttccccagccccgacagcacagtaggccgccagggggcgccgtgtgagcgccctatcccggccacccggcgccccctcccacggcccgggcgggagcggggcgccgggggccatgcggggccagggccgcaaggagagtttgtccgattcccgagacctggacggctcctacgaccagctcacgggccaccctccagggcccactaaaaaagcgctgaagcagcgattcctcaagctgctgccgtgctgcgggccccaagccctgccctcagtcagtgaaaacagcgtggacgatgaatttgaattgtccaccgtgtgtcaccggcctgagggtctggagcagctgcaggagcaaaccaaattcacgcgcaaggagttgcaggtcctgtaccggggcttcaagaacaagtcttccctcccatcacatgagccacgtggtgagtcctctggaggcttgaagattatccccctccctgggagtcttgggccatggagggtgggggcggtgaacggaaggggattttgtctctgccctcagcctggtgccctctccttccaggaatgtcccagcggaattgtcaatgaggagaacttcaagcagatttactcccagttctttcctcaaggagactccagcacctatgccacttttctcttcaatgcctttgacaccaaccatgatggctcggtcagttttgaggactttgtggctggtttgtccgtgattcttcggggaactgtagatgacaggcttaattgggccttcaacctgtatgaccttaacaaggacggctgcatcaccaaggaggaaatgcttgacatcatgaagtccatctatgacatgatgggcaagtacacgtaccctgcactccgggaggaggccccaagggaacacgtggagagcttcttccagaagatggacagaaacaaggatggtgtggtgaccattgaggaattcattgagtcttgtcaaaaggtacagctccctgccctctacattaccctgacctggactcaggcctgatttagtaatgcagggaa

SEQ ID NO: 285710 - DNA, 682 bp, Homo sapiens
gctgggtgggacgaggggagggtttgggcggggcaaggctggggctgggcggatctgagttggtccccgaaggcccggagctctgaccctcagacgccccctcttgaactggcttttcccactcctccctttctaaaacgaagatgcggctgggggccttcccctccaacgagggatcgagggccgcggggcgagcactgagtcggatccctggctctggggccaggccaggccttggcccgctgatagacctcgaagatggccatcatcttttctccttacctcagtgtccttggctcggggcccagggaactggcagcctggtctccggcatcggatgggaccggggggcggggagggggtgaatggggcagtgatttgaagaggggtcgcggaggctgggcctgaggcgcggctgtcctcaccgctcccgcagacagcgtggacgatgaatttgaattgtccaccgtgtgtcaccggcctgagggtctggagcagctgcaggagcaaaccaaattcacgcgcaaggagttgcaggtcctgtaccggggcttcaagaacgtgagtgcaaggcgaggccaaactcagcgagggtgggacaggaggacccaagccggtccacagcttcccagaaagcatggcttggatgcttgaggtgtgggcggaagggaggcaaggccct

SEQ ID NO: 285711 - DNA, 2087 bp, Homo sapiens
tggagcttagacgccgagctcgccgccaaaccatgaaccgatgcccccgcaggtgccggagcccgctggggcaggcagcgcgatccctctaccagctggtgactgggtcgctgtccccagacagcgtggacgatgaatttgaattgtccaccgtgtgtcaccggcctgagggtctggagcagctgcaggagcaaaccaaattcacgcgcaaggagttgcaggtcctgtaccggggcttcaagaacgaatgtcccagcggaattgtcaatgaggagaacttcaagcagatttactcccagttctttcctcaaggagactccagcacctatgccacttttctcttcaatgcctttgacaccaaccatgatggctcggtcagttttgaggactttgtggctggtttgtccgtgattcttcggggaactgtagatgacaggcttaattgggccttcaacctgtatgaccttaacaaggacggctgcatcaccaaggaggaaatgcttgacatcatgaagtccatctatgacatgatgggcaagtacacgtaccctgcactccgggaggaggccccaagggaacacgtggagagcttcttccagaagatggacagaaacaaggatggtgtggtgaccattgaggaattcattgagtcttgtcaaaaggatgagaacatcatgaggtccatgcagctctttgacaatgtcatctagcccccaggagagggggtcagtgtttcctggggggaccatgctctaaccctagtccaggcggacctcacccttctcttcccaggtctatcctcatcctacgcctccctgggggctggagggatccaagagcttggggattcagtagtccagatctctggagctgaaggggccagagagtgggcagagtgcatctcggggggtgttcccaactcccaccagctctcacccccttcctgcctgacacccagtgttgagagtgcccctcctgtaggaattgagcggttccccacctcctacccctactctagaaacacactagacagatgtctcctgctatggtgcttcccccatccctgacctcataaacatttcccctaagactcccctctcagagagaatgctccattcttggcactggctggcttctcagaccagccattgagagccctgtgggagggggacaagaatgtatagggagaaatcttgggcctgagtcaatggataggtcctaggaggtggctggggttgagaatagaagggcctggacagattatgattgctcaggcataccaggttatagctccaagttccacaggtctgctaccacaggccatcaaaatataagtttccaggctttgcagaagaccttgtctccttagaaatgccccagaaattttccacaccctcctcggtatccatggagagcctggggccagatatctggctcatctctggcattgcttcctctccttccttcctgcatgtgttggtggtggttgtggtgggggaatgtggatgggggatgtcctggctgatgcctgccaaaatttcatcccaccctccttgcttatcgtccctgttttgagggctatgacttgagtttttgtttcccatgttctctatagacttgggaccttcctgaacttggggcctatcactccccacagtggatgccttagaagggagagggaaggagggaggcaggcatagcatctgaacccagtgtgggggcattcactagaatcttcaatcaacctgggctctccccaccccaccccagataacctcctcagttccctagggtctcttcttgcttgactcaatctacccagagatgccccttagcacacctagagggcagggaccataggacccaggttccaaccccattgtcagcaccccagccatgcggccaccccttagcacacctgctcgtcccatttagcttaccctcccagttggccagaatctgaggggagagcccccagagagcccccttccccatcagaagactgttgactgctttgcattttgggctcttctatatattttgtaaagtaagaaatataccagatctaataaaacacaatggctatg

SEQ ID NO: 285712 - DNA, 2422 bp, Homo sapiens
ctttcaccgggtgcctcccccgggctgcaaagggtggggggcgggggtagggggagccaatcccggcagcgccaaagaggggaggaggcggtgacagccgcggggagggggcgggaggagagagtgccgctcgtgctcggctccgcgctcagctccgctctgcctccggctctgcgctcacctgctgcctagtgttccctctcctgctccaggacctccgggtagacctcagaccccgggcccattcccagactcagcctcagcccggacttccccagccccgacagcacagtaggccgccagggggcgccgtgtgagcgccctatcccggccacccggcgccccctcccacggcccgggcgggagcggggcgccgggggccatgcggggccagggccgcaaggagagtttgtccgattcccgagacctggacggctcctacgaccagctcacggacagcgtggacgatgaatttgaattgtccaccgtgtgtcaccggcctgagggtctggagcagctgcaggagcaaaccaaattcacgcgcaaggagttgcaggtcctgtaccggggcttcaagaacgaatgtcccagcggaattgtcaatgaggagaacttcaagcagatttactcccagttctttcctcaaggagactccagcacctatgccacttttctcttcaatgcctttgacaccaaccatgatggctcggtcagttttgaggactttgtggctggtttgtccgtgattcttcggggaactgtagatgacaggcttaattgggccttcaacctgtatgaccttaacaaggacggctgcatcaccaaggaggaaatgcttgacatcatgaagtccatctatgacatgatgggcaagtacacgtaccctgcactccgggaggaggccccaagggaacacgtggagagcttcttccagaagatggacagaaacaaggatggtgtggtgaccattgaggaattcattgagtcttgtcaaaaggatgagaacatcatgaggtccatgcagctctttgacaatgtcatctagcccccaggagagggggtcagtgtttcctggggggaccatgctctaaccctagtccaggcggacctcacccttctcttcccaggtctatcctcatcctacgcctccctgggggctggagggatccaagagcttggggattcagtagtccagatctctggagctgaaggggccagagagtgggcagagtgcatctcggggggtgttcccaactcccaccagctctcacccccttcctgcctgacacccagtgttgagagtgcccctcctgtaggaattgagcggttccccacctcctacccctactctagaaacacactagacagatgtctcctgctatggtgcttcccccatccctgacctcataaacatttcccctaagactcccctctcagagagaatgctccattcttggcactggctggcttctcagaccagccattgagagccctgtgggagggggacaagaatgtatagggagaaatcttgggcctgagtcaatggataggtcctaggaggtggctggggttgagaatagaagggcctggacagattatgattgctcaggcataccaggttatagctccaagttccacaggtctgctaccacaggccatcaaaatataagtttccaggctttgcagaagaccttgtctccttagaaatgccccagaaattttccacaccctcctcggtatccatggagagcctggggccagatatctggctcatctctggcattgcttcctctccttccttcctgcatgtgttggtggtggttgtggtgggggaatgtggatgggggatgtcctggctgatgcctgccaaaatttcatcccaccctccttgcttatcgtccctgttttgagggctatgacttgagtttttgtttcccatgttctctatagacttgggaccttcctgaacttggggcctatcactccccacagtggatgccttagaagggagagggaaggagggaggcaggcatagcatctgaacccagtgtgggggcattcactagaatcttcaatcaacctgggctctccccaccccaccccagataacctcctcagttccctagggtctcttcttgcttgactcaatctacccagagatgccccttagcacacctagagggcagggaccataggacccaggttccaaccccattgtcagcaccccagccatgcggccaccccttagcacacctgctcgtcccatttagcttaccctcccagttggccagaatctgaggggagagcccccagagagcccccttccccatcagaagactgttgactgctttgcattttgggctcttctatatattttgtaaagtaagaaatataccagatctaataaaacacaatggctatg

SEQ ID NO: 285713 - DNA, 2376 bp, Homo sapiens
ctttcaccgggtgcctcccccgggctgcaaagggtggggggcgggggtagggggagccaatcccggcagcgccaaagaggggaggaggcggtgacagccgcggggagggggcgggaggagagagtgccgctcgtgctcggctccgcgctcagctccgctctgcctccggctctgcgctcacctgctgcctagtgttccctctcctgctccaggacctccgggtagacctcagaccccgggcccattcccagactcagcctcagcccggacttccccagccccgacagcacagtaggccgccagggggcgccgtgtgagcgccctatcccgggggccatgcggggccagggccgcaaggagagtttgtccgattcccgagacctggacggctcctacgaccagctcacggacagcgtggacgatgaatttgaattgtccaccgtgtgtcaccggcctgagggtctggagcagctgcaggagcaaaccaaattcacgcgcaaggagttgcaggtcctgtaccggggcttcaagaacgaatgtcccagcggaattgtcaatgaggagaacttcaagcagatttactcccagttctttcctcaaggagactccagcacctatgccacttttctcttcaatgcctttgacaccaaccatgatggctcggtcagttttgaggactttgtggctggtttgtccgtgattcttcggggaactgtagatgacaggcttaattgggccttcaacctgtatgaccttaacaaggacggctgcatcaccaaggaggaaatgcttgacatcatgaagtccatctatgacatgatgggcaagtacacgtaccctgcactccgggaggaggccccaagggaacacgtggagagcttcttccagaagatggacagaaacaaggatggtgtggtgaccattgaggaattcattgagtcttgtcaaaaggatgagaacatcatgaggtccatgcagctctttgacaatgtcatctagcccccaggagagggggtcagtgtttcctggggggaccatgctctaaccctagtccaggcggacctcacccttctcttcccaggtctatcctcatcctacgcctccctgggggctggagggatccaagagcttggggattcagtagtccagatctctggagctgaaggggccagagagtgggcagagtgcatctcggggggtgttcccaactcccaccagctctcacccccttcctgcctgacacccagtgttgagagtgcccctcctgtaggaattgagcggttccccacctcctacccctactctagaaacacactagacagatgtctcctgctatggtgcttcccccatccctgacctcataaacatttcccctaagactcccctctcagagagaatgctccattcttggcactggctggcttctcagaccagccattgagagccctgtgggagggggacaagaatgtatagggagaaatcttgggcctgagtcaatggataggtcctaggaggtggctggggttgagaatagaagggcctggacagattatgattgctcaggcataccaggttatagctccaagttccacaggtctgctaccacaggccatcaaaatataagtttccaggctttgcagaagaccttgtctccttagaaatgccccagaaattttccacaccctcctcggtatccatggagagcctggggccagatatctggctcatctctggcattgcttcctctccttccttcctgcatgtgttggtggtggttgtggtgggggaatgtggatgggggatgtcctggctgatgcctgccaaaatttcatcccaccctccttgcttatcgtccctgttttgagggctatgacttgagtttttgtttcccatgttctctatagacttgggaccttcctgaacttggggcctatcactccccacagtggatgccttagaagggagagggaaggagggaggcaggcatagcatctgaacccagtgtgggggcattcactagaatcttcaatcaacctgggctctccccaccccaccccagataacctcctcagttccctagggtctcttcttgcttgactcaatctacccagagatgccccttagcacacctagagggcagggaccataggacccaggttccaaccccattgtcagcaccccagccatgcggccaccccttagcacacctgctcgtcccatttagcttaccctcccagttggccagaatctgaggggagagcccccagagagcccccttccccatcagaagactgttgactgctttgcattttgggctcttctatatattttgtaaagtaagaaatataccagatctaataaaacacaatggctatg

SEQ ID NO: 285714 - DNA, 2472 bp, Homo sapiens
ctttcaccgggtgcctcccccgggctgcaaagggtggggggcgggggtagggggagccaatcccggcagcgccaaagaggggaggaggcggtgacagccgcggggagggggcgggaggagagagtgccgctcgtgctcggctccgcgctcagctccgctctgcctccggctctgcgctcacctgctgcctagtgttccctctcctgctccaggacctccgggtagacctcagaccccgggcccattcccagactcagcctcagcccggacttccccagccccgacagcacagtaggccgccagggggcgccgtgtgagcgccctatcccgggggccatgcggggccagggccgcaaggagagtttgtccgattcccgagacctggacggctcctacgaccagctcacgggccaccctccagggcccactaaaaaagcgctgaagcagcgattcctcaagctgctgccgtgctgcgggccccaagccctgccctcagtcagtgaaaacagcgtggacgatgaatttgaattgtccaccgtgtgtcaccggcctgagggtctggagcagctgcaggagcaaaccaaattcacgcgcaaggagttgcaggtcctgtaccggggcttcaagaacgaatgtcccagcggaattgtcaatgaggagaacttcaagcagatttactcccagttctttcctcaaggagactccagcacctatgccacttttctcttcaatgcctttgacaccaaccatgatggctcggtcagttttgaggactttgtggctggtttgtccgtgattcttcggggaactgtagatgacaggcttaattgggccttcaacctgtatgaccttaacaaggacggctgcatcaccaaggaggaaatgcttgacatcatgaagtccatctatgacatgatgggcaagtacacgtaccctgcactccgggaggaggccccaagggaacacgtggagagcttcttccagaagatggacagaaacaaggatggtgtggtgaccattgaggaattcattgagtcttgtcaaaaggatgagaacatcatgaggtccatgcagctctttgacaatgtcatctagcccccaggagagggggtcagtgtttcctggggggaccatgctctaaccctagtccaggcggacctcacccttctcttcccaggtctatcctcatcctacgcctccctgggggctggagggatccaagagcttggggattcagtagtccagatctctggagctgaaggggccagagagtgggcagagtgcatctcggggggtgttcccaactcccaccagctctcacccccttcctgcctgacacccagtgttgagagtgcccctcctgtaggaattgagcggttccccacctcctacccctactctagaaacacactagacagatgtctcctgctatggtgcttcccccatccctgacctcataaacatttcccctaagactcccctctcagagagaatgctccattcttggcactggctggcttctcagaccagccattgagagccctgtgggagggggacaagaatgtatagggagaaatcttgggcctgagtcaatggataggtcctaggaggtggctggggttgagaatagaagggcctggacagattatgattgctcaggcataccaggttatagctccaagttccacaggtctgctaccacaggccatcaaaatataagtttccaggctttgcagaagaccttgtctccttagaaatgccccagaaattttccacaccctcctcggtatccatggagagcctggggccagatatctggctcatctctggcattgcttcctctccttccttcctgcatgtgttggtggtggttgtggtgggggaatgtggatgggggatgtcctggctgatgcctgccaaaatttcatcccaccctccttgcttatcgtccctgttttgagggctatgacttgagtttttgtttcccatgttctctatagacttgggaccttcctgaacttggggcctatcactccccacagtggatgccttagaagggagagggaaggagggaggcaggcatagcatctgaacccagtgtgggggcattcactagaatcttcaatcaacctgggctctccccaccccaccccagataacctcctcagttccctagggtctcttcttgcttgactcaatctacccagagatgccccttagcacacctagagggcagggaccataggacccaggttccaaccccattgtcagcaccccagccatgcggccaccccttagcacacctgctcgtcccatttagcttaccctcccagttggccagaatctgaggggagagcccccagagagcccccttccccatcagaagactgttgactgctttgcattttgggctcttctatatattttgtaaagtaagaaatataccagatctaataaaacacaatggctatg

SEQ ID NO: 285715 - DNA, 2571 bp, Homo sapiens
ctttcaccgggtgcctcccccgggctgcaaagggtggggggcgggggtagggggagccaatcccggcagcgccaaagaggggaggaggcggtgacagccgcggggagggggcgggaggagagagtgccgctcgtgctcggctccgcgctcagctccgctctgcctccggctctgcgctcacctgctgcctagtgttccctctcctgctccaggacctccgggtagacctcagaccccgggcccattcccagactcagcctcagcccggacttccccagccccgacagcacagtaggccgccagggggcgccgtgtgagcgccctatcccgggggccatgcggggccagggccgcaaggagagtttgtccgattcccgagacctggacggctcctacgaccagctcacgggccaccctccagggcccactaaaaaagcgctgaagcagcgattcctcaagctgctgccgtgctgcgggccccaagccctgccctcagtcagtgaaattggccgggtcttccgctttctcggtgacagttcgctcccttcagcattagccgccccagcctccctccgcccccacagaccccgcctgctggacccagacagcgtggacgatgaatttgaattgtccaccgtgtgtcaccggcctgagggtctggagcagctgcaggagcaaaccaaattcacgcgcaaggagttgcaggtcctgtaccggggcttcaagaacgaatgtcccagcggaattgtcaatgaggagaacttcaagcagatttactcccagttctttcctcaaggagactccagcacctatgccacttttctcttcaatgcctttgacaccaaccatgatggctcggtcagttttgaggactttgtggctggtttgtccgtgattcttcggggaactgtagatgacaggcttaattgggccttcaacctgtatgaccttaacaaggacggctgcatcaccaaggaggaaatgcttgacatcatgaagtccatctatgacatgatgggcaagtacacgtaccctgcactccgggaggaggccccaagggaacacgtggagagcttcttccagaagatggacagaaacaaggatggtgtggtgaccattgaggaattcattgagtcttgtcaaaaggatgagaacatcatgaggtccatgcagctctttgacaatgtcatctagcccccaggagagggggtcagtgtttcctggggggaccatgctctaaccctagtccaggcggacctcacccttctcttcccaggtctatcctcatcctacgcctccctgggggctggagggatccaagagcttggggattcagtagtccagatctctggagctgaaggggccagagagtgggcagagtgcatctcggggggtgttcccaactcccaccagctctcacccccttcctgcctgacacccagtgttgagagtgcccctcctgtaggaattgagcggttccccacctcctacccctactctagaaacacactagacagatgtctcctgctatggtgcttcccccatccctgacctcataaacatttcccctaagactcccctctcagagagaatgctccattcttggcactggctggcttctcagaccagccattgagagccctgtgggagggggacaagaatgtatagggagaaatcttgggcctgagtcaatggataggtcctaggaggtggctggggttgagaatagaagggcctggacagattatgattgctcaggcataccaggttatagctccaagttccacaggtctgctaccacaggccatcaaaatataagtttccaggctttgcagaagaccttgtctccttagaaatgccccagaaattttccacaccctcctcggtatccatggagagcctggggccagatatctggctcatctctggcattgcttcctctccttccttcctgcatgtgttggtggtggttgtggtgggggaatgtggatgggggatgtcctggctgatgcctgccaaaatttcatcccaccctccttgcttatcgtccctgttttgagggctatgacttgagtttttgtttcccatgttctctatagacttgggaccttcctgaacttggggcctatcactccccacagtggatgccttagaagggagagggaaggagggaggcaggcatagcatctgaacccagtgtgggggcattcactagaatcttcaatcaacctgggctctccccaccccaccccagataacctcctcagttccctagggtctcttcttgcttgactcaatctacccagagatgccccttagcacacctagagggcagggaccataggacccaggttccaaccccattgtcagcaccccagccatgcggccaccccttagcacacctgctcgtcccatttagcttaccctcccagttggccagaatctgaggggagagcccccagagagcccccttccccatcagaagactgttgactgctttgcattttgggctcttctatatattttgtaaagtaagaaatataccagatctaataaaacacaatggctatg

SEQ ID NO: 285716 - DNA, 2501 bp, Homo sapiens
ctttcaccgggtgcctcccccgggctgcaaagggtggggggcgggggtagggggagccaatcccggcagcgccaaagaggggaggaggcggtgacagccgcggggagggggcgggaggagagagtgccgctcgtgctcggctccgcgctcagctccgctctgcctccggctctgcgctcacctgctgcctagtgttccctctcctgctccaggacctccgggtagacctcagaccccgggcccattcccagactcagcctcagcccggacttccccagccccgacagcacagtaggccgccagggggcgccgtgtgagcgccctatcccggccacccggcgccccctcccacggcccgggcgggagcggggcgccgggggccatgcggggccagggccgcaaggagagtttgtccgattcccgagacctggacggctcctacgaccagctcacgggccaccctccagggcccactaaaaaagcgctgaagcagcgattcctcaagctgctgccgtgctgcgggccccaagccctgccctcagtcagtgaaacattagccgccccagcctccctccgcccccacagaccccgcctgctggacccagacagcgtggacgatgaatttgaattgtccaccgtgtgtcaccggcctgagggtctggagcagctgcaggagcaaaccaaattcacgcgcaaggagttgcaggtcctgtaccggggcttcaagaacgaatgtcccagcggaattgtcaatgaggagaacttcaagcagatttactcccagttctttcctcaaggaggactttgtggctggtttgtccgtgattcttcggggaactgtagatgacaggcttaattgggccttcaacctgtatgaccttaacaaggacggctgcatcaccaaggaggaaatgcttgacatcatgaagtccatctatgacatgatgggcaagtacacgtaccctgcactccgggaggaggccccaagggaacacgtggagagcttcttccagaagatggacagaaacaaggatggtgtggtgaccattgaggaattcattgagtcttgtcaaaaggatgagaacatcatgaggtccatgcagctctttgacaatgtcatctagcccccaggagagggggtcagtgtttcctggggggaccatgctctaaccctagtccaggcggacctcacccttctcttcccaggtctatcctcatcctacgcctccctgggggctggagggatccaagagcttggggattcagtagtccagatctctggagctgaaggggccagagagtgggcagagtgcatctcggggggtgttcccaactcccaccagctctcacccccttcctgcctgacacccagtgttgagagtgcccctcctgtaggaattgagcggttccccacctcctacccctactctagaaacacactagacagatgtctcctgctatggtgcttcccccatccctgacctcataaacatttcccctaagactcccctctcagagagaatgctccattcttggcactggctggcttctcagaccagccattgagagccctgtgggagggggacaagaatgtatagggagaaatcttgggcctgagtcaatggataggtcctaggaggtggctggggttgagaatagaagggcctggacagattatgattgctcaggcataccaggttatagctccaagttccacaggtctgctaccacaggccatcaaaatataagtttccaggctttgcagaagaccttgtctccttagaaatgccccagaaattttccacaccctcctcggtatccatggagagcctggggccagatatctggctcatctctggcattgcttcctctccttccttcctgcatgtgttggtggtggttgtggtgggggaatgtggatgggggatgtcctggctgatgcctgccaaaatttcatcccaccctccttgcttatcgtccctgttttgagggctatgacttgagtttttgtttcccatgttctctatagacttgggaccttcctgaacttggggcctatcactccccacagtggatgccttagaagggagagggaaggagggaggcaggcatagcatctgaacccagtgtgggggcattcactagaatcttcaatcaacctgggctctccccaccccaccccagataacctcctcagttccctagggtctcttcttgcttgactcaatctacccagagatgccccttagcacacctagagggcagggaccataggacccaggttccaaccccattgtcagcaccccagccatgcggccaccccttagcacacctgctcgtcccatttagcttaccctcccagttggccagaatctgaggggagagcccccagagagcccccttccccatcagaagactgttgactgctttgcattttgggctcttctatatattttgtaaagtaagaaatataccagatctaataaaacacaatggctatg

SEQ ID NO: 285717 - DNA, 2549 bp, Homo sapiens
ctttcaccgggtgcctcccccgggctgcaaagggtggggggcgggggtagggggagccaatcccggcagcgccaaagaggggaggaggcggtgacagccgcggggagggggcgggaggagagagtgccgctcgtgctcggctccgcgctcagctccgctctgcctccggctctgcgctcacctgctgcctagtgttccctctcctgctccaggacctccgggtagacctcagaccccgggcccattcccagactcagcctcagcccggacttccccagccccgacagcacagtaggccgccagggggcgccgtgtgagcgccctatcccggccacccggcgccccctcccacggcccgggcgggagcggggcgccgggggccatgcggggccagggccgcaaggagagtttgtccgattcccgagacctggacggctcctacgaccagctcacgggccaccctccagggcccactaaaaaagcgctgaagcagcgattcctcaagctgctgccgtgctgcgggccccaagccctgccctcagtcagtgaaaacagcgtggacgatgaatttgaattgtccaccgtgtgtcaccggcctgagggtctggagcagctgcaggagcaaaccaaattcacgcgcaaggagttgcaggtcctgtaccggggcttcaagaacaagtcttccctcccatcacatgagccacgtggaatgtcccagcggaattgtcaatgaggagaacttcaagcagatttactcccagttctttcctcaaggagactccagcacctatgccacttttctcttcaatgcctttgacaccaaccatgatggctcggtcagttttgaggactttgtggctggtttgtccgtgattcttcggggaactgtagatgacaggcttaattgggccttcaacctgtatgaccttaacaaggacggctgcatcaccaaggaggaaatgcttgacatcatgaagtccatctatgacatgatgggcaagtacacgtaccctgcactccgggaggaggccccaagggaacacgtggagagcttcttccagaagatggacagaaacaaggatggtgtggtgaccattgaggaattcattgagtcttgtcaaaaggatgagaacatcatgaggtccatgcagctctttgacaatgtcatctagcccccaggagagggggtcagtgtttcctggggggaccatgctctaaccctagtccaggcggacctcacccttctcttcccaggtctatcctcatcctacgcctccctgggggctggagggatccaagagcttggggattcagtagtccagatctctggagctgaaggggccagagagtgggcagagtgcatctcggggggtgttcccaactcccaccagctctcacccccttcctgcctgacacccagtgttgagagtgcccctcctgtaggaattgagcggttccccacctcctacccctactctagaaacacactagacagatgtctcctgctatggtgcttcccccatccctgacctcataaacatttcccctaagactcccctctcagagagaatgctccattcttggcactggctggcttctcagaccagccattgagagccctgtgggagggggacaagaatgtatagggagaaatcttgggcctgagtcaatggataggtcctaggaggtggctggggttgagaatagaagggcctggacagattatgattgctcaggcataccaggttatagctccaagttccacaggtctgctaccacaggccatcaaaatataagtttccaggctttgcagaagaccttgtctccttagaaatgccccagaaattttccacaccctcctcggtatccatggagagcctggggccagatatctggctcatctctggcattgcttcctctccttccttcctgcatgtgttggtggtggttgtggtgggggaatgtggatgggggatgtcctggctgatgcctgccaaaatttcatcccaccctccttgcttatcgtccctgttttgagggctatgacttgagtttttgtttcccatgttctctatagacttgggaccttcctgaacttggggcctatcactccccacagtggatgccttagaagggagagggaaggagggaggcaggcatagcatctgaacccagtgtgggggcattcactagaatcttcaatcaacctgggctctccccaccccaccccagataacctcctcagttccctagggtctcttcttgcttgactcaatctacccagagatgccccttagcacacctagagggcagggaccataggacccaggttccaaccccattgtcagcaccccagccatgcggccaccccttagcacacctgctcgtcccatttagcttaccctcccagttggccagaatctgaggggagagcccccagagagcccccttccccatcagaagactgttgactgctttgcattttgggctcttctatatattttgtaaagtaagaaatataccagatctaataaaacacaatggctatg

SEQ ID NO: 285718 - DNA, 1999 bp, Homo sapiens
  misc_feature (1846)..(1846): n is a, c, g, or t
  misc_feature (1848)..(1849): n is a, c, g, or t
  misc_feature (1852)..(1852): n is a, c, g, or t
  misc_feature (1856)..(1856): n is a, c, g, or t
ctttcaccgggtgcctcccccgggctgcaaagggtggggggcgggggtagggggagccaatcccggcagcgccaaagaggggaggaggcggtgacagccgcggggagggggcgggaggagagagtgccgctcgtgctcggctccgcgctcagctccgctctgcctccggctctgcgctcacctgctgcctagtgttccctctcctgctccaggacctccgggtagacctcagaccccgggcccattcccagactcagcctcagcccggacttccccagccccgacagcacagtaggccgccagggggcgccgtgtgagcgccctatcccggccacccggcgccccctcccacggcccgggcgggagcggggcgccgggggccatgcggggccagggccgcaaggagagtttgtccgattcccgagacctggacggctcctacgaccagctcacggacagcgtggacgatgaatttgaattgtccaccgtgtgtcaccggcctgagggtctggagcagctgcaggagcaaaccaaattcacgcgcaaggagttgcaggtcctgtaccggggcttcaagaacgaatgtcccagcggaattgtcaatgaggagaacttcaagcagatttactcccagttctttcctcaaggagactccagcacctatgccacttttctcttcaatgcctttgacaccaaccatgatggctcggtcagttttgaggactttgtggctggtttgtccgtgattcttcggggaactgtagatgacaggcttaattgggccttcaacctgtatgaccttaacaaggacggctgcatcaccaaggaggaaatgcttgacatcatgaagtccatctatgacatgatgggcaagtacacgtaccctgcactccgggaggaggccccaagggaacacgtggagagcttcttccagaagatggacagaaacaaggatggtgtggtgaccattgaggaattcattgagtcttgtcaaaaggatgagaacatcatgaggtccatgcagctctttgacaatgtcatctagcccccaggagagggggtcagtgtttcctggggggaccatgctctaaccctagtccaggcggacctcacccttctcttcccaggtctatcctcatcctacgcctccctgggggctggagggatccaagagcttggggattcagtagtccagatctctggagctgaaggggccagagagtgggcagagtgcatctcggggggtgttcccaactcccaccagctctcacccccttcctgcctgacacccagtgttgagagtgcccctcctgtaggaattgagcggttccccacctcctacccctactctagaaacacactagacagatgtctcctgctatggtgcttcccccatccctgacctcataaacatttcccctaagactcccctctcagagagaatgctccattcttggcactggctggcttctcagaccagccattgagagccctgtgggagggggacaagaatgtatagggagaaatcttgggcctgagtcaatggataggtcctaggaggtggctggggttgagaatagaagggcctggacagattatgattgctcaggcataccaggttatagctccaagttccacaggtctgctaccacaggccatcaaaatataagtttccaggctttgcagaagaccttgtctccttagaaatgccccagaaattttccacaccctcctcggtatccatggagagcctggggccagatatctggctcatctctggcattgcttcctctccttccttcctgcatgtgttggtggtggttgtggtgggggaatgtggatggtngnnggnttgntttttgtggtgtggtgttttggttttgggggtttatttgttggaggtatttttgaagttttatagattatataaagattttaatgaaaagtggtaaaaaattgggttttattgtgttgtagtgtttagtaatatatattatgt

SEQ ID NO: 285719 - DNA, 2196 bp, Homo sapiens
accaaaccacttggctgcccgggcatcctctctttcccacatggggaggccaccctccagggcccactaaaaaagcgctgaagcagcgattcctcaagctgctgccgtgctgcgggccccaagccctgccctcagtcagtgaaacattagccgccccagcctccctccgcccccacagaccccgcctgctggacccagacagcgtggacgatgaatttgaattgtccaccgtgtgtcaccggcctgagggtctggagcagctgcaggagcaaaccaaattcacgcgcaaggagttgcaggtcctgtaccggggcttcaagaacaagtcttccctcccatcacatgagccacgtggaatgtcccagcggaattgtcaatgaggagaacttcaagcagatttactcccagttctttcctcaaggagactccagcacctatgccacttttctcttcaatgcctttgacaccaaccatgatggctcggtcagttttgaggactttgtggctggtttgtccgtgattcttcggggaactgtagatgacaggcttaattgggccttcaacctgtatgaccttaacaaggacggctgcatcaccaaggaggaaatgcttgacatcatgaagtccatctatgacatgatgggcaagtacacgtaccctgcactccgggaggaggccccaagggaacacgtggagagcttcttccagaagatggacagaaacaaggatggtgtggtgaccattgaggaattcattgagtcttgtcaaaaggatgagaacatcatgaggtccatgcagctctttgacaatgtcatctagcccccaggagagggggtcagtgtttcctggggggaccatgctctaaccctagtccaggcggacctcacccttctcttcccaggtctatcctcatcctacgcctccctgggggctggagggatccaagagcttggggattcagtagtccagatctctggagctgaaggggccagagagtgggcagagtgcatctcggggggtgttcccaactcccaccagctctcacccccttcctgcctgacacccagtgttgagagtgcccctcctgtaggaattgagcggttccccacctcctacccctactctagaaacacactagacagatgtctcctgctatggtgcttcccccatccctgacctcataaacatttcccctaagactcccctctcagagagaatgctccattcttggcactggctggcttctcagaccagccattgagagccctgtgggagggggacaagaatgtatagggagaaatcttgggcctgagtcaatggataggtcctaggaggtggctggggttgagaatagaagggcctggacagattatgattgctcaggcataccaggttatagctccaagttccacaggtctgctaccacaggccatcaaaatataagtttccaggctttgcagaagaccttgtctccttagaaatgccccagaaattttccacaccctcctcggtatccatggagagcctggggccagatatctggctcatctctggcattgcttcctctccttccttcctgcatgtgttggtggtggttgtggtgggggaatgtggatgggggatgtcctggctgatgcctgccaaaatttcatcccaccctccttgcttatcgtccctgttttgagggctatgacttgagtttttgtttcccatgttctctatagacttgggaccttcctgaacttggggcctatcactccccacagtggatgccttagaagggagagggaaggagggaggcaggcatagcatctgaacccagtgtgggggcattcactagaatcttcaatcaacctgggctctccccaccccaccccagataacctcctcagttccctagggtctcttcttgcttgactcaatctacccagagatgccccttagcacacctagagggcagggaccataggacccaggttccaaccccattgtcagcaccccagccatgcggccaccccttagcacacctgctcgtcccatttagcttaccctcccagttggccagaatctgaggggagagcccccagagagcccccttccccatcagaagactgttgactgctttgcattttgggctcttctatatattttgtaaagtaagaaatataccagatctaataaaacacaatggctatg

SEQ ID NO: 285720 - DNA, 908 bp, Homo sapiens
ctttcaccgggtgcctcccccgggctgcaaagggtggggggcgggggtagggggagccaatcccggcagcgccaaagaggggaggaggcggtgacagccgcggggagggggcgggaggagagagtgccgctcgtgctcggctccgcgctcagctccgctctgcctccggctctgcgctcacctgctgcctagtgttccctctcctgctccaggacctccgggtagacctcagaccccgggcccattcccagactcagcctcagcccggacttccccagccccgacagcacagtaggccgccagggggcgccgtgtgagcgccctatcccgggggccatgcggggccagggccgcaaggagagtttgtccgattcccgagacctggacggctcctacgaccagctcacggacagcgtggacgatgaatttgaattgtccaccgtgtgtcaccggcctgagggtctggagcagctgcaggagcaaaccaaattcacgcgcaaggagttgcaggtcctgtaccggggcttcaagaacgaatgtcccagcggaattgtcaatgaggagaacttcaagcagatttactcccagttctttcctcaaggagactccagcacctatgccacttttctcttcaatgcctttgacaccaaccatgatggctcggtcagttttgaggaaatgcttgacatcatgaagtccatctatgacatgatgggcaagtacacgtaccctgcactccgggaggaggccccaagggaacacgtggagagcttcttccagaagatggacagaaacaaggatggtgtggtgaccattgaggaattcattgagtcttgtcaaaaggtacagctccctgccctctacattaccctgacctggactcaggcctgatttagtaatgcagggaa

SEQ ID NO: 285721 - DNA, 1061 bp, Homo sapiens
ctttcaccgggtgcctcccccgggctgcaaagggtggggggcgggggtagggggagccaatcccggcagcgccaaagaggggaggaggcggtgacagccgcggggagggggcgggaggagagagtgccgctcgtgctcggctccgcgctcagctccgctctgcctccggctctgcgctcacctgctgcctagtgttccctctcctgctccaggacctccgggtagacctcagaccccgggcccattcccagactcagcctcagcccggacttccccagccccgacagcacagtaggccgccagggggcgccgtgtgagcgccctatcccggccacccggcgccccctcccacggcccgggcgggagcggggcgccgggggccatgcggggccagggccgcaaggagagtttgtccgattcccgagacctggacggctcctacgaccagctcacgggccaccctccagggcccactaaaaaagcgctgaagcagcgattcctcaagctgctgccgtgctgcgggccccaagccctgccctcagtcagtgaaaacagcgtggacgatgaatttgaattgtccaccgtgtgtcaccggcctgagggtctggagcagctgcaggagcaaaccaaattcacgcgcaaggagttgcaggtcctgtaccggggcttcaagaacaagtcttccctcccatcacatgagccacgtggtgagtcctctggaggcttgaagattatccccctccctgggagtcttgggccatggagggtgggggcggtgaacggaaggggattttgtctctgccctcagcctggtgccctctccttccaggaatgtcccagcggaattgtcaatgaggagaacttcaagcagatttactcccagttctttcctcaaggaggtgaggggacaaggcccaaggggaagcagttgtccttctctaggctgagggagggagggattctggaggagctgggaatgccaaggtgatggggggtatggggagctccttagagggaggaagtcctctcctgtgtggaagccaacttctccacactcaccc

SEQ ID NO: 285722 - DNA, 4907 bp, Homo sapiens
cggccgccgccgctccagcggctccagggtcgaagccataggggaagccgcttctcggttacctcggccagcttggcttccgtggaggccgctcctcgctttctgaggctcaaacgcaagccaccgcccgaaaggccgccgatctgaggagcgcaaccgccagcccaccgctggcctaccgcagccctgtccaggtacagagccagagcgccggccggaagtggaagtgacgctttccgagggtggcgcaggcccgccctctggctaaggcgcctgagcccggcctacttcctcgccagagaaactgctgtcttccccggcggtagggaagggttaatgccaccgagtatccagacccgctgaagcctagagggccttgtaccggctcaccgcgtggctgtcgctgtctcgtgtccccagtgggggaggcgtcgcactgccacgtctgttctgcgtggctgtcgggcggcgtttggtcccgggagcctcgccgggtaagggtcgcctcccagctgcgcgcgccgcgttctcgggcttcccgcggcccggccggccgtgctcgagctgttgctgggctcgtcgccgcctcctcgaggaagaggcattttgtccgggtcgggccactcgctaggtcagaaacagcggccccccgagggttttgtaccgttttctaggtctcgtgacgcattccccacaactattttttcttgaggtaggtttgaacctgtgaaataggttctttttctatctctccttgacagagaaacggagacctaagaagtgacttgctcagggtcacatagctcagcagtggcggccgctaatcggaaatagctctcctgttgtggtatcctctgcgttttccactccagtattcttccctggaaaatgggaaccttgttttcatcttatatctcatgcagcgcctaacatagtcacctggtaagataggcattccacacatatttactgaatcatagttataagaatctgagtgttttgggtgttcagtgatctctgaattaatccgtttttgtaatgtcagtctgtaccagttgagggattatttaataagtccagtatgagtggtttcggaattaccagtttttgtaacgtcagcttataccagtcaagggactatttattaagtcagctatgtgtagccaatattgcagagttgagtaagaagtctttgtccttaagcaatctcttgaaaggactgagcaatttcgtgaatatcagtaacacaagggtaagaataggacataaactgaatgctgtgagaactccaagaaaatccaagttgatttggggttgggggaaattataaaagaccttgagggattttgtccacagcagggaatggagacactttccaggcagagggaagggtaggagtaaaggctttaaaagctggaaacattagactgtgagatcttaggtacgtttttactgagttgggctgcatttagaggaagagttttaaaagttagaaaacgagtttatgtggcacttatactggagtcctttgaatgggaatgaaaagagtgcatttaagaaagtaaatcctggccgggcgcggtggcttacgcctgtaatcccagcactttgggaggccgaggcgggcggatcatgaggtcaggagatcgagaccatcctggctaacatggtgaaaccccgtctctactaaaaaatacaaaaaaaaattagccgggcgtggtggtgggcgcctgtagtcccagctactcgggaggctgaggcaggagaatggcgtgaacccgggaggcggagcttgcagtgagccgagttcacgccactgcattccagcctgggcgacagagcgagactccgtcgcaaaaaacaaaacaaaacaatacaaaaaagtaaatcctggagcaccatttgagcgttttggactgagctgctttctatggcagttcatctaagcacctggaatggataaaagtggcagtttttgtttcttcccatgaggttgtgtatctggactgagaaccaggaaattaatctagactaagacatttctaaggacctggaatggctttggggagcaccaggaggacccgaaaagagtatttgagggcctagagggacagaagagtttgccagtaggatttatgagaaacaattgatcagaaacagcagcagagaaaccttttagatttcttctgtggaaaagttgagtcttggttcaaattaagtaaaataaacactgaagagaaatcaaaatctcaaatataaaaagtatgttacttatagtgtaaatttaggaaaacaaatgaaaggacagatctttaaaaatttttaactatggtgaaatatttgtaaaacttttgggctcatctctgagaattgctgtgattctgaaactttgataatatctcaaatagagaacagtttcagtgaaaaatagcacttgagaataaatcagatgttcccaagaaagaagatctgagaatggtaaagtgccactgacaaataaattatttacatacttacatattaccttggcaaacacaagagacattcaagttaaagcacggtgcttgacaatactatattgaatgcaataaaagttggatttcattcatatgtacaacaaactactttcttcttcacttcaagattcggtacaactgttcctgaattccaactctccatacatcccaatgtcagggtccctgtagctcggagcccttatccaggtagatgaactgctgcccagtgaacactatgtacaaagcaatttgagcaccattctcttttctggcagtgaggtaaaatcaggtctttttggaaggggagaagccacattgcatctctgctacacacaagattactctgtcattgcctttgagtctttcacgctcccttcttctgaagcatcagtttttatggaaacttatcacacctgtcttgtgggcacatcttgctccatccctcctctcttcatattgtccgttttccggtattgagttagggaaagtatgcaggtattcctgtcattcctgactgaggctgttgtatctgtcaaaagagaggagaggtagggggcattctgaaaaatgatcactcatggcttgcaggagcaagagccagacaggactttgcaactggcagctttctgagtgcataagacctccacctctagactagctcttcagtcatggttagccccttcagtccattatcctccaatacaatgcccatgccttctggggctttcagctaagttttgtttaaaaaatgtgggttttttttttgccaattcattaaggcttttccctttgttttctcctgttggtggttcagagttaaattcagtatgaataagagagggaaatatacaacactgaatttggaggagaaaatgaaggttctaagtagaattgaagctggacgatcacttaaaagtgtaatggatgaatttggaatcagtaagtcaacattttatgacattaaaaaaaataagaagttaattctggactttgtactgaagcaggacatgccattagtaggggctgagaagagaaagaggacaacgggagccaaatatggtgatgtagatgatgcggtctacatgtggtaccaacagaaacgctcagccggtgttccggtaagaggcgtggagcttcaggctgctgcagagagatttgcacggtgttttgggcgaacagatttcaaagctagcactggttggctttttagatttcgaaatcggcatgcaattgggaaccgaaaaggatgtggggaacaagtcctaagttcagtttctgaaaatgttgagccatttcgacaaaaactgtccatgataatcaaagaggagaaactgtgtctagctcagctatacagtggggatgaaacagacctcttttggaagtcaatgccagaaaattctcaggcaagtaggaaagatatctgcctaccagggaagaaaataaacaaagaaaggttgtctgcctttttatgtgcaaatgcagacggaactcataaattaaagtcaatcattattggaaaatcaaaactgcccaaaagtgtgaaagaggacacaagtacattgcctgtgatatataaacccagtaaagatgtttggttcaccagagaattgttttcagaatggttttttcaaaactttgttcctgaggtccgacattttcaacttaatgttctaagatttcatgacgaggacgtcagggcattgttacttctggacagttgcccggctcatccttcctctgaatccctaaccagtgaggatggtcgaataaaatgtatgttcttcccccataacagttcaaccttgattcaaccaatgaatcaaggtgtgatcttgagctgcaaacggctgtatagatggaagcaacttgaagagagtcttgtaatatttgaagaaagtgatgatgagcaagagaaaggagataaaggagtttccaaaattaaaatctacaatataaaaagtgcaatttttaactgggcaaaaagttgggaagaagtaaaacaaataaccatagcaaatgcatgggaaaatcttctttacaaaaaggaacctgaatatgattttcaaggcttagaacatggggattatagagaaattcttgaaaaatgtggggagttggaaactaagttggatgatgatagggtgtggttaaatggagatgaagaaaagggttgtctcctaaaaaccaaaggtggaataacaaaggaagttgttcaaaaaggaggagaagctgagaagcagactgctgaatttaaattatctgctgtaagagagagtttggactaccttcttgactttgttgatgccacacctgagtttcagagattccacttcacactgtgtgagttctctgatgactcataagacgggaactccgagagaagctttctcc

SEQ ID NO: 285723 - DNA, 3454 bp, Homo sapiens
cggccgccgccgctccagcggctccagggtcgaagccataggggaagccgcttctcggttacctcggccagcttggcttccgtggaggccgctcctcgctttctgaggctcaaacgcaagccaccgcccgaaaggccgccgatctgaggagcgcaaccgccagcccaccgctggcctaccgcagccctgtccaggtacagagccagagcgccggccggaagtggaagtgacgctttccgagggtggcgcaggcccgccctctggctaaggcgcctgagcccggcctacttcctcgccagagaaactgctgtcttccccggcggtagggaagggttaatgccaccgagtatccagacccgctgaagcctagagggccttgtaccggctcaccgcgtggctgtcgctgtctcgtgtccccagtgggggaggcgtcgcactgccacgtctgttctgcgtggctgtcgggcggcgtttggtcccgggagcctcgccggcacctggaatggataaaagtggcagtttttgtttcttcccatgaggttgtgtatctggactgagaaccaggaaattaatctagactaagacatttctaaggacctggaatggctttggggagcaccaggaggacccgaaaagagtatttgagggcctagagggacagaagagtttgccagtaggatttatgagaaacaattgatcagaaacagcagcagagaaaccttttagatttcttctgtggaaaagttgagtcttggttcaaattaagtaaaataaacactgaagagaaatcaaaatctcaaatataaaaagtatgttacttatagtgtaaatttaggaaaacaaatgaaaggacagatctttaaaaatttttaactatggtgaaatatttgtaaaacttttgggctcatctctgagaattgctgtgattctgaaactttgataatatctcaaatagagaacagtttcagtgaaaaatagcacttgagaataaatcagatgttcccaagaaagaagatctgagaatggtaaagtgccactgacaaataaattatttacatacttacatattaccttggcaaacacaagagacattcaagttaaagcacggtgcttgacaatactatattgaatgcaataaaagttggatttcattcatatgtacaacaaactactttcttcttcacttcaagattcggtacaactgttcctgaattccaactctccatacatcccaatgtcagggtccctgtagctcggagcccttatccaggtagatgaactgctgcccagtgaacactatgtacaaagcaatttgagcaccattctcttttctggcagtgaggtaaaatcaggtctttttggaaggggagaagccacattgcatctctgctacacacaagattactctgtcattgcctttgagtctttcacgctcccttcttctgaagcatcagtttttatggaaacttatcacacctgtcttgtgggcacatcttgctccatccctcctctcttcatattgtccgttttccggtattgagttagggaaagtatgcaggtattcctgtcattcctgactgaggctgttgtatctgtcaaaagagaggagaggtagggggcattctgaaaaatgatcactcatggcttgcaggagcaagagccagacaggactttgcaactggcagctttctgagtgcataagacctccacctctagactagctcttcagtcatggttagccccttcagtccattatcctccaatacaatgcccatgccttctggggctttcagctaagttttgtttaaaaaatgtgggttttttttttgccaattcattaaggcttttccctttgttttctcctgttggtggttcagagttaaattcagtatgaataagagagggaaatatacaacactgaatttggaggagaaaatgaaggttctaagtagaattgaagctggacgatcacttaaaagtgtaatggatgaatttggaatcagtaagtcaacattttatgacattaaaaaaaataagaagttaattctggactttgtactgaagcaggacatgccattagtaggggctgagaagagaaagaggacaacgggagccaaatatggtgatgtagatgatgcggtctacatgtggtaccaacagaaacgctcagccggtgttccggtaagaggcgtggagcttcaggctgctgcagagagatttgcacggtgttttgggcgaacagatttcaaagctagcactggttggctttttagatttcgaaatcggcatgcaattgggaaccgaaaaggatgtggggaacaagtcctaagttcagtttctgaaaatgttgagccatttcgacaaaaactgtccatgataatcaaagaggagaaactgtgtctagctcagctatacagtggggatgaaacagacctcttttggaagtcaatgccagaaaattctcaggcaagtaggaaagatatctgcctaccagggaagaaaataaacaaagaaaggttgtctgcctttttatgtgcaaatgcagacggaactcataaattaaagtcaatcattattggaaaatcaaaactgcccaaaagtgtgaaagaggacacaagtacattgcctgtgatatataaacccagtaaagatgtttggttcaccagagaattgttttcagaatggttttttcaaaactttgttcctgaggtccgacattttcaacttaatgttctaagatttcatgacgaggacgtcagggcattgttacttctggacagttgcccggctcatccttcctctgaatccctaaccagtgaggatggtcgaataaaatgtatgttcttcccccataacagttcaaccttgattcaaccaatgaatcaaggtgtgatcttgagctgcaaacggctgtatagatggaagcaacttgaagagagtcttgtaatatttgaagaaagtgatgatgagcaagagaaaggagataaaggagtttccaaaattaaaatctacaatataaaaagtgcaatttttaactgggcaaaaagttgggaagaagtaaaacaaataaccatagcaaatgcatgggaaaatcttctttacaaaaaggaacctgaatatgattttcaaggcttagaacatggggattatagagaaattcttgaaaaatgtggggagttggaaactaagttggatgatgatagggtgtggttaaatggagatgaagaaaagggttgtctcctaaaaaccaaaggtggaataacaaaggaagttgttcaaaaaggaggagaagctgagaagcagactgctgaatttaaattatctgctgtaagagagagtttggactaccttcttgactttgttgatgccacacctgagtttcagagattccacttcacactgtgtgagttctctgatgactcataagacgggaactccgagagaagctttctcc

SEQ ID NO: 285724 - DNA, 1771 bp, Homo sapiens
cggccgccgccgctccagcggctccagggtcgaagccataggggaagccgcttctcggttacctcggccagcttggcttccgtggaggccgctcctcgctttctgaggctcaaacgcaagccaccgcccgaaaggccgccgatctgaggagcgcaaccgccagcccaccgctggcctaccgcagccctgtccagagttaaattcagtatgaataagagagggaaatatacaacactgaatttggaggagaaaatgaaggttctaagtagaattgaagctggacgatcacttaaaagtgtaatggatgaatttggaatcagtaagtcaacattttatgacattaaaaaaaataagaagttaattctggactttgtactgaagcaggacatgccattagtaggggctgagaagagaaagaggacaacgggagccaaatatggtgatgtagatgatgcggtctacatgtggtaccaacagaaacgctcagccggtgttccggtaagaggcgtggagcttcaggctgctgcagagagatttgcacggtgttttgggcgaacagatttcaaagctagcactggttggctttttagatttcgaaatcggcatgcaattgggaaccgaaaaggatgtggggaacaagtcctaagttcagtttctgaaaatgttgagccatttcgacaaaaactgtccatgataatcaaagaggagaaactgtgtctagctcagctatacagtggggatgaaacagacctcttttggaagtcaatgccagaaaattctcaggcaagtaggaaagatatctgcctaccagggaagaaaataaacaaagaaaggttgtctgcctttttatgtgcaaatgcagacggaactcataaattaaagtcaatcattattggaaaatcaaaactgcccaaaagtgtgaaagaggacacaagtacattgcctgtgatatataaacccagtaaagatgtttggttcaccagagaattgttttcagaatggttttttcaaaactttgttcctgaggtccgacattttcaacttaatgttctaagatttcatgacgaggacgtcagggcattgttacttctggacagttgcccggctcatccttcctctgaatccctaaccagtgaggatggtcgaataaaatgtatgttcttcccccataacagttcaaccttgattcaaccaatgaatcaaggtgtgatcttgagctgcaaacggctgtatagatggaagcaacttgaagagagtcttgtaatatttgaagaaagtgatgatgagcaagagaaaggagataaaggagtttccaaaattaaaatctacaatataaaaagtgcaatttttaactgggcaaaaagttgggaagaagtaaaacaaataaccatagcaaatgcatgggaaaatcttctttacaaaaaggaacctgaatatgattttcaaggcttagaacatggggattatagagaaattcttgaaaaatgtggggagttggaaactaagttggatgatgatagggtgtggttaaatggagatgaagaaaagggttgtctcctaaaaaccaaaggtggaataacaaaggaagttgttcaaaaaggaggagaagctgagaagcagactgctgaatttaaattatctgctgtaagagagagtttggactaccttcttgactttgttgatgccacacctgagtttcagagattccacttcacactgtgtgagttctctgatgactcataagacgggaactccgagagaagctttctcc

SEQ ID NO: 285725 - DNA, 441 bp, Homo sapiens
gtagttgaggaatgaatgggccagtcagattctgccctaaagaagaggaagaataactgagataccagccatttcccttatttctctgacatacttttctttcttcgtagcacctggaatggataaaagtggcagtttttgtttcttcccatgaggttgtgtatctggactgagaaccaggaaattaatctagactaagacatttctaaggacctggaatggctttggggagcaccaggaggacccgaaaagagtatttgagggcctagagggacagaagagtttgccagtaggatttatgagaaacaattgatcagaaacagcagcagagaaaccttttagatttcttctgtggaaaagttgagtcttggttcaaattaagtaaaataaacactgaagagaaatcaaaatctcaaatataaaaagtatgttacttatagt

SEQ ID NO: 285726 - DNA, 1594 bp, Homo sapiens
tgatgacgtaattttcctgcgcctcggggcgagcagcggcgcgcaaggaaagatcgggttccgtttttcccgcggattctggtgcctgtggggccggtgacccaacaccatgaaggaaacgccactctcaaactgcgaacgccgcttcctactccgtgccatcgaagagaagaagcggctggatggcagacaaacctatgattataggaacatcaggatctcatttggaacagattacggatgctgcattgtggaacttggaaaaacaagagttcttggacaggtttcctgtgaacttgtgtctccaaaactcaatcgggcaacagaaggtattcttttttttaaccttgaactctctcagatggccgctccagctttcgaacctggcaggcagtcagatctcttggtgaagttgaatcgactcatggaaagatgtctaagaaattcgaagtgtatagacactgagtctctctgtgttgttgctggtgaaaaggtttggcaaatacgtgtagacctacatttattaaatcatgatggaaatattattgatgctgccagcattgctgcaatcgtggccttatgtcatttccgaagacctgatgtctctgtccaaggagatgaagtaacactgtatacacctgaagagcgtgatcctgtaccattaagtatccaccacatgcccatttgtgtcagttttgcctttttccagcaaggaacatatttattggtggatcccaatgaacgagaagaacgtgtgatggatggcttgctggtgattgccatgaacaaacatcgagagatttgtactatccagtccagtggtgggataatgctactaaaagatcaagttctgagatgcagtaaaatcgctggtgtgaaagtagcagaaattacagagctaatattgaaagctttggagaatgaccaaaaagtaaggaaagaaggtggaaagtttggttttgcagagtctatagcaaatcaaaggatcacagcatttaaaatggaaaaggcccctattgatacctcggatgtagaagaaaaagcagaagaaatcattgctgaagcagaacctccttcagaagttgtttctacacctgtgctatggactcctggaactgcccaaattggagagggagtagaaaactcctggggtgatcttgaagactctgagaaggaagatgatgaaggcggtggtgatcaagctatcattcttgatggtataaaaatggacactggagtagaagtctctgatattggaagccaagatgctcccataatactctcagatagtgaagaagaagaaatgatcattttggaaccagacaagaatccaaagaaaataagaacacagaccaccagtgcaaaacaagaaaaagcaccaagtaaaaagccagtgaaaagaagaaaaaagaagagagctgccaattaaagctaacagttgtatatctgtatatataactattaaaagggatatttattccattctgagaaccctgggtattttttattcacaaatccattataaaatctagcaggattttaaaaatagttttttgtttttaatgtgctttaaaataataaaccttctggagca

SEQ ID NO: 285727 - DNA, 2003 bp, Homo sapiens
tgatgacgtaattttcctgcgcctcggggcgagcagcggcgcgcaaggaaagatcgggttccgtttttcccgcggattctggtgcctgtggggccggtgacccaacaccatgaaggaaacgccactctcaaactgcgaacgccgcttcctactccgtgccatcgaagagaagaagcggctggatggcagacaaacctatgattataggaacatcaggatctcatttggaacagattacggatgctgcattgtggaacttggaaaaacaagagttcttggacaggtttcctgtgaacttgtgtctccaaaactcaatcgggcaacagaaggtattcttttttttaaccttgaactctctcagatggccgctccagctttcgaacctggcaggcagtcagatctcttggtgaagttgaatcgactcatggaaagatgtctaagaaattcgaagtgtatagacactgagtctctctgtgttgttgctggtgaaaaggtttggcaaatacgtgtagacctacatttattaaatcatgatggaaatattattgatgctgccagcattgctgcaatcgtggccttatgtcatttccgaagacctgatgtctctgtccaaggagatgaagtaacactgtatacacctgaagagcgtgatcctgtaccattaagtatccaccacatgcccatttgtgtcagttttgcctttttccagcaaggaacatatttattggtggatcccaatgaacgagaagaacgtgtgatggatggcttgctggtgattgccatgaacaaacatcgagagatttgtactatccagtccagtggtgggataatgctactaaaagatcaagttctgagatgcagtaaaatcgctggtgtgaaagtagcagaaattacagagctaatattgaaagctttggagaatgaccaaaaagtaaggaaagaaggtggaaagtttggttttgcagagtctatagcaaatcaaaggatcacagcatttaaaatggaaaaggcccctattgatacctcggatgtagaagaaaaagcagaagaaatcattgctgaagcagaacctccttcagaagttgtttctacacctgtgctatggactcctggaactgcccaaattggagagggagtagaaaactcctggggtgatcttgaagactctgagaaggaagatgatgaaggcggtggtgatcaagctatcattcttgatggtataaaaatggacactggagtagaagtctctgatattggaagccaagatgctcccataatactctcagatagtgaagaagaagaaatgatcattttggaaccagacaagaatccaaagaaaataagaacacagaccaccagtgcaaaacaagaaaaagcaccaagtaaaaagccagtgaaaagaagaaaaaagaagagagctgccaattaaagctaacagttgtatatctgtatatataactattaaaagggatatttattccattctgagaaccctgggtattttttattcacaaatccattataaaatctagcaggattttaaaaatagttttttgtttttaatgtgctttaaaataataaaccttctggagcatttctcgtctgttaatttgcatataagcttcccaccctcttccactcccaacctctgttgagtttacctcgcaaaacctaaacaaacaggttttacaaagagcgaaaaagtctggggaatctctactgtatctatctctgaatactgtattcagatatgcttagattagattatgcccaagtcagcaaattgatccagttgcttaggaaaatgaatgtcagaatttgagggtctgttttcctaaacctactttaattttagaggaaggcttttcacttcccattatatagtaaaccaagtaaacttctttactaagcaaaatcctgaagaagttaaatttgacttgcaaagttttccaaatcaatttattatcctgacagctggcatcattaatactttaacaaaacca

SEQ ID NO: 285728 - DNA, 1482 bp, Homo sapiens
tgatgacgtaattttcctgcgcctcggggcgagcagcggcgcgcaaggaaagatcgggttccgtttttcccgcggattctggtgcctgtggggccggtgacccaacaccatgaaggaaacgccactctcaaactgcgaacgccgcttcctactccgtgccatcgaagagaagaagcggctggatggcagacaaacctatgattataggaacatcaggatctcatttggaacagattacggatgctgcattgtggaacttggaaaaacaagagttcttggacaggtttcctgtgaacttgtgtctccaaaactcaatcgggcaacagaaggtattcttttttttaaccttgaactctctcagatggccgctccagctttcgaacctggcaggcagtcagatctcttggtgaagttgaatcgactcatggaaagatgtctaagaaattcgaagtgtatagacactgagtctctctgtgttgttgctggtgaaaaggtttggcaaatacgtgtagacctacatttattaaatcatgatggaaatattattgatgctgccagcattgctgcaatcgtggccttatgtcatttccgaagacctgatgtctctgtccaaggagatgaagtaacactgtatacacctgaagagcgtgatcctgtaccattaagtatccaccacatgcccatttgtgtcagttttgcctttttccagcaaggaacatatttattggtggatcccaatgaacgagaagaacgtgtgatggatggcttgctggtgattgccatgaacaaacatcgagagatttgtactatccagtccagtggtgggataatgctactaaaagatcaagttctgagatgcagtaaaatcgctggtgtgaaagtagcagaaattacagagctaatattgaaagctttggagaatgaccaaaaagtaaggaaagaaggtggaaagtttggttttgcagagtctatagcaaatcaaaggatcacagcatttaaaatggaaaaggcccctattgatacctcggatgtagaagaaaaagcagaagaaatcattgctgaagcagaacctccttcagaagttgtttctacacctgtgctatggactcctggaactgcccaaattggagagggagtagaaaactcctggggtgatcttgaagactctgagaaggaagatgatgaaggcggtggtgatcaagctatcattcttgatggtataaaaatggacactggagtagaagtctctgatattggaagccaagatgctcccataatactctcagatagtgaagaagaagaaatgatcattttggaaccagacaagaatccaaagaaaataagaacacagaccaccagtgcaaaacaagaaaaagcaccaagtaaaaagccagtgaaaagaagaaaaaagaagagagctgccaattaaagctaacagttgtatatctgtatatataactattaaaagggatatttattcca

SEQ ID NO: 285729 - DNA, 2327 bp, Homo sapiens
tgatgacgtaattttcctgcgcctcggggcgagcagcggcgcgcaaggaaagatcgggttccgtttttcccgcggattctggtgcctgtggggccggtgacccaacaccatgaaggaaacgccactctcaaactgcgaacgccgcttcctactccgtgccatcgaagagaagaagcggctggatggcagacaaacctatgattataggaacatcaggatctcatttggaacagattacggatgctgcattgtggaacttggaaaaacaagagttcttggacaggtttcctgtgaacttgtgtctccaaaactcaatcgggcaacagaaggtattcttttttttaaccttgaactctctcagatggccgctccagctttcgaacctggcaggcagtcagatctcttggtgaagttgaatcgactcatggaaagatgtctaagaaattcgaagtgtatagacactgagtctctctgtgttgttgctggtgaaaaggtttggcaaatacgtgtagacctacatttattaaatcatgatggaaatattattgatgctgccagcattgctgcaatcgtggccttatgtcatttccgaagacctgatgtctctgtccaaggagatgaagtaacactgtatacacctgaagagcgtgatcctgtaccattaagtatccaccacatgcccatttgtgtcagttttgcctttttccagcaaggaacatatttattggtggatcccaatgaacgagaagaacgtgtgatggatggcttgctggtgattgccatgaacaaacatcgagagatttgtactatccagtccagtggtgggataatgctactaaaagatcaagttctgagatgcagtaaaatcgctggtgtgaaagtagcagaaattacagagctaatattgaaagctttggagaatgaccaaaaagtaaggaaagaaggtggaaagtttggttttgcagagtctatagcaaatcaaaggatcacagcatttaaaatggaaaaggcccctattgatacctcggatgtagaagaaaaagcagaagaaatcattgctgaagcagaacctccttcagaagttgtttctacacctgtgctatggactcctggaactgcccaaattggagagggagtagaaaactcctggggtgatcttgaagactctgagaaggaagatgatgaaggcggtggtgatcaagctatcattcttgatggtataaaaatggacactggagtagaagtctctgatattggaagccaagatgctcccataatactctcagatagtgaagaagaagaaatgatcattttggaaccagacaagaatccaaagaaaataaggtaacaaatttctggtttatttcaaatgtatacatatactcaacacttatagaggtttgctctctggttttactctcatcttgccacatgactataaacaaaaagacatccctttttcattagagatccatctgttctgtgatttttttaccttgtgatttataaaaattaggacctaaatctataatataaacttcttggatgccagtcttactcatagctgacacattttagatcctactggaaaactaagaaatgcctcttatttcaataatccaaaacttaacatactcttagtaaattcttactttgctttattcacagaacacagaccaccagtgcaaaacaagaaaaagcaccaagtaaaaagccagtgaaaagaagaaaaaagaagagagctgccaattaaagctaacagttgtatatctgtatatataactattaaaagggatatttattccattctgagaaccctgggtattttttattcacaaatccattataaaatctagcaggattttaaaaatagttttttgtttttaatgtgctttaaaataataaaccttctggagcatttctcgtctgttaatttgcatataagcttcccaccctcttccactcccaacctctgttgagtttacctcgcaaaacctaaacaaacaggttttacaaagagcgaaaaagtctggggaatctctactgtatctatctctgaatactgtattcagatatgcttagattagattatgcccaagtcagcaaattgatccagttgcttaggaaaatgaatgtcagaatttgagggtctgttttcctaaacctactttaattttagaggaaggcttttcacttcccattatatagtaaaccaagtaaacttctttactaagcaaaatcctgaagaagttaaatttgacttgcaaagttttccaaatcaatttattatcctgacagctggcatcattaatactttaacaaaacca

SEQ ID NO: 285730 - DNA, 2054 bp, Homo sapiens
tgatgacgtaattttcctgcgcctcggggcgagcagcggcgcgcaaggaaagatcgggttccgtttttcccgcggattctggtgcctgtggggccggtgacccaacaccatgaaggaaacgccactctcaaactgcgaacgccgcttcctactccgtgccatcgaagagaagaagcggctggatggcagacaaacctatgattataggaacatcaggatctcatttggaacagattacggatgctgcattgtggaacttggaaaaacaagagttcttggacaggtttcctgtgaacttgtgtctccaaaactcaatcgggcaacagaaggtattcttttttttaaccttgaactctctcagatggccgctccagctttcgaacctggcaggcagtcagatctcttggtgaagttgaatcgactcatggaaagatgtctaagaaattcgaagtgtatagacactgagtctctctgtgttgttgctggtgaaaaggtttggcaaatacgtgtagacctacatttattaaatcatgatggaaatattattgatgctgccagcattgctgcaatcgtggccttatgtcatttccgaagacctgatgtctctgtccaaggagatgaagtaacactgtatacacctgaagagcgtgatcctgtaccattaagtatccaccacatgcccatttgtgtcagttttgcctttttccagcaaggaacatatttattggtggatcccaatgaacgagaagaacgtgtgatggatggcttgctggtgattgccatgaacaaacatcgagagatttgtactatccagtccagtggtgggataatgctactaaaagatcaagttctgagatgcagtaaaatcgctggtgtgaaagtagcagaaattacagagctaatattgaaagctttggagaatgaccaaaaagtaaggaaagaaggtggaaagtttggttttgcagagtctatagcaaatcaaaggatcacagcatttaaaatggaaaaggcccctattgatacctcggatgtagaagaaaaagcagaagaaatcattgctgaagcagaacctccttcagaagttgtttctacacctgtgctatggactcctggaactgcccaaattggagagggagtagaaaactcctggggtgatcttgaagactctgagaaggaagatgatgaaggcggtggtgatcaagctatcattcttgatggtataaaaatggacactggagtagaagtctctgatattggaagccaagagctggggtttcaccatgttggccagactggactcgagttcctgacctcagatgctcccataatactctcagatagtgaagaagaagaaatgatcattttggaaccagacaagaatccaaagaaaataagaacacagaccaccagtgcaaaacaagaaaaagcaccaagtaaaaagccagtgaaaagaagaaaaaagaagagagctgccaattaaagctaacagttgtatatctgtatatataactattaaaagggatatttattccattctgagaaccctgggtattttttattcacaaatccattataaaatctagcaggattttaaaaatagttttttgtttttaatgtgctttaaaataataaaccttctggagcatttctcgtctgttaatttgcatataagcttcccaccctcttccactcccaacctctgttgagtttacctcgcaaaacctaaacaaacaggttttacaaagagcgaaaaagtctggggaatctctactgtatctatctctgaatactgtattcagatatgcttagattagattatgcccaagtcagcaaattgatccagttgcttaggaaaatgaatgtcagaatttgagggtctgttttcctaaacctactttaattttagaggaaggcttttcacttcccattatatagtaaaccaagtaaacttctttactaagcaaaatcctgaagaagttaaatttgacttgcaaagttttccaaatcaatttattatcctgacagctggcatcattaatactttaacaaaacca

SEQ ID NO: 285731 - DNA, 1533 bp, Homo sapiens
tgatgacgtaattttcctgcgcctcggggcgagcagcggcgcgcaaggaaagatcgggttccgtttttcccgcggattctggtgcctgtggggccggtgacccaacaccatgaaggaaacgccactctcaaactgcgaacgccgcttcctactccgtgccatcgaagagaagaagcggctggatggcagacaaacctatgattataggaacatcaggatctcatttggaacagattacggatgctgcattgtggaacttggaaaaacaagagttcttggacaggtttcctgtgaacttgtgtctccaaaactcaatcgggcaacagaaggtattcttttttttaaccttgaactctctcagatggccgctccagctttcgaacctggcaggcagtcagatctcttggtgaagttgaatcgactcatggaaagatgtctaagaaattcgaagtgtatagacactgagtctctctgtgttgttgctggtgaaaaggtttggcaaatacgtgtagacctacatttattaaatcatgatggaaatattattgatgctgccagcattgctgcaatcgtggccttatgtcatttccgaagacctgatgtctctgtccaaggagatgaagtaacactgtatacacctgaagagcgtgatcctgtaccattaagtatccaccacatgcccatttgtgtcagttttgcctttttccagcaaggaacatatttattggtggatcccaatgaacgagaagaacgtgtgatggatggcttgctggtgattgccatgaacaaacatcgagagatttgtactatccagtccagtggtgggataatgctactaaaagatcaagttctgagatgcagtaaaatcgctggtgtgaaagtagcagaaattacagagctaatattgaaagctttggagaatgaccaaaaagtaaggaaagaaggtggaaagtttggttttgcagagtctatagcaaatcaaaggatcacagcatttaaaatggaaaaggcccctattgatacctcggatgtagaagaaaaagcagaagaaatcattgctgaagcagaacctccttcagaagttgtttctacacctgtgctatggactcctggaactgcccaaattggagagggagtagaaaactcctggggtgatcttgaagactctgagaaggaagatgatgaaggcggtggtgatcaagctatcattcttgatggtataaaaatggacactggagtagaagtctctgatattggaagccaagagctggggtttcaccatgttggccagactggactcgagttcctgacctcagatgctcccataatactctcagatagtgaagaagaagaaatgatcattttggaaccagacaagaatccaaagaaaataagaacacagaccaccagtgcaaaacaagaaaaagcaccaagtaaaaagccagtgaaaagaagaaaaaagaagagagctgccaattaaagctaacagttgtatatctgtatatataactattaaaagggatatttattcca

SEQ ID NO: 285732 - DNA, 2228 bp, Homo sapiens
tgatgacgtaattttcctgcgcctcggggcgagcagcggcgcgcaaggaaagatcgggttccgtttttcccgcggattctggtgcctgtggggccggtgacccaacaccatgaaggaaacgccactctcaaactgcgaacgccgcttcctactccgtgccatcgaagagaagaagcggctggatggcagacaaacctatgattataggaacatcaggatctcatttggaacagattacggatgctgcattgtggaacttggaaaaacaagagttcttggacaggtttcctgtgaacttgtgtctccaaaactcaatcgggcaacagaaggtattcttttttttaaccttgaactctctcagatggccgctccagctttcgaacctggcaggcagtcagatctcttggtgaagttgaatcgactcatggaaagatgtctaagaaattcgaagtgtatagacactgagtctctctgtgttgttgctggtgaaaaggtttggcaaatacgtgtagacctacatttattaaatcatgatggaaatattattgatgctgccagcattgctgcaatcgtggccttatgtcatttccgaagacctgatgtctctgtccaaggagatgaagtaacactgtatacacctgaagagcgtgatcctgtaccattaagtatccaccacatgcccatttgtgtcagttttgcctttttccagcaaggaacatatttattggtggatcccaatgaacgagaagaacgtgtgatggatggcttgctggtgattgccatgaacaaacatcgagagatttgtactatccagtccagtggtgggataatgctactaaaagatcaagttctgagatgcagtaaaatcgctggtgtgaaagtagcagaaattacagagctaatattgaaagctttggagaatgaccaaaaagtaaggaaagaaggtggaaagtttggttttgcagagtctatagcaaatcaaaggatcacagcatttaaaatggaaaaggcccctattgatacctcggatgtagaagaaaaagcagaagaaatcattgctgaagcagaacctccttcagaagttgtttctacacctgtgctatggactcctggaactgcccaaattggagagggagtagaaaactcctggggtgatcttgaagactctgagaaggaagatgatgaaggcggtggtgatcaagctatcattcttgatggtataaaaatggacactggagtagaagtctctgatattggaagccaagagctggggtttcaccatgttggccagactggactcgagttcctgacctcaggtaatccacctgcctcagcctaccaaaatgtgggtattaaaagtgtgagccaccacgcccagccccagaaataagagtttagaacgtctgatagaaataaattcatgtagaaataaattttgcaagagattgcttaacttttttttttttttttaaattaataaaaaaacaaagatgctcccataatactctcagatagtgaagaagaagaaatgatcattttggaaccagacaagaatccaaagaaaataagaacacagaccaccagtgcaaaacaagaaaaagcaccaagtaaaaagccagtgaaaagaagaaaaaagaagagagctgccaattaaagctaacagttgtatatctgtatatataactattaaaagggatatttattccattctgagaaccctgggtattttttattcacaaatccattataaaatctagcaggattttaaaaatagttttttgtttttaatgtgctttaaaataataaaccttctggagcatttctcgtctgttaatttgcatataagcttcccaccctcttccactcccaacctctgttgagtttacctcgcaaaacctaaacaaacaggttttacaaagagcgaaaaagtctggggaatctctactgtatctatctctgaatactgtattcagatatgcttagattagattatgcccaagtcagcaaattgatccagttgcttaggaaaatgaatgtcagaatttgagggtctgttttcctaaacctactttaattttagaggaaggcttttcacttcccattatatagtaaaccaagtaaacttctttactaagcaaaatcctgaagaagttaaatttgacttgcaaagttttccaaatcaatttattatcctgacagctggcatcattaatactttaacaaaacca

SEQ ID NO: 285733 - DNA, 1295 bp, Homo sapiens
tgatgacgtaattttcctgcgcctcggggcgagcagcggcgcgcaaggaaagatcgggttccgtttttcccgcggattctggtgcctgtggggccggtgacccaacaccatgaaggaaacgccactctcaaactgcgaacgccgcttcctactccgtgccatcgaagagaagaagcggctggatggcagacaaacctatgattataggaacatcaggatctcatttggaacagattacggatgctgcattgtggaacttggaaaaacaagagttcttggacaggtttcctgtgaacttgtgtctccaaaactcaatcgggcaacagaaggtattcttttttttaaccttgaactctctcagatggccgctccagctttcgaacctggcaggcagtcagatctcttggtgaagttgaatcgactcatggaaagatgtctaagaaattcgaagtgtatagacactgagtctctctgtgttgttgctggtgaaaaggtttggcaaatacgtgtagacctacatttattaaatcatgatggaaatattattgatgctgccagcattgctgcaatcgtggccttatgtcatttccgaagacctgatgtctctgtccaaggagatgaagtaacactgtatacacctgaagagcgtgatcctgtaccattaagtatccaccacatgcccatttgtgtcagttttgcctttttccagcaaggaacatatttattggtggatcccaatgaacgagaagaacgtgtgatggatggcttgctggtgattgccatgaacaaacatcgagagatttgtactatccagtccagtggtgggataatgctactaaaagatcaagttctgagatgcagtaaaatcgctggtgtgaaagtagcagaaattacagagctaatattgaaagctttggagaatgaccaaaaagtaaggaaagaaggtggaaagtttggttttgcagagtctatagcaaatcaaaggatcacagcatttaaaatggaaaaggcccctattgatacctcggatgtagaagaaaaagcagaagaaatcattgctgaagcagaacctccttcagaagttgtttctacacctgtgctatggactcctggaactgcccaaattggagagggagtagaaaactcctggggtgatcttgaagactctgagaaggaagatgatgaaggcggtggtgatcaagctatcattcttgatggtataaaaatggacactggagtagaagtctctgatattggaagccaaggtaggtgacactttatggcacacttactat

SEQ ID NO: 285734 - DNA, 1007 bp, Homo sapiens
tgatgacgtaattttcctgcgcctcggggcgagcagcggcgcgcaaggaaagatcgggttccgtttttcccgcggattctggtgcctgtggggccggtgacccaacaccatgaaggaaacgccactctcaaactgcgaacgccgcttcctactccgtgccatcgaagagaagaagcggctggatggcagacaaacctatgattataggaacatcaggatctcatttggaacagattacggatgctgcattgtggaacttggaaaaacaagagttcttggacaggtttcctgtgaacttgtgtctccaaaactcaatcgggcaacagaaggtattcttttttttaaccttgaactctctcagatggccgctccagctttcgaacctggcaggcagtcagatctcttggtgaagttgaatcgactcatggaaagatgtctaagaaattcgaagtgtatagacactgagtctctctgtgttgttgctggtgaaaaggtttggcaaatacgtgtagacctacatttattaaatcatgatggaaatattattgatgctgccagcattgctgcaatcgtggccttatgtcatttccgaagacctgatgtctctgtccaaggagatgaagtaacactgtatacacctgaagagcgtgatcctgtaccattaagtatccaccacatgcccatttgtgtcagttttgcctttttccagcaaggaacatatttattggtggatcccaatgaacgagaagaacgtgtgatggatggcttgctggtgattgccatgaacaaacatcgagagatttgtactatccagtccagtggtgggataatgctactaaaagatcaagttctgagatgcagtaaaatcgctggtgtgaaagtagcagaaattacagagctaatattgaaagcatttactgatggggagagaggggaaaggaagggagacgagcggagagacgagtgtggggtgtggagaagccgtgtctgaatacaatgtgtgggcc

SEQ ID NO: 285735 - DNA, 1378 bp, Homo sapiens
tgatgacgtaattttcctgcgcctcggggcgagcagcggcgcgcaaggaaagatcgggttccgtttttcccgcggattctggtgcctgtggggccggtgacccaacaccatgaaggaaacgccactctcaaactgcgaacgccgcttcctactccgtgccatcgaagagaagaagcggctggatggcagacaaacctatgattataggaacatcaggatctcatttggaacagattacggatgctgcattgtggaacttggaaaaacaagagttcttggacaggtttcctgtgaacttgtgtctccaaaactcaatcgggcaacagaaggtattcttttttttaaccttgaactctctcagatggccgctccagctttcgaacctggcaggcagtcagatctcttggtgaagttgaatcgactcatggaaagatgtctaagaaattcgaagtgtatagacactgagtctctctgtgttgttgctggtgaaaaggtttggcaaatacgtgtagacctacatttattaaatcatgatggaaatattattgatgctgccagcattgctgcaatcgtggccttatgtcatttccgaagacctgatgtctctgtccaaggagatgaagtaacactggttctgagatgcagtaaaatcgctggtgtgaaagtagcagaaattacagagctaatattgaaagctttggagaatgaccaaaaagtaaggaaagaaggtggaaagtttggttttgcagagtctatagcaaatcaaaggatcacagcatttaaaatggaaaaggcccctattgatacctcggatgtagaagaaaaagcagaagaaatcattgctgaagcagaacctccttcagaagttgtttctacacctgtgctatggactcctggaactgcccaaattggagagggagtagaaaactcctggggtgatcttgaagactctgagaaggaagatgatgaaggcggtggtgatcaagctatcattcttgatggtataaaaatggacactggagtagaagtctctgatattggaagccaagatgctcccataatactctcagatagtgaagaagaagaaatgatcattttggaaccagacaagaatccaaagaaaataagaacacagaccaccagtgcaaaacaagaaaaagcaccaagtaaaaagccagtgaaaagaagaaaaaagaagagagctgccaattaaagctaacagttgtatatctgtatatataactattaaaagggatatttattccattctgagaaccctgggtattttttattcacaaatccattataaaatctagcaggattttaaaaatagttttttgtttttaatgtgctttaaaataataaaccttctggagca

SEQ ID NO: 285736 - DNA, 2159 bp, Homo sapiens
gttgaagatgtaagttgtttccattttctcactgttaatatccttgcacttgcatatacctcttatatgtttgtttagtgtattcttctaacagtgaataatattttcaactgaatataatgaaggtggacctaagcattggaaaaatggagcaggtacagccttcctaaagcatgtgaacaaagggagaaactaattgaaaactaaaaatacaaataattgatatgggttaattcacattttatgtatatcattaactaataagcaggagaaaaatgggcaaaatacatggagcagttctcaaagtatacaatggccagtaatatttttcatggtcagccctgacagtaatacaaataaaatccaaagaaaaatgacatggcattttttgttactgtattttgggcagtattaaaaacaccagcaatgccaaaggtatatgggaaatgggttcttttatttcttggaatgtaaactggaactatttctggaggaatagagtagcacaaacaattcagttgtctctacaaaagatgctatatacatttccccctagcttttctattatgacatgtaccaaattgtcacaccattcaagcacctgtaggaaataagagtttaaagaaacaaatgttacagatgagttctagagtgctctaagaagctgatttaaagaaaagattaagcctccacctagagttttatttttattttttgggatggagtcttgctctgtcacccagactggagtgcagtggcactgcaacctccacctccatgggttcaagcgattctcatgcctcagcctcgagtagctgggcctacaagcacatgccaccacgcctggctaatttttctattatttttaatagagctggggtttcaccatgttggccagactggactcgagttcctgacctcaggtaatccacctgcctcagcctaccaaaatgtgggtattaaaagtgtgagccaccacgcccagccccagaaataagagtttagaacgtctgatagaaataaattcatgtagaaataaattttgcaagagattgcttaacttttttttttttttttaaattaataaaaaaacaaagatgctcccataatactctcagatagtgaagaagaagaaatgatcattttggaaccagacaagaatccaaagaaaataaggtaacaaatttctggtttatttcaaatgtatacatatactcaacacttatagaggtttgctctctggttttactctcatcttgccacatgactataaacaaaaagacatccctttttcattagagatccatctgttctgtgatttttttaccttgtgatttataaaaattaggacctaaatctataatataaacttcttggatgccagtcttactcatagctgacacattttagatcctactggaaaactaagaaatgcctcttatttcaataatccaaaacttaacatactcttagtaaattcttactttgctttattcacagaacacagaccaccagtgcaaaacaagaaaaagcaccaagtaaaaagccagtgaaaagaagaaaaaagaagagagctgccaattaaagctaacagttgtatatctgtatatataactattaaaagggatatttattccattctgagaaccctgggtattttttattcacaaatccattataaaatctagcaggattttaaaaatagttttttgtttttaatgtgctttaaaataataaaccttctggagcatttctcgtctgttaatttgcatataagcttcccaccctcttccactcccaacctctgttgagtttacctcgcaaaacctaaacaaacaggttttacaaagagcgaaaaagtctggggaatctctactgtatctatctctgaatactgtattcagatatgcttagattagattatgcccaagtcagcaaattgatccagttgcttaggaaaatgaatgtcagaatttgagggtctgttttcctaaacctactttaattttagaggaaggcttttcacttcccattatatagtaaaccaagtaaacttctttactaagcaaaatcctgaagaagttaaatttgacttgcaaagttttccaaatcaatttattatcctgacagctggcatcattaatactttaacaaaacca

SEQ ID NO: 285737 - DNA, 1835 bp, Homo sapiens
gttgaagatgtaagttgtttccattttctcactgttaatatccttgcacttgcatatacctcttatatgtttgtttagtgtattcttctaacagtgaataatattttcaactgaatataatgaaggtggacctaagcattggaaaaatggagcaggtacagccttcctaaagcatgtgaacaaagggagaaactaattgaaaactaaaaatacaaataattgatatgggttaattcacattttatgtatatcattaactaataagcaggagaaaaatgggcaaaatacatggagcagttctcaaagtatacaatggccagtaatatttttcatggtcagccctgacagtaatacaaataaaatccaaagaaaaatgacatggcattttttgttactgtattttgggcagtattaaaaacaccagcaatgccaaaggtatatgggaaatgggttcttttatttcttggaatgtaaactggaactatttctggaggaatagagtagcacaaacaattcagttgtctctacaaaagatgctatatacatttccccctagcttttctattatgacatgtaccaaattgtcacaccattcaagcacctgtaggaaataagagtttaaagaaacaaatgttacagatgagttctagagtgctctaagaagctgatttaaagaaaagattaagcctccacctagagttttatttttattttttgggatggagtcttgctctgtcacccagactggagtgcagtggcactgcaacctccacctccatgggttcaagcgattctcatgcctcagcctcgagtagctgggcctacaagcacatgccaccacgcctggctaatttttctattatttttaatagagctggggtttcaccatgttggccagactggactcgagttcctgacctcaggtaatccacctgcctcagcctaccaaaatgtgggtattaaaagtgtgagccaccacgcccagccccagaaataagagtttagaacgtctgatagaaataaattcatgtagaaataaattttgcaagagattgcttaacttttttttttttttttaaattaataaaaaaacaaagatgctcccataatactctcagatagtgaagaagaagaaatgatcattttggaaccagacaagaatccaaagaaaataagaacacagaccaccagtgcaaaacaagaaaaagcaccaagtaaaaagccagtgaaaagaagaaaaaagaagagagctgccaattaaagctaacagttgtatatctgtatatataactattaaaagggatatttattccattctgagaaccctgggtattttttattcacaaatccattataaaatctagcaggattttaaaaatagttttttgtttttaatgtgctttaaaataataaaccttctggagcatttctcgtctgttaatttgcatataagcttcccaccctcttccactcccaacctctgttgagtttacctcgcaaaacctaaacaaacaggttttacaaagagcgaaaaagtctggggaatctctactgtatctatctctgaatactgtattcagatatgcttagattagattatgcccaagtcagcaaattgatccagttgcttaggaaaatgaatgtcagaatttgagggtctgttttcctaaacctactttaattttagaggaaggcttttcacttcccattatatagtaaaccaagtaaacttctttactaagcaaaatcctgaagaagttaaatttgacttgcaaagttttccaaatcaatttattatcctgacagctggcatcattaatactttaacaaaacca

SEQ ID NO: 285738 - DNA, 280 bp, Homo sapiens
cattgttcagccatccatagtgtagctatattaagttttttttcccctaggaacttggggcacacttgaatcaatcttacaagaagaaaactttcattctcatcttcaacagttcatcaaatagcaatatttttgttactcagttttcttaacttgttaagtgtttctacacctgtgctatggactcctggaactgcccaaattggagagggagtagaaaactcctggggtgatcttgaagactctgagaaggaagatgatgaaggcggtggtgatcaag

SEQ ID NO: 285739 - DNA, 1806 bp, Homo sapiens
tgatgacgtaattttcctgcgcctcggggcgagcagcggcgcgcaaggaaagatcgggttccgtttttcccgcggattctggtgcctgtggggccggtgacccaacaccatgaaggaaacgccactctcaaactgcgaacgccgcttcctactccgtgccatcgaagagaagaagcggctggatggcagacaaacctatgattataggaacatcaggatctcatttggaacagattacggatgctgcattgtggaacttggaaaaacaagagttcttggacaggtttcctgtgaacttgtgtctccaaaactcaatcgggcaacagaaggtattcttttttttaaccttgaactctctcagatggccgctccagctttcgaacctggcaggcagtcagatctcttggtgaagttgaatcgactcatggaaagatgtctaagaaattcgaagtgtatagacactgagtctctctgtgttgttgctggtgaaaaggtttggcaaatacgtgtagacctacatttattaaatcatgatggaaatattattgatgctgccagcattgctgcaatcgtggccttatgtcatttccgaagacctgatgtctctgtccaaggagatgaagtaacactgtatacacctgaagagcgtgatcctgtaccattaagtatccaccacatgcccatttgtgtcagttttgcctttttccagcaaggaacatatttattggtggatcccaatgaacgagaagaacgtgtgatggatggcttgctggtgattgccatgaacaaacatcgagagatttgtactatccagtccagtggtgggataatgctactaaaagatcaagttctgagatgcagtaaaatcgctggtgtgaaagtagcagaaattacagagctaatattgaaagctttggagaatgaccaaaaagtaaggaaagaaggtggaaagtttggttttgcagagtctatagcaaatcaaaggatcacagcatttaaaatggaaaaggcccctattgatacctcggatgtagaagaaaaagcagaagaaatcattgctgaagcagaacctccttcagaagttgtttctacacctgtgctatggactcctggaactgcccaaattggagagggagtagaaaactcctggggtgatcttgaagactctgagaaggaagatgatgaaggcggtggtgatcaagctatcattcttgatggtataaaaatggacactggagtagaagtctctgatattggaagccaagatgctcccataatactctcagatagtgaagaagaagaaatgatcattttggaaccagacaagaatccaaagaaaataaggtaacaaatttctggtttatttcaaatgtatacatatactcaacacttatagaggtttgctctctggttttactctcatcttgccacatgactataaacaaaaagacatccctttttcattagagatccatctgttctgtgatttttttaccttgtgatttataaaaattaggacctaaatctataatataaacttcttggatgccagtcttactcatagctgacacattttagatcctactggaaaactaagaaatgcctcttatttcaataatccaaaacttaacatactcttagtaaattcttactttgctttattcacagaacacagaccaccagtgcaaaacaagaaaaagcaccaagtaaaaagccagtgaaaagaagaaaaaagaagagagctgccaattaaagctaacagttgtatatctgtatatataactattaaaagggatatttattcca

SEQ ID NO: 285740 - DNA, 1515 bp, Homo sapiens
tgatgacgtaattttcctgcgcctcggggcgagcagcggcgcgcaaggaaagatcgggttccgtttttcccgcggattctggtgcctgtggggccggtgacccaacaccatgaaggaaacgccactctcaaactgcgaacgccgcttcctactccgtgccatcgaagagaagaagcggctggatggcagacaaacctatgattataggaacatcaggatctcatttggaacagattacggatgctgcattgtggaacttggaaaaacaagagttcttggacaggtttcctgtgaacttgtgtctccaaaactcaatcgggcaacagaaggtattcttttttttaaccttgaactctctcagatggccgctccagctttcgaacctggcaggcagtcagatctcttggtgaagttgaatcgactcatggaaagatgtctaagaaattcgaagtgtatagacactgagtctctctgtgttgttgctggtgaaaaggtttggcaaatacgtgtagacctacatttattaaatcatgatggaaatattattgatgctgccagcattgctgcaatcgtggccttatgtcatttccgaagacctgatgtctctgtccaaggagatgaagtaacactgtatacacctgaagagcgtgatcctgtaccattaagtatccaccacatgcccatttgtgtcagttttgcctttttccagcaaggaacatatttattggtggatcccaatgaacgagaagaacgtgtgatggatggcttgctggtgattgccatgaacaaacatcgagagatttgtactatccagtccagtggtgggataatgctactaaaagatcaagttctgagatgcagtaaaatcgctggtgtgaaagtagcagaaattacagagctaatattgaaagctttggagaatgaccaaaaagtaaggaaagaaggtggaaagtttggttttgcagagtctatagcaaatcaaaggatcacagcatttaaaatggaaaaggcccctattgatacctcggatgtagaagaaaaagcagaagaaatcattgctgaagcagaacctccttcagaagttgtttctacacctgtgctatggactcctggaactgcccaaattggagagggagtagaaaactcctggggtgatcttgaagactctgagaaggaagatgatgaaggcggtggtgatcaagctatcattcttgatggtataaaaatggacactggagtagaagtctctgatattggaagccaagaacacagaccaccagtgcaaaacaagaaaaagcaccaagtaaaaagccagtgaaaagaagaaaaaagaagagagctgccaattaaagctaacagttgtatatctgtatatataactattaaaagggatatttattccattctgagaaccctgggtattttttattcacaaatccattataaaatctagcaggattttaaaaatagttttttgtttttaatgtgctttaaaataataaaccttctggagca

SEQ ID NO: 285741 - DNA, 1653 bp, Homo sapiens
cgaccggcacgttcaccccatccctcaggctttatttattttttttcgacaggttcttttcaaggctccagtcaccgcagcagttgtccatgctgtagtttccactttcctgtatgggcgggctggttaggattccactttcccccaagtgcttagcccagggccagacaaaaagtagttgcttaagaaatacttgttgaaggaataaattaatgaatgaatttgtgcttacagcggctggatggcagacaaacctatgattataggaacatcaggatctcatttggaacagattacggatgctgcattgtggaacttggaaaaacaagagttcttggacaggtttcctgtgaacttgtgtctccaaaactcaatcgggcaacagaaggtattcttttttttaaccttgaactctctcagatggccgctccagctttcgaacctggcaggcagtcagatctcttggtgaagttgaatcgactcatggaaagatgtctaagaaattcgaagtgtatagacactgagtctctctgtgttgttgctggtgaaaaggtttggcaaatacgtgtagacctacatttattaaatcatgatggaaatattattgatgctgccagcattgctgcaatcgtggccttatgtcatttccgaagacctgatgtctctgtccaaggagatgaagtaacactgtatacacctgaagagcgtgatcctgtaccattaagtatccaccacatgcccatttgtgtcagttttgcctttttccagcaaggaacatatttattggtggatcccaatgaacgagaagaacgtgtgatggatggcttgctggtgattgccatgaacaaacatcgagagatttgtactatccagtccagtggtgggataatgctactaaaagatcaagttctgagatgcagtaaaatcgctggtgtgaaagtagcagaaattacagagctaatattgaaagctttggagaatgaccaaaaagtaaggaaagaaggtggaaagtttggttttgcagagtctatagcaaatcaaaggatcacagcatttaaaatggaaaaggcccctattgatacctcggatgtagaagaaaaagcagaagaaatcattgctgaagcagaacctccttcagaagttgtttctacacctgtgctatggactcctggaactgcccaaattggagagggagtagaaaactcctggggtgatcttgaagactctgagaaggaagatgatgaaggcggtggtgatcaagctatcattcttgatggtataaaaatggacactggagtagaagtctctgatattggaagccaagatgctcccataatactctcagatagtgaagaagaagaaatgatcattttggaaccagacaagaatccaaagaaaataagaacacagaccaccagtgcaaaacaagaaaaagcaccaagtaaaaagccagtgaaaagaagaaaaaagaagagagctgccaattaaagctaacagttgtatatctgtatatataactattaaaagggatatttattccattctgagaaccctgggtattttttattcacaaatccattataaaatctagcaggattttaaaaatagttttttgtttttaatgtgctttaaaataataaaccttctggagca

SEQ ID NO: 285742 - DNA, 1456 bp, Homo sapiens
tgatgacgtaattttcctgcgcctcggggcgagcagcggcgcgcaaggaaagatcgggttccgtttttcccgcggattctggtgcctgtggggccggtgacccaacaccatgaaggaaacgccactctcaaactgcgaacgccgcttcctactccgtgccatcgaagagaagaagcggctggatggcagacaaacctatgattataggaacatcaggatctcatttggaacagattacggatgctgcattgtggaacttggaaaaacaagagttcttggacaggtttcctgtgaacttgtgtctccaaaactcaatcgggcaacagaaggtattcttttttttaaccttgaactctctcagatggccgctccagctttcgaacctggcaggcagtcagatctcttggtgaagttgaatcgactcatggaaagatgtctaagaaattcgaagtgtatagacactgagtctctctgtgttgttgctggtgaaaagtatacacctgaagagcgtgatcctgtaccattaagtatccaccacatgcccatttgtgtcagttttgcctttttccagcaaggaacatatttattggtggatcccaatgaacgagaagaacgtgtgatggatggcttgctggtgattgccatgaacaaacatcgagagatttgtactatccagtccagtggtgggataatgctactaaaagatcaagttctgagatgcagtaaaatcgctggtgtgaaagtagcagaaattacagagctaatattgaaagctttggagaatgaccaaaaagtaaggaaagaaggtggaaagtttggttttgcagagtctatagcaaatcaaaggatcacagcatttaaaatggaaaaggcccctattgatacctcggatgtagaagaaaaagcagaagaaatcattgctgaagcagaacctccttcagaagttgtttctacacctgtgctatggactcctggaactgcccaaattggagagggagtagaaaactcctggggtgatcttgaagactctgagaaggaagatgatgaaggcggtggtgatcaagctatcattcttgatggtataaaaatggacactggagtagaagtctctgatattggaagccaagatgctcccataatactctcagatagtgaagaagaagaaatgatcattttggaaccagacaagaatccaaagaaaataagaacacagaccaccagtgcaaaacaagaaaaagcaccaagtaaaaagccagtgaaaagaagaaaaaagaagagagctgccaattaaagctaacagttgtatatctgtatatataactattaaaagggatatttattccattctgagaaccctgggtattttttattcacaaatccattataaaatctagcaggattttaaaaatagttttttgtttttaatgtgctttaaaataataaaccttctggagca

SEQ ID NO: 285743 - DNA, 1237 bp, Homo sapiens
aaacaatttctaaaatagatttgggggtaaggtctctatgccccttaagtctgtaattattagttgaatagtttttaaaattttaaatatactaacatgagtatattccggtatacctttctgtaggataatgtggtaacaaaaagcattaaaacagacatttttatttggtccagcaattcaaacttataggaatatacgctaaggaaataatcagacaaatgtacaaagttgtgtgttcaagcatgttcaatccaatagtttttataatagcaaaaaattggacactatttaataggggaatggccaaataaaccagggcagagagtcacacaatagtgtatattgaaaccataaaaataatagtgtaacataatgatgtaaaagatgttcatcacatactgctaagaaaagcaggttattaacattatgtttaggacagttcatttttgtaaaatcaaaaccaaaaccttacatatgtaagtaaaatctagaagaatatacactacagtaataatactaaagtattacccatgggaggtaggattataggttattttacttttcttttacctatatttttgaatttttctattaggatcatgaattactcctgttacaacaaacatccaaaaagcaataatgtggataaaatggtttctgtgagtaactgaaccagtaacttttcacagagtagtagaagcaatgaaaaatatacggttggatgagacatcttgttaacaaaaatccagatcgaatattcttcagctgggataactccacactgagactggtgttatatcttgcagcttgagcattgcttatggaaatagctatggcttcaggccatactgaaaaacctaacacaaaccataaactatttcctggatactgggagccaaatggaatgtaatttgggcttcttgggtagatccagctcctacctattcgagtattggcaaatacatcagctagagacccactggttcctttgacctctccgtgggacagcgtagaagatgcggatgaagaagtggacgatccctgaattgaacggttgatccaggactcagcattctgtaagctctgttgcaaggcagcagagagcgcagcttggcgtctcagagagccctcatcctcagaggccgaagatgtgtctgtgtggaattagaaaaaaagaagttctcgatcctacctagaacagagactttcagttcttgctcattgatcacacatt

SEQ ID NO: 285744 - DNA, 843 bp, Homo sapiens
cgtatacaggaggggcctgtgcatttggtagcttgggttcctccctgagcctgtgaaactcagatttgaactcatgtattttgggtgccatgactcttgtcgaggcagagtgaaagggcaagggcatggagctagatatccagggtgacaacaggctcccatggtgcctgagtgtgcattaaaaaaagcaccccttccacaagacattctccaaactgtcgaaccaaacccaccagcatcttcctacctgcccatgtgccggggtggggggaaaattagacatgtttgtctccccactacagatgtcggccaaaagatccaactggaaaatgcttgctactaccttccagtttcacgaccctctcagctaaggaagcccttcctgcatccatgtctctctatgcctgtctgtgaagtcccagctcacagctgacctggttaggtaagcactgttattttgtttcaacggagggaacctttggattacatgtacatagctagtcagtggcagcatttggttcatcacgctggttttaaaaactccattgccttttctcttcattagtcctatcatcttatgaagaaagtcaactcagtaaaaatatccgtcaaacaatggcttagggatatgcgtacagaacaatcaaatcagctgacagaatatctggcttttcacccagttataaaatgttgtgctttgcttaacatggtgaagaacgaaagctgctaacagctgatttctttctcccaaaatgtgagccctgctatgggagagcgcaaccagcagggggtgctggcgtctttccctgaacttcagggcacgcttgagagagggtacctggc

SEQ ID NO: 285745 - DNA, 1004 bp, Homo sapiens
  misc_feature (963)..(963): n is a, c, g, or t
cgtatacaggaggggcctgtgcatttggtagcttgggttcctccctgagcctgtgaaactcagatttgaactcatgtattttgggtgccatgactcttgtcgaggcagagtgaaagggcaagggcatggagctagatatccagggtgacaacaggctcccatggtgcctgagtgtgcattaaaaaaagcaccccttccacaagacattctccaaactgtcgaaccaaacccaccagcatcttcctacctgcccatgtgccggggtggggggaaaattagacatgtttgtctccccactacagatgtcggccaaaagatccaactggaaaatgcttgctactaccttccagtttcacgaccctctcagctaaggaagcccttcctgcatccatgtctctctatgcctgtctgtgaagtcccagctcacagctgacctggttaggaaatgcttactgacctctggtctaaacactgagaggtaagggacctctgctgcaccgccctggagggatttttgatccctaaataagaagaggtgaggaggaagcctgcccttcctcctggcctgaatgtgcttctgagaggcagtcaagcctggaactgtggcagccggcttgtgaccatgaagaaaccagcccaagaagaaaggccaacctgccaaggagggaacaggagcctggggcctcgaggactttgctgagccttcgtgtgaccctggagccaccttcctctggagttcttgtgatggcagataattcaatgttgtcattgttcaagccaggggtgggcgaactttttccataaagggccacatggaaaacattttaggctctgtgtgggccatgagatctctgttggcactacaaccctaaaaacaaccatagacaatgtgtaaatgaatgggtacacctatgttccaataaaactttacttataaaaataaacccgggttggccgaaagtngctctctctttatgatattacggcccgaaataaaaagacta

SEQ ID NO: 285746 - DNA, 602 bp, Homo sapiens
  misc_feature (561)..(561): n is a, c, g, or t
acctttccatactgtcgttggcctctctcgccagaagctggaaatgcttactgacctctggtctaaacactgagaggtaagggacctctgctgcaccgccctggagggatttttgatccctaaataagaagaggtgaggaggaagcctgcccttcctcctggcctgaatgtgcttctgagaggcagtcaagcctggaactgtggcagccggcttgtgaccatgaagaaaccagcccaagaagaaaggccaacctgccaaggagggaacaggagcctggggcctcgaggactttgctgagccttcgtgtgaccctggagccaccttcctctggagttcttgtgatggcagataattcaatgttgtcattgttcaagccaggggtgggcgaactttttccataaagggccacatggaaaacattttaggctctgtgtgggccatgagatctctgttggcactacaaccctaaaaacaaccatagacaatgtgtaaatgaatgggtacacctatgttccaataaaactttacttataaaaataaacccgggttggccgaaagtngctctctctttatgatattacggcccgaaataaaaagacta

SEQ ID NO: 285747 - DNA, 677 bp, Homo sapiens
  misc_feature (636)..(636): n is a, c, g, or t
tctctctctctctctctcacacacacacacacacacacacacacacacagaatatgctgcagagatcatatgtgacctgacaagcctaaaatactcactatctggtcctttataggaaatgcttactgacctctggtctaaacactgagaggtaagggacctctgctgcaccgccctggagggatttttgatccctaaataagaagaggtgaggaggaagcctgcccttcctcctggcctgaatgtgcttctgagaggcagtcaagcctggaactgtggcagccggcttgtgaccatgaagaaaccagcccaagaagaaaggccaacctgccaaggagggaacaggagcctggggcctcgaggactttgctgagccttcgtgtgaccctggagccaccttcctctggagttcttgtgatggcagataattcaatgttgtcattgttcaagccaggggtgggcgaactttttccataaagggccacatggaaaacattttaggctctgtgtgggccatgagatctctgttggcactacaaccctaaaaacaaccatagacaatgtgtaaatgaatgggtacacctatgttccaataaaactttacttataaaaataaacccgggttggccgaaagtngctctctctttatgatattacggcccgaaataaaaagacta

SEQ ID NO: 285748 - DNA, 568 bp, Homo sapiens
  misc_feature (527)..(527): n is a, c, g, or t
acctttccatactgtcgttggcctctctcgccagaagctggaaatgcttactgacctctggtctaaacactgagaggtaagggacctctgctgcaccgccctggagggatttttgatccctaaataagaagaggtgaggaggaagcctgaatgtgcttctgagaggcagtcaagcctggaactgtggcagccggcttgtgaccatgaagaaaccagcccaagaagagagggaacaggagcctggggcctcgaggactttgctgagccttcgtgtgaccctggagccaccttcctctggagttcttgtgatggcagataattcaatgttgtcattgttcaagccaggggtgggcgaactttttccataaagggccacatggaaaacattttaggctctgtgtgggccatgagatctctgttggcactacaaccctaaaaacaaccatagacaatgtgtaaatgaatgggtacacctatgttccaataaaactttacttataaaaataaacccgggttggccgaaagtngctctctctttatgatattacggcccgaaataaaaagacta

SEQ ID NO: 285749 - DNA, 428 bp, Homo sapiens
tgtgaccctggagccaccttcctctggagttcttgtgatggcagataattcaatgttgtcattgttcaagccaggggtgggcgaactttttccataaagggccacatggaaaacattttaggctctgtgtgggccatgagatctctgttggcactacaaccctaaaaacaaccatagacaatgtgtaaatgaatgggtacacctatgttccaataaaactttacttataaaaatagatggtgggctgaatttggccctgagggccagagtttgctgcgtattttgtttgtttgtttgttacttgcagctgacctatcctaactagtactccctgaagtctgcctcagctcagaagcgtccttgggttccaagccacaggggctaagcttgagtgtgggtggggtctgcagcagggtggtgggagggat

SEQ ID NO: 285750 - DNA, 800 bp, Homo sapiens
tcctgatgttgaatttcctcatggtctcggaggggctcccccgcagcccgggaggggaggcacagggggtccccgggcgggggagaccacccggggccgaaggcagcttcgaccgcggaaacggaggagtgggagtgtgaggagaaatatgcaatgatgacatttccaagaagtgatggcatctggcgctaaggacaaagaatgggattttgccacagggatcttattctcccacatgttctgtctgaaggagaaagttatctgaggccttatatgatgcaaaactttggactcaaagaaattaaatcacttgcccaaggttacatagctgcccctggcaaacaccattctactttccgtctctatgaatttgactactcgaagtacctcatgtgaaatgttggtgccaaatgaacttttctggttcttctgaatatgccactgttgctggagaaatgtcactgctagagaacagaagactattattccaaagggtatttgagactgactgaatcaggtctggaacattattgaaatgagacccacaaaagaagagatactgaggtggtgaccagatggatataaacgggctgtggaaaaagagaatgcatggccaaaaatggtggtgctctctgtccaaaaactgaggccctatgaccatgaatgaagccagagggcaggtaggaatagatcatttgctccagaagaagctggttgccatgtcttgaggacagtaaaccctctggggaggttcctgtggtaaggaacaagggctcctggcaatagcctctgagtgagcc

SEQ ID NO: 285751 - DNA, 649 bp, Homo sapiens
acttcattgcataatgcagtagccactggatttgcagcagaaacactctgctacagaacaagtgtcttggttcacagcaaagaggacaaagaaaacagcaagttttagggggttgaatcctggattcccctggcaaacaccattctactttccgtctctatgaatttgactactcgaagtacctcatgtgaaatgttggtgccaaatgaacttttctggttcttctgaatatgccactgttgctggagaaatgtcactgctagagaacagaagactattattccaaagggtatttgagactgactgaatcaggtctggaacattattgaaatgagacccacaaaagaagagatactgagtaattcagcatttccagtgacatccttctggctgtgcttcaaagggaagatgacgctagagctggcagcatgaccagcactgtgtaaatcacccagacagacaacaacacaacatccatgaatagatggcagagttagcaagaaaaaatagcttggaggatggaaaaaccccaaaggatactccagctaagaaagtatggacgcttcccctagtttagaatgcacttcagatggattccaagctagaacaaggtctatctggaggtgaagtcatgtgacatgaactaatg

SEQ ID NO: 285752 - DNA, 942 bp, Homo sapiens
aggacgatgtcttgcatttggaacctacaaaattttgatttgtcgtttaatatttattgaattagttgattcgctgggtgcaacgaccaagaaaacaaatagaaatatgcaatgatgacatttccaagaagtgatggcatctggcgctaaggacaaagaatgggattttgccacagggatcttattctcccacatgttctgtctgaaggagaaagttatctgaggccttatatgatgcaaaactttggactcaaagaaattaaatcacttgcccaaggttacatagctgccacccaggagcttacaatttatgtgaggaaacagattgtatacatatacagataattaaaaatatatatgcccctggcaaacaccattctactttccgtctctatgaatttgactactcgaagtacctcatgtgaaatgttggtgccaaatgaacttttctggttcttctgaatatgccactgttgctggagaaatgtcactgctagagaacagaagactattattccaaagggtatttgagactgactgaatcaggtctggaacattattgaaatgagacccacaaaagaagagatactgagtgtaactggatcttggttcatgctgagcttaaaatttgatcttctgaatatcagcagaaagactctttctggtgaatacagatcttctgagcaattatcgactgactttgtcattagactgccctttcagaagttgtcagtgacatgaatctttgctcccttcttcatggaatatttctggtctaatagcccctatatttcaaaagatggatataaacatcagatgaatatcacaggaaagctggattgctctgcagtgagtgaaacgtggaaaggcctttccccaccaagcagtaggccaaattgtaacagtaagatgtatttgaaataaaatggttcatagatcaaa

SEQ ID NO: 285753 - DNA, 1270 bp, Homo sapiens
aggacgatgtcttgcatttggaacctacaaaattttgatttgtcgtttaatatttattgaattagttgattcgctgggtgcaacgaccaagaaaacaaatagaaatatgcaatgatgacatttccaagaagtgatggcatctggcgctaaggacaaagaatgggattttgccacagggatcttattctcccacatgttctgtctgaaggagaaagttatctgaggccttatatgatgcaaaactttggactcaaagaaattaaatcacttgcccaaggttacatagctgccacccaggagcttacaatttatgtgaggaaacagattgtatacatatacagataattaaaaatatatatgcccctggcaaacaccattctactttccgtctctatgaatttgactactcgaagtacctcatgtgaaatgttggtgccaaatgaacttttctggttcttctgaatatgccactgttgctggagaaatgtcactgctagagaacagaagactattattccaaagggtatttgagactgactgaatcaggtctggaacattattgaaatgtaattcagcatttccagtgacatccttctggctgtgcttcaaagggaagatgacgctagagctggcagcatgaccagcactgtgtaaatcacccagacagacaacaacacaacatccatgaatagatggcagagttagcaagaaaaaatagcttggaggatggaaaaaccccaaaggtgtgaaatctctggctttttttccattttatttagctttgcttatcattatttttcttttctttcctacccatttgcctttatgttctaagatgtagtaggaatctttagtagtgatggatcataatttttgagtccacaagcagacattatctgatttaataaaaaaattggaaaggtggaccttacccatttagaacaacttcttattagcaaatcaaaactctgagcaagagtcttagagcagggcctataaaatgagaagggccatgtattagagagttagctcagacctccagagtcagcctcacctacacttctgacttaggccaggctacaggtaagcaggataaacaggaacatctagttctttgttttgtatcataaactacttggataggaagttgtcttgttagaacatgccccatgtttccatcatcttgtcttaatattgattacacccaacaaaaaagacaatagcactcacaagttttcagcataatagagaaaatgtggtgtcaccattg

SEQ ID NO: 285754 - DNA, 722 bp, Homo sapiens
ggtccaaacatgaaagaattcccaacatcaagattgattgaaacatattcaatgggatgtaggctggtggcagaaagtagaccctggagaacaggagcacttggtttcaaataaaatacctgcattaaatattcagctttcctgcacctttatcattacatttgatttgcaaagaagatagaagtcttaagtcactgtacaaagagaaagatataaaagtttaaaaagatacaatgactttcccatagctaacaaggagccagcatgggtccaagttttggcatcgatttggggaaaatgctttcaaactctaaaatcttataaagatggggaaaataattactaataaaggcctactacggccttttatatgtgtaactggatcttggttcatgctgagcttaaaatttgatcttctgaatatcagcagaaagactctttctggtgaatacagatcttctgagcaattatcgactgactttgtcattagactgccctttcagaagttgtcagtgacatgaatctttgctcccttcttcatggaatatttctggtctaatagcccctatatttcaaaagatggatataaacatcagatgaatatcacaggaaagctggattgctctgcagtgagtgaaacgtggaaaggcctttccccaccaagcagtaggccaaattgtaacagtaagatgtatttgaaataaaatggttcatagatcaaa

SEQ ID NO: 285755 - DNA, 569 bp, Homo sapiens
acttcattgcataatgcagtagccactggatttgcagcagaaacactctgctacagaacaagtgtcttggttcacagcaaagaggacaaagaaaacagcaagttttagggggttgaatcctggattcccctggcaaacaccattctactttccgtctctatgaatttgactactcgaagtacctcatgtgaaatgttggtgccaaatgaacttttctggttcttctgaatatgccactgttgctggagaaatgtcactgctagagaacagaagactattattccaaagggtatttgagactgactgaatcaggtctggaacattattgaaatggtggtgaccagatggatataaacgggctgtggaaaaagagaatgcatggccaaaaatggtggtgctctctgtccaaaaactgaggccctatgaccatgaatgaagccagagggcaggtaggaatagatcatttgctccagaagaagctggttgccatgtcttgaggacagtaaaccctctggggaggttcctgtggtaaggaacaagggctcctggcaatagcctctgagtgagcc

SEQ ID NO: 285756 - DNA, 854 bp, Homo sapiens
gcgcgcacactgcgctccttcccctggcaggtgggcggcggggcgagcggagaggcccgcggggctcgcggagtccaggggcagacgggatgggtctccgtgctgaaacccccggcgctcctgccacactgtgaggcatcctgtgtgtgtgaagcacccgccgtcagtcaagtatgcctggtgctttctctcagaactcatcaaaaagcacgaggctgtccacacggagcctttggatgagctgtacgaggcgctggcggagaccctgatggccaaggagtccccccagggccaccggagctatttgttgccctcgggaggctcggtcacactctccgaaagcatggccatcatctcccacagcaccacgggtctggtcacatgggatgccgccctctacattgcagaatgggccatcgagaacccggcagccttcactcacagatgtgctgtattgcccagaagccattgtgtcactggtcagggtcctgcggaggctggctgcctgccgggagcaccagcgggcttctgaggtctacgtggccttcgctgtccgcaattgagagacgtgccagctgttcaccaccgagctaggccctttgccttcacagagaagagcagacactgccatggacccgtctctgtccctgccacatggccccaggcccaagacactccccctaggagggatccttttcccagaagctccacccctcggcagctccagtcaggccccatctgggcccttccagaagcaacccaggagcccgagacctgcaggggtgtgtgcaccctgacccctgatgcatagccctgcacctgcagccagctggcctcgggctgcaaacatggtg

SEQ ID NO: 285757 - DNA, 462 bp, Homo sapiens
ttgcttcggtcttttgcagctttctctactaagggttctcctttttcacccaagtaattgcctttccatctaatggctcaaatggtcaaaaggcatctaatagtctcatatgatcgctgcctctctggcctcgccctgctgctgaggtcagcgtgacctggaactgtccgctggtccctttcagtaacctgaagctttcaccgtagatgtgctgtattgcccagaagccattgtgtcactggtcagggtcctgcggaggctggctgcctgccgggagcaccagcgggcttctgaggtctacgtggccttcgctgtccgcaactagaagcgggggtagtcctcggccctccagccagtgggtgcagacctggatgtgctggaaatgcttctggtggatgaggcggctgtaatactccctcagaggccctgttatcacacagacaagagaaggaaggttgcgtc

SEQ ID NO: 285758 - DNA, 736 bp, Homo sapiens
tggtgcagtcgcagacacggtcccctttcctctcgccaggtctgtcttagagcttggcagtggtgccagcctcacaggcctggccatctgcaagatatgccgcccccgggcatacatcttcagcgactgtcacagccgagtcctcgagcagctccaaggaaatgtccttctcaatggcctctcattagaggcagacatcactgccaacttagacagccctagggtgacaatggcccagcgctggactgggacgtagtgacggtccatcagcgctctgccttccagctagatgttgtcattgcagcaggtaatgcccagccctgagcaccctgtgcaggcactgtccttgcagctctacccagctcttggctctagaagcgggggtagtcctcggccctccagccagtgggtgcagacctggatgtgctggaaatgcttctggtggatgaggcggctgtaatactccctcagaggccgccctttgccttcacagagaagagcagacactgccatggacccgtctctgtccctgccacatggccccaggcccaagacactccccctaggagggatccttttcccagaagctccacccctcggcagctccagtcaggccccatctgggcccttccagaagcaacccaggagcccgagacctgcaggggtgtgtgcaccctgacccctgatgcatagccctgcacctgcagccagctggcctcgggctgcaaacatggtg

SEQ ID NO: 285759 - DNA, 600 bp, Homo sapiens
agatttaagagacaaaattttttatttttatttttaccaaagcgggtgagtgagtagagttcagtaagaggttagaagagcgtgagggctgggaacagcaggggaggggaataggagataatctgagtagcaatgtgtaaatgtgactgtcttaggctcagcaatattgcgtagtcgcacgtggaagtcccgactgaagttggacacttttcgttcgcagtggtgccaattctcagggttgtgtgattttctgcaccgatgcaggagtgagcaaggttggttgaactgttgcagactaacagttttgcaggtgggcgaaggatcagggaggaaattgagttgagggtgttggtgaataggatataggagtttcagaacccgactacacatctgtcgttgatggtctaaatatttgcatgtttgcaggtccagcgatggcacaatgcctagcagcagaaggtttgcacccactgtgcgacatgagtggcagctagtaagtttacacattgaggatacaatggcgaaacggggccgcgaggcgatgacgtcattcgcgggagtaggggggagaagcgaccactgttagggtactgtccataa

SEQ ID NO: 285760 - DNA, 570 bp, Homo sapiens
agatttaagagacaaaattttttatttttatttttaccaaagcgggtgagtgagtagagttcagtaagaggttagaagagcgtgagggctgggaacagcaggggaggggaataggagataatctgagtagcaatgtgtaaatgtgactgtcttaggctcagcaatattgcgtagtcgcacgtggaagtcccgactgaagttggacacttttcgttcgcagtggtgccaattctcagggttgtgtgattttctgcaccgatgcaggagtgagcaaggtccagcgatggcacaatgcctagcagcagaaggtttgcacccactgtgcgacatgagtggcagctctggaaaatcataaaatcatgggaggacttgagagtgcaggctgggtggggtgggactgtggctgcgaaaaacagtgttatgaaactgtgcgcgggacaagaaagctgattttactgattgtatattggggagtactacgggaatcactggagaggccacttcattttctcctatcccaccccatcttttggggttgcaactaacctttgaggtggtaacaaacgactg

SEQ ID NO: 285761 - DNA, 2207 bp, Homo sapiens
gagaaatggcgacggagcctggctgtgggcccatctttggaaaaaagatctgggaatgattgtctagcctccagcctcaacttacttgatgcttgagagactcaaagccccgcagtctactttgccatccctgccaaggaggacactgaaggcctggcccagatgttccaagtattcaagaagtttaatccagcatgggagagagtctgtaccatcctggtggatcctcatttccttccactgcctatcctagctatggagttccccacagctgaggtccttctctcagccttccacatttgtaagttcctccaggccaagttctatcagctgtcccttgaacggcccgtggaaaggctgctcctgacctccctgcagagcacaatgtgctcagccacagcaggcaacctgagaaagttgtatacactcctgagcaactgcatccctccagccaagctgcccgagcttcactcacactggctgctcaacgaccgcatctggctggctcaccgctggagaagccgagctgagagcagccactacttccagagcctcgaggtcaccacccacatcctcagccagttctttggtaccaccccatctgagaaacaaggtatggcttctctgttccgttacatgcagcagaactctgcagacaaggcaaacttcaaccagggcctgtgtgcccagaacaatcatgctccctcagacaccatccccgaaagccccaaactggagcagctggtagaatcccacatccagcactccctcaatgccatctgcacagggccagcagcccaactgtgcctgggcgagcttgctgtggtccagaaatccacacacctcattggctctggctcagaaaagatgaacatacagatcctggaagatacccataaggtgcagccccagccccctgccagctgcagctgctactttaaccaggccttccacctgccctgccgccacatcctagccatgctcagtgcccgccgccaggtgctccagcccgacatgctgccggctcagtggacggcaggctgtgctaccagtctagacagcatcctgggcagcaagtggagtgagaccctggataagcacctggcagtgactcacctcaccgaggaggtgggtcagctgttgcagcactgcaccaaggaggagtttgagcggaggtatagcacccttgcgggaactggccgacagctggattgggccttatgagcaggtccaactctgattattctcgatgcccagagatgctcatgcacctgtgcacactcacatccacccatacacacacacacacacacacacacacacacacacactcccttacactgttgtacttccgtgggccctccttccagaacaaggacaacaaggacaaggttgaagggtcttctcatctaccatggcctgctacctagcatgtgtctagctcaatgagacaggagtcagcaatcttaatctgtttagtttactctggtggaactccgagtctgtcacctacttctggcagaactggaacatccctgtgcacaagtggtgcatcaggtaggtggggtgtgtgtgtgtgtgatgtggaacatggctgtgaacctgaaccgctttccatgccccctcctctgcagacaacacttctacaagcccatgcttcgacggggcagcagcaagtggatggccaggacaggggtgttcctggcctcggccttcttccacgagtacctggtgagcgtccctctgcgaatgttccgcctctgggcgttcacgggcatgatggctcagatcccactggcctggttcgtgggccgctttttccagggcaactatggcaacgcagctgtgtggctgtcgctcatcatcggacagccaatagccgtcctcatgtacgtccacgactactacgtgctcaactatgaggccccagcggcagaggcctgagctgcacctgagggcctggcttctcactgccacctcacacccgctgccagagcccacctctcctcctaggcctcgagtgctggggatgggcctggctgcacagcatcctcctctggtcccagggaggcctctctgcccctatggggctctgtcctgcacccctcagggatggcgacagcaggccagacacagtctgatgccagctgggagtcttgctgaccctgccccgggtccgagggtgtcaataaagtgctgtccagtga

SEQ ID NO: 285762 - DNA, 1087 bp, Homo sapiens
  misc_feature (37)..(38): n is a, c, g, or t
  misc_feature (46)..(46): n is a, c, g, or t
cactaatcaacccaaatacggctaagtagaggcgcgnnttatcggncgaggccacaagggcgagtgccagagctgtgtggacagctgtccaggacctgccggggagcagcagctccactgcagcagggcgggcatggccggtagggggagtgcaaggccaggcagacgcccccattccccacactcccctacctagaaaagctcagctcaggcgtcctctcctggtgctactcctgctgggtgtgcgggaatcggcactctggccctcagtgcaggatggtcaacttgcacccaccgtgctcagcttcagcttgggaagaggtcggccctgggtttgcgggaagtgggctccagccaggatggcccagggatgggcagtccacagggcctttctggtgtgggtctggtgagccgaggggctacggtacacaatggctatgtccatggctattcgccttggggcagggctcggtttggcagcctctttccttcacttggaacctgggcagccaggtgggctggtggctctcagctgccctccacgaggttggggcacccctgatccccaggcctgccttgccctctgctcttctggcaccaggctgggcagtgcagacagcgcagccctgcagccttcaggacaccttgttcccaggccctgcaatccaccaagctggatagatggggccccccttgatggtagcgggaggtcaggggtaaccccagggccctgctgctgccttaccttgctggggtgactgcttgattaaagaccccaagactggaccaggccctggtgtccccagacctgcagctatggcccaacaaggcaggtgtttgaggaggccctgcacagggtcccaggactgcaccagggcctcatcagcaacctgctgaactggtggtgtgaggggagggtgggctcccttggtggtatcctccctctaccccagtgggggctggtgggccctgagatggaggcatctccttgggcctgctgaggatggcagtagtgggtgagctcctggtggggggatgggtgtggggccgactcctccatcccacatgggctcctgtgcctctccct

SEQ ID NO: 285763 - DNA, 453 bp, Homo sapiens
ccactgcccagcgcaggcccccttcccttcctccaccaggctgagtggagaaccctaaagctacgggacaggctcccgttccccgtgcctacacagggtgctggctctggcagaaagacagtgtgcccgccccgcatcacctgtccgagtgcgaacaccttgggaagggggttcctggtggtcctgtgacaaccagagacccccagggccaaggaggccactgcagcccggcccttctgtgccctgggcccctcctcattgcagcaccacccaccgcaccaccctgggacagaggaaacacatggaggccatagcatagagcctgtctgtttatagatctctgcctgtcttgtccgtccatccactgtgtgtatatatctgtgtatctctgtggagcggggaacgggacagttgtgtaaaaatccaaaatacaattctgactatgaacaacct

SEQ ID NO: 285764 - DNA, 3084 bp, Homo sapiens
cgcctcaggtcggccgcggactacaaatggacgagagaggcggccgtccattagttagcggctccggagcaacgcagccgttgtccttgaggccgacgggcccgacgcgggcgggttgaacgcgctggtgaggcggtcacccgggctacggcggccggcagggggcagtggcggccgttgtctagggcccggaggtggggccgcgcgcctcgggcgctacgaacccggcgggcccacgcttggctgcggccgggtgcgggctgaggccatgggcgaccgcggcagctcccggcgccggaggacagggtcgcggccctcgagccacggcggcggcgggcctgcggcggcggaagaggaggtgcgggacgccgctgcgggccccgacgtgggagccgcgggggacgcgccagccccggcccccaacaaggacggagacgccggcgtgggcagcggccactgggagctgaggtgccatcgcctgcaggattctttattcagctctgacagtggcttcagcaactaccgtggcatcctgaactggtgtgtggtgatgctgatcttgagcaatgcccggttatttctggagaacctcatcaagtatggcatcctggtggaccccatccaggtggtttctctgttcctgaaggatccctatagctggcccgccccatgcctggttattgcggccaatgtctttgctgtggctgcattccaggttgagaagcgcctggcggtgggtgccctgacggagcaggcgggactgctgctgcacgtggccaacctggccaccattctgtgtttcccagcggctgtggtcttactggttgagtctatcactccagtgggctccctgctggcgctgatggcgcacaccatcctcttcctcaagctcttctcctaccgcgacgtcaactcatggtgccgcagggccagggccaaggctgcctctgcagggaagaaggccagcagtgctgctgccccgcacaccgtgagctacccggacaatctgacctaccgcgatctctactacttcctcttcgcccccaccttgtgctacgagctcaactttccccgctctccccgcatccggaagcgctttctgctgcgacggatccttgagatgctgttcttcacccagctccaggtggggctgatccagcagtggatggtccccaccatccagaactccatgaagcccttcaaggacatggactactcacgcatcatcgagcgcctcctgaagctggcggtccccaatcacctcatctggctcatcttcttctactggctcttccactcctgcctgaatgccgtggctgagctcatgcagtttggagaccgggagttctaccgggactggtggaactccgagtctgtcacctacttctggcagaactggaacatccctgtgcacaagtggtgcatcagacacttctacaagcccatgcttcgacggggcagcagcaagtggatggccaggacaggggtgttcctggcctcggccttcttccacgagtacctggtgagcgtccctctgcgaatgttccgcctctgggcgttcacgggcatgatggctcagatcccactggcctggttcgtgggccgctttttccagggcaactatggcaacgcagctgtgtggctgtcgctcatcatcggacagccaatagccgtcctcatgtacgtccacgactactacgtgctcaactatgaggccccagcggcagaggcctgagctgcacctgagggcctggcttctcactgccacctcacacccgctgccagagcccacctctcctcctaggcctcgagtgctggggatgggcctggctgcacagcatcctcctctggtcccagggaggcctctctgcccctatggggctctgtcctgcacccctcagggatggcgacagcaggccagacacagtctgatgccagctgggagtcttgctgaccctgccccgggtccgagggtgtcaataaagtgctgtccagtgacctcttcagcctgccaggggcctggggcctggtggggggtatggccacacccacaagggcgagtgccagagctgtgtggacagctgtccaggacctgccggggagcagcagctccactgcagcagggcgggcatggccggtagggggagtgcaaggccaggcagacgcccccattccccacactcccctacctagaaaagctcagctcaggcgtcctctcctggtgctactcctgctgggtgtgcgggaatcggcactctggccctcagtgcaggatggtcaacttgcacccaccgtgctcagcttcagcttgggaagaggtcggccctgggtttgcgggaagtgggctccagccaggatggcccagggatgggcagtccacagggcctttctggtgtgggtctggtgagccgaggggctacggtacacaatggctatgtccatggctattcgccttggggcagggctcggtttggcagcctctttccttcacttggaacctgggcagccaggtgggctggtggctctcagctgccctccacgaggttggggcacccctgatccccaggcctgccttgccctctgctcttctggcaccaggctgggcagtgcagacagcgcagccctgcagccttcaggacaccttgttcccaggccctgcaatccaccaagctggatagatggggccccccttgatggtagcgggaggtcaggggtaaccccagggccctgctgctgccttaccttgctggggtgactgcttgattaaagaccccaagactggaccaggccctggtgtccccagacctgcagctatggcccaacaaggcaggtgtttgaggaggccctgcacagggtcccaggactgcaccagggcctcatcagcaacctgctgaactggtggtgtgaggggagggtgggctcccttggtggtatcctccctctaccccagtgggggctggtgggccctgagatggaggcatctccttgggcctgctgaggatggcagtagtgggtgagctcctggtggggggatgggtgtggggccgactcctccatcccacatgggctcctgtgcctctccct

SEQ ID NO: 285765 - DNA, 2078 bp, Homo sapiens
cgcctcaggtcggccgcggactacaaatggacgagagaggcggccgtccattagttagcggctccggagcaacgcagccgttgtccttgaggccgacgggcccgacgcgggcgggttgaacgcgctggtgaggcggtcacccgggctacggcggccggcagggggcagtggcggccgttgtctagggcccggaggtggggccgcgcgcctcgggcgctacgaacccggcgggcccacgcttggctgcggccgggtgcgggctgaggccatgggcgaccgcggcagctcccggcgccggaggacagggtcgcggccctcgagccacggcggcggcgggcctgcggcggcggaagaggaggtgcgggacgccgctgcgggccccgacgtgggagccgcgggggacgcgccagccccggcccccaacaaggacggagacgccggcgtgggcagcggccactgggagctgaggtgccatcgcctgcaggattctttattcagctctgacagtggcttcagcaactaccgtggcatcctgaactggtgtgtggtgatgctgatcttgagcaatgcccggttatttctggagaacctcatcaagtatggcatcctggtggaccccatccaggtggtttctctgttcctgaaggatccctatagctggcccgccccatgcctggttattgcggccaatgtctttgctgtggctgcattccaggttgagaagcgcctggcggtgggtgccctgacggagcaggcgggactgctgctgcacgtggccaacctggccaccattctgtgtttcccagcggctgtggtcttactggttgagtctatcactccagtgggctccctgctggcgctgatggcgcacaccatcctcttcctcaagctcttctcctaccgcgacgtcaactcatggtgccgcagggccagggccaaggctgcctctgcagggaagaaggccagcagtgctgctgccccgcacaccgtgagctacccggacaatctgacctaccgcgatctctactacttcctcttcgcccccaccttgtgctacgagctcaactttccccgctctccccgcatccggaagcgctttctgctgcgacggatccttgagatgctgttcttcacccagctccaggtggggctgatccagcagtggatggtccccaccatccagaactccatgaagcccttcaaggacatggactactcacgcatcatcgagcgcctcctgaagctggcggtccccaatcacctcatctggctcatcttcttctactggctcttccactcctgcctgaatgccgtggctgagctcatgcagtttggagaccgggagttctaccgggactggtggaactccgagtctgtcacctacttctggcagaactggaacatccctgtgcacaagtggtgcatcaggtaggtggggtgtgtgtgtgtgtgatgtggaacatggctgtgaacctgaaccgctttccatgccccctcctctgcagacaacacttctacaagcccatgcttcgacggggcagcagcaagtggatggccaggacaggggtgttcctggcctcggccttcttccacgagtacctggtgagcgtccctctgcgaatgttccgcctctgggcgttcacgggcatgatggctcagatcccactggcctggttcgtgggccgctttttccagggcaactatggcaacgcagctgtgtggctgtcgctcatcatcggacagccaatagccgtcctcatgtacgtccacgactactacgtgctcaactatgaggccccagcggcagaggcctgagctgcacctgagggcctggcttctcactgccacctcacacccgctgccagagcccacctctcctcctaggcctcgagtgctggggatgggcctggctgcacagcatcctcctctggtcccagggaggcctctctgcccctatggggctctgtcctgcacccctcagggatggcgacagcaggccagacacagtctgatgccagctgggagtcttgctgaccctgccccgggtccgagggtgtcaataaagtgctgtccagtga

SEQ ID NO: 285766 - DNA, 2096 bp, Homo sapiens
cgcctcaggtcggccgcggactacaaatggacgagagaggcggccgtccattagttagcggctccggagcaacgcagccgttgtccttgaggccgacgggcccgacgcgggcgggttgaacgcgctggtgaggcggtcacccgggctacggcggccggcagggggcagtggcggccgttgtctagggcccggaggtggggccgcgcgcctcgggcgctacgaacccggcgggcccacgcttggctgcggccgggtgcgggctgaggccatgggcgaccgcggcagctcccggcgccggaggacagggtcgcggccctcgagccacggcggcggcgggcctgcggcggcggaagaggaggtgcgggacgccgctgcgggccccgacgtgggagccgcgggggacgcgccagccccggcccccaacaaggacggagacgccggcgtgggcagcggccactgggagctgaggtgccatcgcctgcaggattctttattcagctctgacagtggcttcagcaactaccgtggcatcctgaactggtgtgtggtgatgctgatcttgagcaatgcccggttatttctggagaacctcatcaagtatggcatcctggtggaccccatccaggtggtttctctgttcctgaaggatccctatagctggcccgccccatgcctggttattgcggccaatgtctttgctgtggctgcattccaggttgagaagcgcctggcggtgggtgccctgacggagcaggcgggactgctgctgcacgtggccaacctggccaccattctgtgtttcccagcggctgtggtcttactggttgagtctatcactccagtgggctccctgctggcgctgatggcgcacaccatcctcttcctcaagctcttctcctaccgcgacgtcaactcatggtgccgcagggccagggccaaggctgcctctgcagggaagaaggccagcagtgctgctgccccgcacaccgtgagctacccggacaatctgacctaccgcgatctctactacttcctcttcgcccccaccttgtgctacgagctcaactttccccgctctccccgcatccggaagcgctttctgctgcgacggatccttgagatgctgttcttcacccagctccaggtggggctgatccagcagtggatggtccccaccatccagaactccatgaagcccttcaaggacatggactactcacgcatcatcgagcgcctcctgaagctggcggtgagtgcggacaggtggcgcatgcacaggacaggaggggacagtggcatgtgggggaaggttctagaacttggtgcccacccccacctccctgccaggtccccaatcacctcatctggctcatcttcttctactggctcttccactcctgcctgaatgccgtggctgagctcatgcagtttggagaccgggagttctaccgggactggtggaactccgagtctgtcacctacttctggcagaactggaacatccctgtgcacaagtggtgcatcagacacttctacaagcccatgcttcgacggggcagcagcaagtggatggccaggacaggggtgttcctggcctcggccttcttccacgagtacctggtgagcgtccctctgcgaatgttccgcctctgggcgttcacgggcatgatggctcagatcccactggcctggttcgtgggccgctttttccagggcaactatggcaacgcagctgtgtggctgtcgctcatcatcggacagccaatagccgtcctcatgtacgtccacgactactacgtgctcaactatgaggccccagcggcagaggcctgagctgcacctgagggcctggcttctcactgccacctcacacccgctgccagagcccacctctcctcctaggcctcgagtgctggggatgggcctggctgcacagcatcctcctctggtcccagggaggcctctctgcccctatggggctctgtcctgcacccctcagggatggcgacagcaggccagacacagtctgatgccagctgggagtcttgctgaccctgccccgggtccgagggtgtcaataaagtgctgtccagtga

SEQ ID NO: 285767 - DNA, 2006 bp, Homo sapiens
  misc_feature (2003)..(2003): n is a, c, g, or t
cgcctcaggtcggccgcggactacaaatggacgagagaggcggccgtccattagttagcggctccggagcaacgcagccgttgtccttgaggccgacgggcccgacgcgggcgggttgaacgcgctggtgaggcggtcacccgggctacggcggccggcagggggcagtggcggccgttgtctagggcccggaggtggggccgcgcgcctcgggcgctacgaacccggcgggcccacgcttggctgcggccgggtgcgggctgaggccatgggcgaccgcggcagctcccggcgccggaggacagggtcgcggccctcgagccacggcggcggcgggcctgcggcggcggaagaggaggtgcgggacgccgctgcgggccccgacgtgggagccgcgggggacgcgccagccccggcccccaacaaggacggagacgccggcgtgggcagcggccactgggagctgaggtgccatcgcctgcaggattctttattcagctctgacagtggcttcagcaactaccgtggcatcctgaactggtgtgtggtgatgctgatcttgagcaatgcccggttatttctggagaacctcatcaagtatggcatcctggtggaccccatccaggtggtttctctgttcctgaaggatccctatagctggcccgccccatgcctggttattgcggccaatgtctttgctgtggctgcattccaggttgagaagcgcctggcggtgggtgccctgacggagcaggcgggactgctgctgcacgtggccaacctggccaccattctgtgtttcccagcggctgtggtcttactggttgagtctatcactccagtgggctccctgctggcgctgatggcgcacaccatcctcttcctcaagctcttctcctaccgcgacgtcaactcatggtgccgcagggccagggccaaggctgcctctgcagggaagaaggccagcagtgctgctgccccgcacaccgtgagctacccggacaatctgacctaccgcgatctctactacttcctcttcgcccccaccttgtgctacgagctcaactttccccgctctccccgcatccggaagcgctttctgctgcgacggatccttgagatgctgttcttcacccagctccaggtggggctgatccagcagtggatggtccccaccatccagaactccatgaagcccttcaaggacatggactactcacgcatcatcgagcgcctcctgaagctggcggtccccaatcacctcatctggctcatcttcttctactggctcttccactcctgcctgaatgccgtggctgagctcatgcagtttggagaccgggagttctaccgggactggtggaactccgagtctgtcacctacttctggcagaactggaacatccctgtgcacaagtggtgcatcagacacttctacaagcccatgcttcgacggggcagcagcaagtggatggccaggacaggggtgttcctggcctcggccttcttccacgagtacctggtgagcgtccctctgcgaatgttccgcctctgggcgttcacgggcatgatggctcagatcccactggcctggttcgtgggccgctttttccagggcaactatggcaacgcagctgtgtggctgtcgctcatcatcggacagccaatagccgtcctcatgtacgtccacgactactacgtgctcaactatgaggccccagcggcagaggcctgagctgcacctgagggctggtttaatgacttaaaccgtgcagaggcaacttctctaagctgagtgtgggatggctggtgaagtctcttgggtcaggaagtttggcttggggtggtggccctaggtggggagggggaaattgttgcggggagtttgacaggccgggaggttaagggggggtttaaagaaacataagaaaggggggtgatagcgggagacttatgggaggataagggagagaggtgtcgtgataaatattgtattgtagtgngaa

SEQ ID NO: 285768 - DNA, 1514 bp, Homo sapiens
cgcctcaggtcggccgcggactacaaatggacgagagaggcggccgtccattagttagcggctccggagcaacgcagccgttgtccttgaggccgacgggcccgacgcgggcgggttgaacgcgctggtgaggcggtcacccgggctacggcggccggcagggggcagtggcggccgttgtctagggcccggaggtggggccgcgcgcctcgggcgctacgaacccggcgggcccacgcttggctgcggccgggtgcgggctgaggccatgggcgaccgcggcagctcccggcgccggaggacagggtcgcggccctcgagccacggcggcggcgggcctgcggcggcggaagaggaggtgcgggacgccgctgcgggccccgacgtgggagccgcgggggacgcgccagccccggcccccaacaaggacggagacgccggcgtgggcagcggccactgggagctgaggtgccatcgcctgcaggattctttattcagctctgacagtggcttcagcaactaccgtggcatcctgaactggtgtgtggtgatgctgatcttgagcaatgcccggttatttctggagaacctcatcaagtatggcatcctggtggaccccatccaggtggtttctctgttcctgaaggatccctatagctggcccgccccatgcctggttattgcggccaatgtctttgctgtggctgcattccaggttgagaagcgcctggcggtgggtgccctgacggagcaggcgggactgctgctgcacgtggccaacctggccaccattctgtgtttcccagcggctgtggtcttactggttgagtctatcactccagtgggctccctgctggcgctgatggcgcacaccatcctcttcctcaagctcttctcctaccgcgacgtcaactcatggtgccgcagggccagggccaaggctgacacttctacaagcccatgcttcgacggggcagcagcaagtggatggccaggacaggggtgttcctggcctcggccttcttccacgagtacctggtgagcgtccctctgcgaatgttccgcctctgggcgttcacgggcatgatggctcagatcccactggcctggttcgtgggccgctttttccagggcaactatggcaacgcagctgtgtggctgtcgctcatcatcggacagccaatagccgtcctcatgtacgtccacgactactacgtgctcaactatgaggccccagcggcagaggcctgagctgcacctgagggcctggcttctcactgccacctcacacccgctgccagagcccacctctcctcctaggcctcgagtgctggggatgggcctggctgcacagcatcctcctctggtcccagggaggcctctctgcccctatggggctctgtcctgcacccctcagggatggcgacagcaggccagacacagtctgatgccagctgggagtcttgctgaccctgccccgggtccgagggtgtcaataaagtgctgtccagtga

SEQ ID NO: 285769 - DNA, 1017 bp, Homo sapiens
gggagtgaccaggagcatggctagctgaagggcttgtttctgcaggacatggactactcacgcatcatcgagcgcctcctgaagctggcggtgagtgcggacaggtggcgcatgcacaggacaggaggggacagtggcatgtgggggaaggttctagaacttggtgcccacccccacctccctgccaggtccccaatcacctcatctggctcatcttcttctactggctcttccactcctgcctgaatgccgtggctgagctcatgcagtttggagaccgggagttctaccgggactggtggaactccgagtctgtcacctacttctggcagaactggaacatccctgtgcacaagtggtgcatcaggtaggtggggtgtgtgtgtgtgtgatgtggaacatggctgtgaacctgaaccgctttccatgccccctcctctgcagacaacacttctacaagcccatgcttcgacggggcagcagcaagtggatggccaggacaggggtgttcctggcctcggccttcttccacgagtacctggtgagcgtccctctgcgaatgttccgcctctgggcgttcacgggcatgatggctcagatcccactggcctggttcgtgggccgctttttccagggcaactatggcaacgcagctgtgtggctgtcgctcatcatcggacagccaatagccgtcctcatgtacgtccacgactactacgtgctcaactatgaggccccagcggcagaggcctgagctgcacctgagggcctggcttctcactgccacctcacacccgctgccagagcccacctctcctcctaggcctcgagtgctggggatgggcctggctgcacagcatcctcctctggtcccagggaggcctctctgcccctatggggctctgtcctgcacccctcagggatggcgacagcaggccagacacagtctgatgccagctgggagtcttgctgaccctgccccgggtccgagggtgtcaataaagtgctgtccagtga

SEQ ID NO: 285770 - DNA, 1998 bp, Homo sapiens
cgcctcaggtcggccgcggactacaaatggacgagagaggcggccgtccattagttagcggctccggagcaacgcagccgttgtccttgaggccgacgggcccgacgcgggcgggttgaacgcgctggtgaggcggtcacccgggctacggcggccggcagggggcagtggcggccgttgtctagggcccggaggtggggccgcgcgcctcgggcgctacgaacccggcgggcccacgcttggctgcggccgggtgcgggctgaggccatgggcgaccgcggcagctcccggcgccggaggacagggtcgcggccctcgagccacggcggcggcgggcctgcggcggcggaagaggaggtgcgggacgccgctgcgggccccgacgtgggagccgcgggggacgcgccagccccggcccccaacaaggacggagacgccggcgtgggcagcggccactgggagctgaggtgccatcgcctgcaggattctttattcagctctgacagtggcttcagcaactaccgtggcatcctgaactggtgtgtggtgatgctgatcttgagcaatgcccggttatttctggagaacctcatcaagtatggcatcctggtggaccccatccaggtggtttctctgttcctgaaggatccctatagctggcccgccccatgcctggttattgcggccaatgtctttgctgtggctgcattccaggttgagaagcgcctggcggtgggtgccctgacggagcaggcgggactgctgctgcacgtggccaacctggccaccattctgtgtttcccagcggctgtggtcttactggttgagtctatcactccagtgggctccctgctggcgctgatggcgcacaccatcctcttcctcaagctcttctcctaccgcgacgtcaactcatggtgccgcagggccagggccaaggctgcctctgcagggaagaaggccagcagtgctgctgccccgcacaccgtgagctacccggacaatctgacctaccgcgatctctactacttcctcttcgcccccaccttgtgctacgagctcaactttccccgctctccccgcatccggaagcgctttctgctgcgacggatccttgagatgctgttcttcacccagctccaggtggggctgatccagcagtggatggtccccaccatccagaactccatgaagcccttcaaggacatggactactcacgcatcatcgagcgcctcctgaagctggcggtccccaatcacctcatctggctcatcttcttctactggctcttccactcctgcctgaatgccgtggctgagctcatgcagtttggagaccgggagttctaccgggactggtggaactccgagtctgtcacctacttctggcagaactggaacatccctgtgcacaagtggtgcatcagacacttctacaagcccatgcttcgacggggcagcagcaagtggatggccaggacaggggtgttcctggcctcggccttcttccacgagtacctggtgagcgtccctctgcgaatgttccgcctctgggcgttcacgggcatgatggctcagatcccactggcctggttcgtgggccgctttttccagggcaactatggcaacgcagctgtgtggctgtcgctcatcatcggacagccaatagccgtcctcatgtacgtccacgactactacgtgctcaactatgaggccccagcggcagaggcctgagctgcacctgagggcctggcttctcactgccacctcacacccgctgccagagcccacctctcctcctaggcctcgagtgctggggatgggcctggctgcacagcatcctcctctggtcccagggaggcctctctgcccctatggggctctgtcctgcacccctcagggatggcgacagcaggccagacacagtctgatgccagctgggagtcttgctgaccctgccccgggtccgagggtgtcaataaagtgctgtccagtga

SEQ ID NO: 285771 - DNA, 896 bp, Homo sapiens
  misc_feature (896)..(896): n is a, c, g, or t
catggcaggaggaggccggggtaatcggacgaggcgctctccccgcatccggaagcgctttctgctgcgacggatccttgagatgctgttcttcacccagctccaggtggggctgatccagcagtggatggtccccaccatccagaactccatgaagcccttcaaggacatggactactcacgcatcatcgagcgcctcctgaagctggcggtccccaatcacctcatctggctcatcttcttctactggctcttccactcctgcctgaatgccgtggctgagctcatgcagtttggagaccgggagttctaccgggactggtggaactccgagtctgtcacctacttctggcagaactggaacatccctgtgcacaagtggtgcatcagacacttctacaagcccatgcttcgacgctcaccaggtactcgtggcccgcgcgtcgccgaaagcggctctgacccagcggaagtaattctttcgactgccccggaacccaccggagcaggcagctgggggtgggggggcggcctgggataggggctgtggcagtacgcggggacccggctgcggtggctgcgggactgacgagaaactactaaagttcctggggaagcaaagtagaatttcataagaacaaaatggatggagaggagaaaacctatggtggctgtgaaggacctgatgccatgtatgtccaatgtgatatcatctgatggccatgaatttatcgtcacacagagaacatgcattaacatcaggcacgataaagccatgtcgagtggccaggtcagttgcttgagaacgaaaccaatgaggtcactttagagagatacctttcacatgtgctatcgaacgtatgcatgttttttacgtcccagggtccgtacccctn

SEQ ID NO: 285772 - DNA, 1593 bp, Homo sapiens
acttcctgctcacctagggctgggctctgggtgtgagctcctttcttccggccccgtggcaaggtgccatcgcctgcaggattctttattcagctctgacagtggcttcagcaactaccgtggcatcctgaactggtgtgtggtgatgctgatcttgagcaatgcccggttatttctggagaacctcatcaagtatggcatcctggtggaccccatccaggtggtttctctgttcctgaaggatccctatagctggcccgccccatgcctggttattgcggccaatgtctttgctgtggctgcattccaggttgagaagcgcctggcggtgggtgccctgacggagcaggcgggactgctgctgcacgtggccaacctggccaccattctgtgtttcccagcggctgtggtcttactggttgagtctatcactccagtgggctccctgctggcgctgatggcgcacaccatcctcttcctcaagctcttctcctaccgcgacgtcaactcatggtgccgcagggccagggccaaggctgcctctgcagggaagaaggccagcagtgctgctgccccgcacaccgtgagctacccggacaatctgacctaccgcgatctctactacttcctcttcgcccccaccttgtgctacgagctcaactttccccgctctccccgcatccggaagcgctttctgctgcgacggatccttgagatgctgttcttcacccagctccaggtggggctgatccagcagtggatggtccccaccatccagaactccatgaagcccttcaaggacatggactactcacgcatcatcgagcgcctcctgaagctggcggtccccaatcacctcatctggctcatcttcttctactggctcttccactcctgcctgaatgccgtggctgagctcatgcagtttggagaccgggagttctaccgggactggtggaactccgagtctgtcacctacttctggcagaactggaacatccctgtgcacaagtggtgcatcagacacttctacaagcccatgcttcgacggggcagcagcaagtggatggccaggacaggggtgttcctggcctcggccttcttccacgagtacctggtgagcgtccctctgcgaatgttccgcctctgggcgttcacgggcatgatggctcagatcccactggcctggttcgtgggccgctttttccagggcaactatggcaacgcagctgtgtggctgtcgctcatcatcggacagccaatagccgtcctcatgtacgtccacgactactacgtgctcaactatgaggccccagcggcagaggcctgagctgcacctgagggcctggcttctcactgccacctcacacccgctgccagagcccacctctcctcctaggcctcgagtgctggggatgggcctggctgcacagcatcctcctctggtcccagggaggcctctctgcccctatggggctctgtcctgcacccctcagggatggcgacagcaggccagacacagtctgatgccagctgggagtcttgctgaccctgccccgggtccgagggtgtcaataaagtgctgtccagtga

SEQ ID NO: 285773 - DNA, 2418 bp, Homo sapiens
  misc_feature (2002)..(2002): n is a, c, g, or t
  misc_feature (2007)..(2007): n is a, c, g, or t
cgcctcaggtcggccgcggactacaaatggacgagagaggcggccgtccattagttagcggctccggagcaacgcagccgttgtccttgaggccgacgggcccgacgcgggcgggttgaacgcgctggtgaggcggtcacccgggctacggcggccggcagggggcagtggcggccgttgtctagggcccggaggtggggccgcgcgcctcgggcgctacgaacccggcgggcccacgcttggctgcggccgggtgcgggctgaggccatgggcgaccgcggcagctcccggcgccggaggacagggtcgcggccctcgagccacggcggcggcgggcctgcggcggcggaagaggaggtgcgggacgccgctgcgggccccgacgtgggagccgcgggggacgcgccagccccggcccccaacaaggacggagacgccggcgtgggcagcggccactgggagctgaggtgccatcgcctgcaggattctttattcagctctgacagtggcttcagcaactaccgtggcatcctgaactggtgtgtggtgatgctgatcttgagcaatgcccggttatttctggagaacctcatcaagtatggcatcctggtggaccccatccaggtggtttctctgttcctgaaggatccctatagctggcccgccccatgcctggttattgcggccaatgtctttgctgtggctgcattccaggttgagaagcgcctggcggtgggtgccctgacggagcaggcgggactgctgctgcacgtggccaacctggccaccattctgtgtttcccagcggctgtggtcttactggttgagtctatcactccagtgggctccctgctggcgctgatggcgcacaccatcctcttcctcaagctcttctcctaccgcgacgtcaactcatggtgccgcagggccagggccaaggctgcctctgcagggaagaaggccagcagtgctgctgccccgcacaccgtgagctacccggacaatctgacctaccgcgatctctactacttcctcttcgcccccaccttgtgctacgagctcaactttccccgctctccccgcatccggaagcgctttctgctgcgacggatccttgagatgctgttcttcacccagctccaggtggggctgatccagcagtggatggtccccaccatccagaactccatgaagcccttcaaggacatggactactcacgcatcatcgagcgcctcctgaagctggcggtccccaatcacctcatctggctcatcttcttctactggctcttccactcctgcctgaatgccgtggctgagctcatgcagtttggagaccgggagttctaccgggactggtggaactccgagtctgtcacctacttctggcagaactggaacatccctgtgcacaagtggtgcatcagacacttctacaagcccatgcttcgacggggcagcagcaagtggatggccaggacaggggtgttcctggcctcggccttcttccacgagtacctggtgagcgtccctctgcgaatgttccgcctctgggcgttcacgggcatgatggctcagatcccactggcctggttcgtgggccgctttttccagggcaactatggcaacgcagctgtgtggctgtcgctcatcatcggacagccaatagccgtcctcatgtacgtccacgactactacgtgctcaactatgaggccccagcggcagaggcctgagctgcacctgagggcctggcttctcactgccacctcacacccgctgccagagcccacctctcctcctaggcctcgagtgctggggatgggcctggctgcacagcatcctcctctggtcccagggaggcctctctgcccctatggggctctgtcctgcacccctcagggatggcgacagcaggccagacacagtctgatgccagctgggagtcttgctgaccctgccccgggtccgagggtgtcaataaagtgctgtccagtgaaaanaaaanaaaaaaacaaaaaaaaaaaaaaaaaaaaaaaaaaaaggggggggcccgccccataaataattccccgcgggggcccccattttgccgccccccctttttttttaaaagaggggcgcccccctagagaggggcggcttataaaggaggagacgacgggcggcgattaaaacagcctgtgtgtgcgtgggggaaaaccgctggaggtgggacattttgtggagagagcgacaccacatcttggtgggcgtggctgaatttgtgcggcaacaacacatcacgggtgattttgagcggccccggagggaaattaaaaatttggaaggtgttctaggtgtgttaaccagcgctgtatatagttgtgcgagtgagaaaattatggagacgggattttgtattgggaaaatttttttg

SEQ ID NO: 285774 - DNA, 1449 bp, Homo sapiens
actcgcagggagctcactactcgcagggagctcactactcgcagggagctcactactcgcagggagctcactactcccagggagctcactcctgaaggatccctatagctggcccgccccatgcctggttattgcggccaatgtctttgctgtggctgcattccaggttgagaagcgcctggcggtgggtgccctgacggagcaggcgggactgctgctgcacgtggccaacctggccaccattctgtgtttcccagcggctgtggtcttactggttgagtctatcactccagtgggctccctgctggcgctgatggcgcacaccatcctcttcctcaagctcttctcctaccgcgacgtcaactcatggtgccgcagggccagggccaaggctgcctctgcagggaagaaggccagcagtgctgctgccccgcacaccgtgagctacccggacaatctgacctaccgcgatctctactacttcctcttcgcccccaccttgtgctacgagctcaactttccccgctctccccgcatccggaagcgctttctgctgcgacggatccttgagatgctgttcttcacccagctccaggtggggctgatccagcagtggatggtccccaccatccagaactccatgaagcccttcaaggacatggactactcacgcatcatcgagcgcctcctgaagctggcggtccccaatcacctcatctggctcatcttcttctactggctcttccactcctgcctgaatgccgtggctgagctcatgcagtttggagaccgggagttctaccgggactggtggaactccgagtctgtcacctacttctggcagaactggaacatccctgtgcacaagtggtgcatcagacacttctacaagcccatgcttcgacggggcagcagcaagtggatggccaggacaggggtgttcctggcctcggccttcttccacgagtacctggtgagcgtccctctgcgaatgttccgcctctgggcgttcacgggcatgatggctcagatcccactggcctggttcgtgggccgctttttccagggcaactatggcaacgcagctgtgtggctgtcgctcatcatcggacagccaatagccgtcctcatgtacgtccacgactactacgtgctcaactatgaggccccagcggcagaggcctgagctgcacctgagggcctggcttctcactgccacctcacacccgctgccagagcccacctctcctcctaggcctcgagtgctggggatgggcctggctgcacagcatcctcctctggtcccagggaggcctctctgcccctatggggctctgtcctgcacccctcagggatggcgacagcaggccagacacagtctgatgccagctgggagtcttgctgaccctgccccgggtccgagggtgtcaataaagtgctgtccagtga

SEQ ID NO: 285775 - DNA, 1304 bp, Homo sapiens
cgctaggtacgaggctgggtgttagagaagcgcctggcggtgggtgccctgacggagcaggcgggactgctgctgcacgtggccaacctggccaccattctgtgtttcccagcggctgtggtcttactggttgagtctatcactccagtgggctccctgctggcgctgatggcgcacaccatcctcttcctcaagctcttctcctaccgcgacgtcaactcatggtgccgcagggccagggccaaggctgcctctgcagggaagaaggccagcagtgctgctgccccgcacaccgtgagctacccggacaatctgacctaccgcgatctctactacttcctcttcgcccccaccttgtgctacgagctcaactttccccgctctccccgcatccggaagcgctttctgctgcgacggatccttgagatgctgttcttcacccagctccaggtggggctgatccagcagtggatggtccccaccatccagaactccatgaagcccttcaaggacatggactactcacgcatcatcgagcgcctcctgaagctggcggtccccaatcacctcatctggctcatcttcttctactggctcttccactcctgcctgaatgccgtggctgagctcatgcagtttggagaccgggagttctaccgggactggtggaactccgagtctgtcacctacttctggcagaactggaacatccctgtgcacaagtggtgcatcagacacttctacaagcccatgcttcgacggggcagcagcaagtggatggccaggacaggggtgttcctggcctcggccttcttccacgagtacctggtgagcgtccctctgcgaatgttccgcctctgggcgttcacgggcatgatggctcagatcccactggcctggttcgtgggccgctttttccagggcaactatggcaacgcagctgtgtggctgtcgctcatcatcggacagccaatagccgtcctcatgtacgtccacgactactacgtgctcaactatgaggccccagcggcagaggcctgagctgcacctgagggcctggcttctcactgccacctcacacccgctgccagagcccacctctcctcctaggcctcgagtgctggggatgggcctggctgcacagcatcctcctctggtcccagggaggcctctctgcccctatggggctctgtcctgcacccctcagggatggcgacagcaggccagacacagtctgatgccagctgggagtcttgctgaccctgccccgggtccgagggtgtcaataaagtgctgtccagtga

SEQ ID NO: 285776 - DNA, 488 bp, Homo sapiens
aggtgtgcattggcagatgaatggaaacgaatgttccgcctctgggcgttcacgggcatgatggctcagatcccactggcctggttcgtgggccgctttttccagggcaactatggcaacgcagctgtgtggctgtcgctcatcatcggacagccaatagccgtcctcatgtacgtccacgactactacgtgctcaactatgaggccccagcggcagaggcctgagctgcacctgagggcctggcttctcactgccacctcacacccgctgccagagcccacctctcctcctaggcctcgagtgctggggatgggcctggctgcacagcatcctcctctggtcccagggaggcctctctgcccctatggggctctgtcctgcacccctcagggatggcgacagcaggccagacacagtctgatgccagctgggagtcttgctgaccctgccccgggtccgagggtgtcaataaagtgctgtccagtga

SEQ ID NO: 285777 - DNA, 193 bp, Homo sapiens
gaaagagagccagcgagaaagagcgagcccgacagcgagcgcagggagcgacaccatgcccggctggaagaagaatatccctatctgcttgcaggcagaggagcaggagagaggaagaagattgctgtctggtttgaactggaatttctcgctatgtcccactggaggtatgtcatagtctgctcttctcact

SEQ ID NO: 285778 - DNA, 2928 bp, Homo sapiens
agtcatctctgttctgctttaggagtaaagtttaccctgcagttccttctgtggtgaagttttctctttctctcggagaccagattctgcctttctgctggagggaagtgttttcacaggttctcctccttttatcttttgtgttttttttcaagccctgctgaatttgctagtcaactcaacaggaagtgaggccatggagggaggcagaagagccagggtggttattgaaagtaaaagaaacttcttcctgggagcctttcccacccccttccctgctgagcacgtggagttaggcaggttaggggactcggagactgcgatggtgccaggaaagggtggagcggattatattctcctgccttttaaaaagatggacttcagcagaaatctttatgatattggggaacaactggacagtgaagatctggcctccctcaagttcctgagcctggactacattccgcaaaggaagcaagaacccatcaaggatgccttgatgttattccagagactccaggaaaagagaatgttggaggaaagcaatctgtccttcctgaaggagctgctcttccgaattaatagactggatttgctgattacctacctaaacactagaaaggaggagatggaaagggaacttcagacaccaggcagggctcaaatttctgcctacagggtcatgctctatcagatttcagaagaagtgagcagatcagaattgaggtcttttaagtttcttttgcaagaggaaatctccaaatgcaaactggatgatgacatgaacctgctggatattttcatagagatggagaagagggtcatcctgggagaaggaaagttggacatcctgaaaagagtctgtgcccaaatcaacaagagcctgctgaagataatcaacgactatgaagaattcagcaaagagagaagcagcagccttgaaggaagtcctgatgaattttcaaatggggaggagttgtgtggggtaatgacaatctcggactctccaagagaacaggatagtgaatcacagactttggacaaagtttaccaaatgaaaagcaaacctcggggatactgtctgatcatcaacaatcacaattttgcaaaagcacgggagaaagtgcccaaacttcacagcattagggacaggaatggaacacacttggatgcaggggctttgaccacgacctttgaagagcttcattttgagatcaagccccacgatgactgcacagtagagcaaatctatgagattttgaaaatctaccaactcatggaccacagtaacatggactgcttcatctgctgtatcctctcccatggagacaagggcatcatctatggcactgatggacaggaggcccccatctatgagctgacatctcagttcactggtttgaagtgcccttcccttgctggaaaacccaaagtgttttttattcaggcttgtcagggggataactaccagaaaggtatacctgttgagactgattcagaggagcaaccctatttagaaatggatttatcatcacctcaaacgagatatatcccggatgaggctgactttctgctggggatggccactgtgaataactgtgtttcctaccgaaaccctgcagagggaacctggtacatccagtcactttgccagagcctgagagagcgatgtcctcgaggcgatgatattctcaccatcctgactgaagtgaactatgaagtaagcaacaaggatgacaagaaaaacatggggaaacagatgcctcagcctactttcacactaagaaaaaaacttgtcttcccttctgattgatggtgctattttgtttgttttgttttgttttgtttttttgagacagaatctcgctctgtcgcccaggctggagtgcagtggcgtgatctcggctcaccgcaagctccgcctcccgggttcacgccattctcctgcctcagcctcccgagtagctgggactacaggggcccgccaccacacctggctaattttttaaaaatatttttagtagagacagggtttcactgtgttagccagggtggtcttgatctcctgacctcgtgatccacccacctcggcctcccaaagtgctgggattacaggcgtgagccaccgcgcctggccgatggtactatttagatataacactatgtttatttactaattttctagattttctactttattaattgttttgcacttttttataagagctaaagttaaataggatattaacaacaataacactgtctcctttctcttatgcttaaggctttgggaatgtttttagctggtggcaataaataccagacacgtacaaaatccagctatgaatatagagggcttatgattcagattgttatctatcaactataagcccactgttaatattctattaactttaattctctttcaaagctaaattccacactaccacattaaaaaaattagaaagtagccacgtatggtggctcatgtctataatcccagcactttgggaggttgaggtgggaggattgcttgaacccaagaggtcaaggctgcagtgagccatgttcacaccgctgcactcaagcttgggtgacagaacaagaccccgtctcaaaaaaaattttttttttaataaaacaaaatttgtttgaaaacttttaaaaattcaaatgatttttacaagttttaaataagctctccccaaacttgctttatgccttcttattgcttttatgatatatatatgcttggctaactatatttgctttttgctaacaatgctctggggtctttttatgcatttgcatttgctctttcatctctgcttggattattttaaatcattaggaattaagttatctttaaaatttaagtatcttttttcaaaaacattttttaatagaataaaatataatttgatctta

SEQ ID NO: 285779 - DNA, 2651 bp, Homo sapiens
agtagagctggctggctgtgcccttccgtccttcattagacgtttgctcttgtcttagatgctcagatggtagtggataggcctgtgacgaaggtgctaccatcgtgagagtaagattatattctcctgccttttaaaaagatggacttcagcagaaatctttatgatattggggaacaactggacagtgaagatctggcctccctcaagttcctgagcctggactacattccgcaaaggaagcaagaacccatcaaggatgccttgatgttattccagagactccaggaaaagagaatgttggaggaaagcaatctgtccttcctgaaggagctgctcttccgaattaatagactggatttgctgattacctacctaaacactagaaaggaggagatggaaagggaacttcagacaccaggcagggctcaaatttctgcctacagggtcatgctctatcagatttcagaagaagtgagcagatcagaattgaggtcttttaagtttcttttgcaagaggaaatctccaaatgcaaactggatgatgacatgaacctgctggatattttcatagagatggagaagagggtcatcctgggagaaggaaagttggacatcctgaaaagagtctgtgcccaaatcaacaagagcctgctgaagataatcaacgactatgaagaattcagcaaaggggaggagttgtgtggggtaatgacaatctcggactctccaagagaacaggatagtgaatcacagactttggacaaagtttaccaaatgaaaagcaaacctcggggatactgtctgatcatcaacaatcacaattttgcaaaagcacgggagaaagtgcccaaacttcacagcattagggacaggaatggaacacacttggatgcaggggctttgaccacgacctttgaagagcttcattttgagatcaagccccacgatgactgcacagtagagcaaatctatgagattttgaaaatctaccaactcatggaccacagtaacatggactgcttcatctgctgtatcctctcccatggagacaagggcatcatctatggcactgatggacaggaggcccccatctatgagctgacatctcagttcactggtttgaagtgcccttcccttgctggaaaacccaaagtgttttttattcaggcttgtcagggggataactaccagaaaggtatacctgttgagactgattcagaggagcaaccctatttagaaatggatttatcatcacctcaaacgagatatatcccggatgaggctgactttctgctggggatggccactgtgaataactgtgtttcctaccgaaaccctgcagagggaacctggtacatccagtcactttgccagagcctgagagagcgatgtcctcgaggcgatgatattctcaccatcctgactgaagtgaactatgaagtaagcaacaaggatgacaagaaaaacatggggaaacagatgcctcagcctactttcacactaagaaaaaaacttgtcttcccttctgattgatggtgctattttgtttgttttgttttgttttgtttttttgagacagaatctcgctctgtcgcccaggctggagtgcagtggcgtgatctcggctcaccgcaagctccgcctcccgggttcacgccattctcctgcctcagcctcccgagtagctgggactacaggggcccgccaccacacctggctaattttttaaaaatatttttagtagagacagggtttcactgtgttagccagggtggtcttgatctcctgacctcgtgatccacccacctcggcctcccaaagtgctgggattacaggcgtgagccaccgcgcctggccgatggtactatttagatataacactatgtttatttactaattttctagattttctactttattaattgttttgcacttttttataagagctaaagttaaataggatattaacaacaataacactgtctcctttctcttatgcttaaggctttgggaatgtttttagctggtggcaataaataccagacacgtacaaaatccagctatgaatatagagggcttatgattcagattgttatctatcaactataagcccactgttaatattctattaactttaattctctttcaaagctaaattccacactaccacattaaaaaaattagaaagtagccacgtatggtggctcatgtctataatcccagcactttgggaggttgaggtgggaggattgcttgaacccaagaggtcaaggctgcagtgagccatgttcacaccgctgcactcaagcttgggtgacagaacaagaccccgtctcaaaaaaaattttttttttaataaaacaaaatttgtttgaaaacttttaaaaattcaaatgatttttacaagttttaaataagctctccccaaacttgctttatgccttcttattgcttttatgatatatatatgcttggctaactatatttgctttttgctaacaatgctctggggtctttttatgcatttgcatttgctctttcatctctgcttggattattttaaatcattaggaattaagttatctttaaaatttaagtatcttttttcaaaaacattttttaatagaataaaatataatttgatctta

SEQ ID NO: 285780 - DNA, 926 bp, Homo sapiens
  misc_feature (1)..(3): n is a, c, g, or t
nnnggtttcaccttgtgtctgagctggtctgaaggctggttgttcagactgagcttcctgcctgcctgtaccccgccaacagcttcagaagaaggtgactggtggctgcctgaggaataccagtgggcaagagaattagcatttctggagcatctgctgtctgagcagcccctgggtgcgtccactttctgggcacgtgaggttgggccttggccgcctgagcccttgagttggtcacttgaaccttgggaatattgagagaaacattagaatcattgccctttagaagagcagaactatgatgcctcctgtcagggatggaacgaggcattccatgcagatgacaacccaaagagagcaagagtggctctatttatatcagacaaaatcgactttaagtcaaaaactgtcacaagagacattaaagtatattatataatgaaaaaagcatcaatccaccatgaagatataacaattataaatatatgcactcaatatcagagcacctaaatatatgaaacaaacaatgacagaactgaagggagaaatagccagccatacaaaaatagtaggagacttcaacactgtactttaaataatggatagaacattcagacagaagattaataaggaaacaggggacttaaacaacattatagaccaaatggaccgaacagaaatacacagaacgttccaccctacagcagtagaacacacattatcctcaaatgcacatggaactttctccaaggtagatcacaagttgggtcacaaaacaagtctttgcaaatttaagagactgaaatcataccatgtatcttttctgaccatgatggaatgaaactaaaaatcaatggcagaaggaaaaatagaaagttcacaaatatgtggaaattaaacaacacactcttgaacaacaattaggc

SEQ ID NO: 285781 - DNA, 1362 bp, Homo sapiens
  misc_feature (1)..(3): n is a, c, g, or t
nnnggtttcaccttgtgtctgagctggtctgaaggctggttgttcagactgagcttcctgcctgcctgtaccccgccaacagcttcagaagaaggagcagcccctgggtgcgtccactttctgggcacgtgaggttgggccttggccgcctgagcccttgagttggtcacttgaaccttgggaatattgagagaaacattagaatcattgccctttagaagagcagaactatgatgcctcctgtcagggatggaacgaggcattccatgcagatgacaacccaaagagagcaagagtggctctatttatatcagacaaaatcgactttaagtcaaaaactgtcacaagagacattaaagtatattatataatgaaaaaagcatcaatccaccatgaagatataacaattataaatatatgcactcaatatcagagcacctaaatatatgaaacaaacaatgacagaactgaagggagaaatagccagccatacaaaaatagtaggagacttcaacactgtactttaaataatggatagaacattcagacagaagattaataaggaaacaggggacttaaacaacattatagaccaaatggaccgaacagaaatacacagaacgttccaccctacagcagtagaacacacattatcctcaaatgcacatggaactttctccaaggtagatcacaagttgggtcacaaaacaagtctttgcaaatttaagagactgaaatcataccatgtatcttttctgaccatgatggaatgaaactaaaaatcaatggcagaaggaaaaatagaaagttcacaaatatgtggaaattaaacaacacactcttgaacaacaattaggccataaaaataaaaaaagaaattaggaaatatcttgagataaatgaaaagaaaagcacaacatacccaaacttacaggataaaagcagtactaagcaaagaagtactaagaggtactttattgcaatacacatctgcagtgaaaaagaagaaagatctcaagtaaatagtctaacttcgtgcctcaaggagaggagaagaagatgaagaagaagaggaactaagcctaaaattagtgaaggaaataacaaagattagagtaggaaccaagaaaatacagaatagaaaagcaatagaaaaaaaatcaacaaattttttgaaaagaataacaaaagaattggttttttgaaaagataaacaaaatcaacaaatccctagttaggctaagtaagaaagagagaagactcaaataaacaatatcagaaataaaagaggagacattacaactgatgccacagaaataaaaacatgaggctataatgaacaattctattccaacaaactgg

SEQ ID NO: 285782 - DNA, 863 bp, Homo sapiens
ataatacaatgtgatgacaacaatattaatatatgtgcaaagtgctcaggaggcccaggtattgggacactgactttacaacgatggggcagaagtctgagaggtcctgtgtgaaggaaataggtagaaactagttcttcgaggaaacgaccccgagttggggtggtgcaatggaaagcaagtcctcttactagggagttgtttgtttacatctctagtgtttgacccacagagtcagctcctgggttgggtttttgttttccagactttggacaaagtttaccaaatgaaaagcaaacctcggggatactgtctgatcatcaacaatcacaattttgcaaaagcacgggagaaagtgcccaaacttcacagcattagggacaggaatggaacacacttggatgcaggtacagtagaacccaaaagagaaaagtaaaatatttcttatgcctatttttttttaaatcaaaagggagagaacaaaagctataccaaaagggccatgtttcaagaaaatggatttaaacatatttccctgtggaggtaaagaacattcttatacatttatcagtttcctgctttttttaaaaattaattttttaaataaaagtaatgtatgtataaatataaaatatcaaatcttactaaaagacataatgaaaagcagtaataagctttgttttgaattcagctaaatgcatagcgcttctgtggaatgtattaggcgatgaaattgctgtggtatcaaagttcttatagaggctgcatttttacaggttgggctgttaagtgcagcagaaattgtgggttcttaacagaaatagcattttcaagtattaaatattaaactggttagcaattct

SEQ ID NO: 285783 - DNA, 2891 bp, Homo sapiens
  misc_feature (1)..(3): n is a, c, g, or t
nnnggtttcaccttgtgtctgagctggtctgaaggctggttgttcagactgagcttcctgcctgcctgtaccccgccaacagcttcagaagaaggtgactggtggctgcctgaggaataccagtgggcaagagaattagcatttctggagcatctgctgtctgagcagcccctgggtgcgtccactttctgggcacgtgaggttgggccttggccgcctgagcccttgagttggtcacttgaaccttgggaatattgagattatattctcctgccttttaaaaagatggacttcagcagaaatctttatgatattggggaacaactggacagtgaagatctggcctccctcaagttcctgagcctggactacattccgcaaaggaagcaagaacccatcaaggatgccttgatgttattccagagactccaggaaaagagaatgttggaggaaagcaatctgtccttcctgaaggagctgctcttccgaattaatagactggatttgctgattacctacctaaacactagaaaggaggagatggaaagggaacttcagacaccaggcagggctcaaatttctgcctacaggttccacttctgccgcatgagctgggctgaagcaaacagccagtgccagacacagtctgtacctttctggcggagggtcgatcatctattaataagggtcatgctctatcagatttcagaagaagtgagcagatcagaattgaggtcttttaagtttcttttgcaagaggaaatctccaaatgcaaactggatgatgacatgaacctgctggatattttcatagagatggagaagagggtcatcctgggagaaggaaagttggacatcctgaaaagagtctgtgcccaaatcaacaagagcctgctgaagataatcaacgactatgaagaattcagcaaaggggaggagttgtgtggggtaatgacaatctcggactctccaagagaacaggatagtgaatcacagactttggacaaagtttaccaaatgaaaagcaaacctcggggatactgtctgatcatcaacaatcacaattttgcaaaagcacgggagaaagtgcccaaacttcacagcattagggacaggaatggaacacacttggatgcaggggctttgaccacgacctttgaagagcttcattttgagatcaagccccacgatgactgcacagtagagcaaatctatgagattttgaaaatctaccaactcatggaccacagtaacatggactgcttcatctgctgtatcctctcccatggagacaagggcatcatctatggcactgatggacaggaggcccccatctatgagctgacatctcagttcactggtttgaagtgcccttcccttgctggaaaacccaaagtgttttttattcaggcttgtcagggggataactaccagaaaggtatacctgttgagactgattcagaggagcaaccctatttagaaatggatttatcatcacctcaaacgagatatatcccggatgaggctgactttctgctggggatggccactgtgaataactgtgtttcctaccgaaaccctgcagagggaacctggtacatccagtcactttgccagagcctgagagagcgatgtcctcgaggcgatgatattctcaccatcctgactgaagtgaactatgaagtaagcaacaaggatgacaagaaaaacatggggaaacagatgcctcagcctactttcacactaagaaaaaaacttgtcttcccttctgattgatggtgctattttgtttgttttgttttgttttgtttttttgagacagaatctcgctctgtcgcccaggctggagtgcagtggcgtgatctcggctcaccgcaagctccgcctcccgggttcacgccattctcctgcctcagcctcccgagtagctgggactacaggggcccgccaccacacctggctaattttttaaaaatatttttagtagagacagggtttcactgtgttagccagggtggtcttgatctcctgacctcgtgatccacccacctcggcctcccaaagtgctgggattacaggcgtgagccaccgcgcctggccgatggtactatttagatataacactatgtttatttactaattttctagattttctactttattaattgttttgcacttttttataagagctaaagttaaataggatattaacaacaataacactgtctcctttctcttatgcttaaggctttgggaatgtttttagctggtggcaataaataccagacacgtacaaaatccagctatgaatatagagggcttatgattcagattgttatctatcaactataagcccactgttaatattctattaactttaattctctttcaaagctaaattccacactaccacattaaaaaaattagaaagtagccacgtatggtggctcatgtctataatcccagcactttgggaggttgaggtgggaggattgcttgaacccaagaggtcaaggctgcagtgagccatgttcacaccgctgcactcaagcttgggtgacagaacaagaccccgtctcaaaaaaaattttttttttaataaaacaaaatttgtttgaaaacttttaaaaattcaaatgatttttacaagttttaaataagctctccccaaacttgctttatgccttcttattgcttttatgatatatatatgcttggctaactatatttgctttttgctaacaatgctctggggtctttttatgcatttgcatttgctctttcatctctgcttggattattttaaatcattaggaattaagttatctttaaaatttaagtatcttttttcaaaaacattttttaatagaataaaatataatttgatctta

SEQ ID NO: 285784 - DNA, 2831 bp, Homo sapiens
  misc_feature (1)..(3): n is a, c, g, or t
nnnggtttcaccttgtgtctgagctggtctgaaggctggttgttcagactgagcttcctgcctgcctgtaccccgccaacagcttcagaagaaggtgactggtggctgcctgaggaataccagtgggcaagagaattagcatttctggagcatctgctgtctgagcagcccctgggtgcgtccactttctgggcacgtgaggttgggccttggccgcctgagcccttgagttggtcacttgaaccttgggaatattgagattatattctcctgccttttaaaaagatggacttcagcagaaatctttatgatattggggaacaactggacagtgaagatctggcctccctcaagttcctgagcctggactacattccgcaaaggaagcaagaacccatcaaggatgccttgatgttattccagagactccaggaaaagagaatgttggaggaaagcaatctgtccttcctgaaggagctgctcttccgaattaatagactggatttgctgattacctacctaaacactagaaaggaggagatggaaagggaacttcagacaccaggcagggctcaaatttctgcctacaggttccacttctgccgcatgagctgggctgaagcaaacagccagtgccagacacagtctgtacctttctggcggagggtcgatcatctattaataagggtcatgctctatcagatttcagaagaagtgagcagatcagaattgaggtcttttaagtttcttttgcaagaggaaatctccaaatgcaaactggatgatgacatgaacctgctggatattttcatagagatggagaagagggtcatcctgggagaaggaaagttggacatcctgaaaagagtctgtgcccaaatcaacaagagcctgctgaagataatcaacgactatgaagaattcagcaaaggggaggagttgtgtggggtaatgacaatctcggactctccaagagaacaggatagtgaatcacagactttggacaaagtttaccaaatgaaaagcaaacctcggggatactgtctgatcatcaacaatcacaattttgcaaaagcacgggagaaagtgcccaaacttcacagcattagggacaggaatggaacacacttggatgcaggggctttgaccacgacctttgaagagcttcattttgagatcaagccccacgatgactgcacagtagagcaaatctatgagattttgaaaatctaccaactcatggaccacagtaacatggactgcttcatctgctgtatcctctcccatggagacaagggcatcatctatggcactgatggacaggaggcccccatctatgagctgacatctcagttcactggtttgaagtgcccttcccttgctggaaaacccaaagtgttttttattcaggcttgtcagggggataactaccagaaaggtatacctgttgagactgattcagaggagcaaccctatttagaaatggatttatcatcacctcaaacgagatatatcccggatgaggctgactttctgctggggatggccactgtgaataactgtgtttcctaccgaaaccctgcagagggaacctggtacatccagtcactttgccagagcctgagagagcgatgtcctcgaggcgatgatattctcaccatcctgactgaagtgaactatgaagtaagcaacaaggatgacaagaaaaacatggggaaacagatgcctcagcctactttcacactaagaaaaaaacttgtcttcccttctgattgatggtgctattttgtttgttttgttttgttttgtttttttgagacagaatctcgctctgtcgcccaggctggagtgcagtggcgtgatctcggctcaccgcaagctccgcctcccgggttcacgccattctcctgcctcagcctcccgagtagctgggactacaggggcccgccaccacacctggctaattttttaaaaatatttttagtagagacagggtttcactgtgttagccagggtggtcttgatctcctgacctcgtgatccacccacctcggcctcccaaagtgctgggattacaggcgtgagccaccgcgcctggccgatggtactatttagatataacactatgtttatttactaattttctagattttctactttattaattgttttgcacttttttataagagctaaagttaaataggatattaacaacaataacactgtctcctttctcttatgcttaaggctttgggaatgtttttagctggtggcaataaataccagacacgtacaaaatccagctatgaatatagagggcttatgattcagattgttatctatcaactataagcccactgttaatattctattaactttaattctctttcaaagctataatcccagcactttgggaggttgaggtgggaggattgcttgaacccaagaggtcaaggctgcagtgagccatgttcacaccgctgcactcaagcttgggtgacagaacaagaccccgtctcaaaaaaaattttttttttaataaaacaaaatttgtttgaaaacttttaaaaattcaaatgatttttacaagttttaaataagctctccccaaacttgctttatgccttcttattgcttttatgatatatatatgcttggctaactatatttgctttttgctaacaatgctctggggtctttttatgcatttgcatttgctctttcatctctgcttggattattttaaatcattaggaattaagttatctttaaaatttaagtatcttttttcaaaaacattttttaatagaataaaatataatttgatctta

SEQ ID NO: 285785 - DNA, 2696 bp, Homo sapiens
agtagagctggctggctgtgcccttccgtccttcattagacgtttgctcttgtcttagatgctcagatggtagtggataggcctgtgacgaaggtgctaccatcgtgagagtaagattatattctcctgccttttaaaaagatggacttcagcagaaatctttatgatattggggaacaactggacagtgaagatctggcctccctcaagttcctgagcctggactacattccgcaaaggaagcaagaacccatcaaggatgccttgatgttattccagagactccaggaaaagagaatgttggaggaaagcaatctgtccttcctgaaggagctgctcttccgaattaatagactggatttgctgattacctacctaaacactagaaaggaggagatggaaagggaacttcagacaccaggcagggctcaaatttctgcctacagggtcatgctctatcagatttcagaagaagtgagcagatcagaattgaggtcttttaagtttcttttgcaagaggaaatctccaaatgcaaactggatgatgacatgaacctgctggatattttcatagagatggagaagagggtcatcctgggagaaggaaagttggacatcctgaaaagagtctgtgcccaaatcaacaagagcctgctgaagataatcaacgactatgaagaattcagcaaagagagaagcagcagccttgaaggaagtcctgatgaattttcaaatggggaggagttgtgtggggtaatgacaatctcggactctccaagagaacaggatagtgaatcacagactttggacaaagtttaccaaatgaaaagcaaacctcggggatactgtctgatcatcaacaatcacaattttgcaaaagcacgggagaaagtgcccaaacttcacagcattagggacaggaatggaacacacttggatgcaggggctttgaccacgacctttgaagagcttcattttgagatcaagccccacgatgactgcacagtagagcaaatctatgagattttgaaaatctaccaactcatggaccacagtaacatggactgcttcatctgctgtatcctctcccatggagacaagggcatcatctatggcactgatggacaggaggcccccatctatgagctgacatctcagttcactggtttgaagtgcccttcccttgctggaaaacccaaagtgttttttattcaggcttgtcagggggataactaccagaaaggtatacctgttgagactgattcagaggagcaaccctatttagaaatggatttatcatcacctcaaacgagatatatcccggatgaggctgactttctgctggggatggccactgtgaataactgtgtttcctaccgaaaccctgcagagggaacctggtacatccagtcactttgccagagcctgagagagcgatgtcctcgaggcgatgatattctcaccatcctgactgaagtgaactatgaagtaagcaacaaggatgacaagaaaaacatggggaaacagatgcctcagcctactttcacactaagaaaaaaacttgtcttcccttctgattgatggtgctattttgtttgttttgttttgttttgtttttttgagacagaatctcgctctgtcgcccaggctggagtgcagtggcgtgatctcggctcaccgcaagctccgcctcccgggttcacgccattctcctgcctcagcctcccgagtagctgggactacaggggcccgccaccacacctggctaattttttaaaaatatttttagtagagacagggtttcactgtgttagccagggtggtcttgatctcctgacctcgtgatccacccacctcggcctcccaaagtgctgggattacaggcgtgagccaccgcgcctggccgatggtactatttagatataacactatgtttatttactaattttctagattttctactttattaattgttttgcacttttttataagagctaaagttaaataggatattaacaacaataacactgtctcctttctcttatgcttaaggctttgggaatgtttttagctggtggcaataaataccagacacgtacaaaatccagctatgaatatagagggcttatgattcagattgttatctatcaactataagcccactgttaatattctattaactttaattctctttcaaagctaaattccacactaccacattaaaaaaattagaaagtagccacgtatggtggctcatgtctataatcccagcactttgggaggttgaggtgggaggattgcttgaacccaagaggtcaaggctgcagtgagccatgttcacaccgctgcactcaagcttgggtgacagaacaagaccccgtctcaaaaaaaattttttttttaataaaacaaaatttgtttgaaaacttttaaaaattcaaatgatttttacaagttttaaataagctctccccaaacttgctttatgccttcttattgcttttatgatatatatatgcttggctaactatatttgctttttgctaacaatgctctggggtctttttatgcatttgcatttgctctttcatctctgcttggattattttaaatcattaggaattaagttatctttaaaatttaagtatcttttttcaaaaacattttttaatagaataaaatataatttgatctta

SEQ ID NO: 285786 - DNA, 2928 bp, Homo sapiens
ggcctagattctagcacttcctttgtgaggctctaaccccctctcctatagtggatttgttaagaacttctgtttttgtggctttgttattataaaattttttgaaatgttgttctctaaaaaagttatgattttatgtttttcttcatgagattctttcactgccttccagctgcaagtagaatgacgtctaaatctttgtgatctgtcactgaagcccttgagtgagacacttaaatctggctgtggctctctctcttactagcttatttccaagccgtgatttttcacaacagaaaaatggggacagtaatagtagtttcttcagaggcttttagtgaaatgagattatattctcctgccttttaaaaagatggacttcagcagaaatctttatgatattggggaacaactggacagtgaagatctggcctccctcaagttcctgagcctggactacattccgcaaaggaagcaagaacccatcaaggatgccttgatgttattccagagactccaggaaaagagaatgttggaggaaagcaatctgtccttcctgaaggagctgctcttccgaattaatagactggatttgctgattacctacctaaacactagaaaggaggagatggaaagggaacttcagacaccaggcagggctcaaatttctgcctacagggtcatgctctatcagatttcagaagaagtgagcagatcagaattgaggtcttttaagtttcttttgcaagaggaaatctccaaatgcaaactggatgatgacatgaacctgctggatattttcatagagatggagaagagggtcatcctgggagaaggaaagttggacatcctgaaaagagtctgtgcccaaatcaacaagagcctgctgaagataatcaacgactatgaagaattcagcaaagagagaagcagcagccttgaaggaagtcctgatgaattttcaaatggggaggagttgtgtggggtaatgacaatctcggactctccaagagaacaggatagtgaatcacagactttggacaaagtttaccaaatgaaaagcaaacctcggggatactgtctgatcatcaacaatcacaattttgcaaaagcacgggagaaagtgcccaaacttcacagcattagggacaggaatggaacacacttggatgcaggggctttgaccacgacctttgaagagcttcattttgagatcaagccccacgatgactgcacagtagagcaaatctatgagattttgaaaatctaccaactcatggaccacagtaacatggactgcttcatctgctgtatcctctcccatggagacaagggcatcatctatggcactgatggacaggaggcccccatctatgagctgacatctcagttcactggtttgaagtgcccttcccttgctggaaaacccaaagtgttttttattcaggcttgtcagggggataactaccagaaaggtatacctgttgagactgattcagaggagcaaccctatttagaaatggatttatcatcacctcaaacgagatatatcccggatgaggctgactttctgctggggatggccactgtgaataactgtgtttcctaccgaaaccctgcagagggaacctggtacatccagtcactttgccagagcctgagagagcgatgtcctcgaggcgatgatattctcaccatcctgactgaagtgaactatgaagtaagcaacaaggatgacaagaaaaacatggggaaacagatgcctcagcctactttcacactaagaaaaaaacttgtcttcccttctgattgatggtgctattttgtttgttttgttttgttttgtttttttgagacagaatctcgctctgtcgcccaggctggagtgcagtggcgtgatctcggctcaccgcaagctccgcctcccgggttcacgccattctcctgcctcagcctcccgagtagctgggactacaggggcccgccaccacacctggctaattttttaaaaatatttttagtagagacagggtttcactgtgttagccagggtggtcttgatctcctgacctcgtgatccacccacctcggcctcccaaagtgctgggattacaggcgtgagccaccgcgcctggccgatggtactatttagatataacactatgtttatttactaattttctagattttctactttattaattgttttgcacttttttataagagctaaagttaaataggatattaacaacaataacactgtctcctttctcttatgcttaaggctttgggaatgtttttagctggtggcaataaataccagacacgtacaaaatccagctatgaatatagagggcttatgattcagattgttatctatcaactataagcccactgttaatattctattaactttaattctctttcaaagctaaattccacactaccacattaaaaaaattagaaagtagccacgtatggtggctcatgtctataatcccagcactttgggaggttgaggtgggaggattgcttgaacccaagaggtcaaggctgcagtgagccatgttcacaccgctgcactcaagcttgggtgacagaacaagaccccgtctcaaaaaaaattttttttttaataaaacaaaatttgtttgaaaacttttaaaaattcaaatgatttttacaagttttaaataagctctccccaaacttgctttatgccttcttattgcttttatgatatatatatgcttggctaactatatttgctttttgctaacaatgctctggggtctttttatgcatttgcatttgctctttcatctctgcttggattattttaaatcattaggaattaagttatctttaaaatttaagtatcttttttcaaaaacattttttaatagaataaaatataatttgatctta

SEQ ID NO: 285787 - DNA, 2700 bp, Homo sapiens
agtcatctctgttctgctttaggagtaaagtttaccctgcagttccttctgtggtgaagttttctctttctctcggagaccagattctgcctttctgctggagggaagtgttttcacagattatattctcctgccttttaaaaagatggacttcagcagaaatctttatgatattggggaacaactggacagtgaagatctggcctccctcaagttcctgagcctggactacattccgcaaaggaagcaagaacccatcaaggatgccttgatgttattccagagactccaggaaaagagaatgttggaggaaagcaatctgtccttcctgaaggagctgctcttccgaattaatagactggatttgctgattacctacctaaacactagaaaggaggagatggaaagggaacttcagacaccaggcagggctcaaatttctgcctacagggtcatgctctatcagatttcagaagaagtgagcagatcagaattgaggtcttttaagtttcttttgcaagaggaaatctccaaatgcaaactggatgatgacatgaacctgctggatattttcatagagatggagaagagggtcatcctgggagaaggaaagttggacatcctgaaaagagtctgtgcccaaatcaacaagagcctgctgaagataatcaacgactatgaagaattcagcaaagagagaagcagcagccttgaaggaagtcctgatgaattttcaaatggggaggagttgtgtggggtaatgacaatctcggactctccaagagaacaggatagtgaatcacagactttggacaaagtttaccaaatgaaaagcaaacctcggggatactgtctgatcatcaacaatcacaattttgcaaaagcacgggagaaagtgcccaaacttcacagcattagggacaggaatggaacacacttggatgcaggggctttgaccacgacctttgaagagcttcattttgagatcaagccccacgatgactgcacagtagagcaaatctatgagattttgaaaatctaccaactcatggaccacagtaacatggactgcttcatctgctgtatcctctcccatggagacaagggcatcatctatggcactgatggacaggaggcccccatctatgagctgacatctcagttcactggtttgaagtgcccttcccttgctggaaaacccaaagtgttttttattcaggcttgtcagggggataactaccagaaaggtatacctgttgagactgattcagaggagcaaccctatttagaaatggatttatcatcacctcaaacgagatatatcccggatgaggctgactttctgctggggatggccactgtgaataactgtgtttcctaccgaaaccctgcagagggaacctggtacatccagtcactttgccagagcctgagagagcgatgtcctcgaggcgatgatattctcaccatcctgactgaagtgaactatgaagtaagcaacaaggatgacaagaaaaacatggggaaacagatgcctcagcctactttcacactaagaaaaaaacttgtcttcccttctgattgatggtgctattttgtttgttttgttttgttttgtttttttgagacagaatctcgctctgtcgcccaggctggagtgcagtggcgtgatctcggctcaccgcaagctccgcctcccgggttcacgccattctcctgcctcagcctcccgagtagctgggactacaggggcccgccaccacacctggctaattttttaaaaatatttttagtagagacagggtttcactgtgttagccagggtggtcttgatctcctgacctcgtgatccacccacctcggcctcccaaagtgctgggattacaggcgtgagccaccgcgcctggccgatggtactatttagatataacactatgtttatttactaattttctagattttctactttattaattgttttgcacttttttataagagctaaagttaaataggatattaacaacaataacactgtctcctttctcttatgcttaaggctttgggaatgtttttagctggtggcaataaataccagacacgtacaaaatccagctatgaatatagagggcttatgattcagattgttatctatcaactataagcccactgttaatattctattaactttaattctctttcaaagctaaattccacactaccacattaaaaaaattagaaagtagccacgtatggtggctcatgtctataatcccagcactttgggaggttgaggtgggaggattgcttgaacccaagaggtcaaggctgcagtgagccatgttcacaccgctgcactcaagcttgggtgacagaacaagaccccgtctcaaaaaaaattttttttttaataaaacaaaatttgtttgaaaacttttaaaaattcaaatgatttttacaagttttaaataagctctccccaaacttgctttatgccttcttattgcttttatgatatatatatgcttggctaactatatttgctttttgctaacaatgctctggggtctttttatgcatttgcatttgctctttcatctctgcttggattattttaaatcattaggaattaagttatctttaaaatttaagtatcttttttcaaaaacattttttaatagaataaaatataatttgatctta

SEQ ID NO: 285788 - DNA, 3064 bp, Homo sapiens
agtcatctctgttctgctttaggagtaaagtttaccctgcagttccttctgtggtgaagttttctctttctctcggagaccagattctgcctttctgctggagggaagtgttttcacaggttctcctccttttatcttttgtgttttttttcaagccctgctgaatttgctagtcaactcaacaggaagtgaggccatggagggaggcagaagagccagggtggttattgaaagtaaaagaaacttcttcctgggagcctttcccacccccttccctgctgagcacgtggagttaggcaggttaggggactcggagactgcgatggtgccaggaaagggtggagcggattatattctcctgccttttaaaaagatggacttcagcagaaatctttatgatattggggaacaactggacagtgaagatctggcctccctcaagttcctgagcctggactacattccgcaaaggaagcaagaacccatcaaggatgccttgatgttattccagagactccaggaaaagagaatgttggaggaaagcaatctgtccttcctgaaggagctgctcttccgaattaatagactggatttgctgattacctacctaaacactagaaaggaggagatggaaagggaacttcagacaccaggcagggctcaaatttctgcctacagggtcatgctctatcagatttcagaagaagtgagcagatcagaattgaggtcttttaagtttcttttgcaagaggaaatctccaaatgcaaactggatgatgacatgaacctgctggatattttcatagagatggagaagagggtcatcctgggagaaggaaagttggacatcctgaaaagagtctgtgcccaaatcaacaagagcctgctgaagataatcaacgactatgaagaattcagcaaagagagaagcagcagccttgaaggaagtcctgatgaattttcaaatggggaggagttgtgtggggtaatgacaatctcggactctccaagagaacaggatagtgaatcacagactttggacaaagtttaccaaatgaaaagcaaacctcggggatactgtctgatcatcaacaatcacaattttgcaaaagcacgggagaaagtgcccaaacttcacagcattagggacaggaatggaacacacttggatgcaggtacagtagaacccaaaagagaaaagtaaaatatttcttatgcctatttttttttaaatcaaaagggagagaacaaaagctataccaaaagggccatgtttcaagaaaatggatttaaacatatttccctgtggaggggctttgaccacgacctttgaagagcttcattttgagatcaagccccacgatgactgcacagtagagcaaatctatgagattttgaaaatctaccaactcatggaccacagtaacatggactgcttcatctgctgtatcctctcccatggagacaagggcatcatctatggcactgatggacaggaggcccccatctatgagctgacatctcagttcactggtttgaagtgcccttcccttgctggaaaacccaaagtgttttttattcaggcttgtcagggggataactaccagaaaggtatacctgttgagactgattcagaggagcaaccctatttagaaatggatttatcatcacctcaaacgagatatatcccggatgaggctgactttctgctggggatggccactgtgaataactgtgtttcctaccgaaaccctgcagagggaacctggtacatccagtcactttgccagagcctgagagagcgatgtcctcgaggcgatgatattctcaccatcctgactgaagtgaactatgaagtaagcaacaaggatgacaagaaaaacatggggaaacagatgcctcagcctactttcacactaagaaaaaaacttgtcttcccttctgattgatggtgctattttgtttgttttgttttgttttgtttttttgagacagaatctcgctctgtcgcccaggctggagtgcagtggcgtgatctcggctcaccgcaagctccgcctcccgggttcacgccattctcctgcctcagcctcccgagtagctgggactacaggggcccgccaccacacctggctaattttttaaaaatatttttagtagagacagggtttcactgtgttagccagggtggtcttgatctcctgacctcgtgatccacccacctcggcctcccaaagtgctgggattacaggcgtgagccaccgcgcctggccgatggtactatttagatataacactatgtttatttactaattttctagattttctactttattaattgttttgcacttttttataagagctaaagttaaataggatattaacaacaataacactgtctcctttctcttatgcttaaggctttgggaatgtttttagctggtggcaataaataccagacacgtacaaaatccagctatgaatatagagggcttatgattcagattgttatctatcaactataagcccactgttaatattctattaactttaattctctttcaaagctaaattccacactaccacattaaaaaaattagaaagtagccacgtatggtggctcatgtctataatcccagcactttgggaggttgaggtgggaggattgcttgaacccaagaggtcaaggctgcagtgagccatgttcacaccgctgcactcaagcttgggtgacagaacaagaccccgtctcaaaaaaaattttttttttaataaaacaaaatttgtttgaaaacttttaaaaattcaaatgatttttacaagttttaaataagctctccccaaacttgctttatgccttcttattgcttttatgatatatatatgcttggctaactatatttgctttttgctaacaatgctctggggtctttttatgcatttgcatttgctctttcatctctgcttggattattttaaatcattaggaattaagttatctttaaaatttaagtatcttttttcaaaaacattttttaatagaataaaatataatttgatctta

SEQ ID NO: 285789 - DNA, 2655 bp, Homo sapiens
agtcatctctgttctgctttaggagtaaagtttaccctgcagttccttctgtggtgaagttttctctttctctcggagaccagattctgcctttctgctggagggaagtgttttcacagattatattctcctgccttttaaaaagatggacttcagcagaaatctttatgatattggggaacaactggacagtgaagatctggcctccctcaagttcctgagcctggactacattccgcaaaggaagcaagaacccatcaaggatgccttgatgttattccagagactccaggaaaagagaatgttggaggaaagcaatctgtccttcctgaaggagctgctcttccgaattaatagactggatttgctgattacctacctaaacactagaaaggaggagatggaaagggaacttcagacaccaggcagggctcaaatttctgcctacagggtcatgctctatcagatttcagaagaagtgagcagatcagaattgaggtcttttaagtttcttttgcaagaggaaatctccaaatgcaaactggatgatgacatgaacctgctggatattttcatagagatggagaagagggtcatcctgggagaaggaaagttggacatcctgaaaagagtctgtgcccaaatcaacaagagcctgctgaagataatcaacgactatgaagaattcagcaaaggggaggagttgtgtggggtaatgacaatctcggactctccaagagaacaggatagtgaatcacagactttggacaaagtttaccaaatgaaaagcaaacctcggggatactgtctgatcatcaacaatcacaattttgcaaaagcacgggagaaagtgcccaaacttcacagcattagggacaggaatggaacacacttggatgcaggggctttgaccacgacctttgaagagcttcattttgagatcaagccccacgatgactgcacagtagagcaaatctatgagattttgaaaatctaccaactcatggaccacagtaacatggactgcttcatctgctgtatcctctcccatggagacaagggcatcatctatggcactgatggacaggaggcccccatctatgagctgacatctcagttcactggtttgaagtgcccttcccttgctggaaaacccaaagtgttttttattcaggcttgtcagggggataactaccagaaaggtatacctgttgagactgattcagaggagcaaccctatttagaaatggatttatcatcacctcaaacgagatatatcccggatgaggctgactttctgctggggatggccactgtgaataactgtgtttcctaccgaaaccctgcagagggaacctggtacatccagtcactttgccagagcctgagagagcgatgtcctcgaggcgatgatattctcaccatcctgactgaagtgaactatgaagtaagcaacaaggatgacaagaaaaacatggggaaacagatgcctcagcctactttcacactaagaaaaaaacttgtcttcccttctgattgatggtgctattttgtttgttttgttttgttttgtttttttgagacagaatctcgctctgtcgcccaggctggagtgcagtggcgtgatctcggctcaccgcaagctccgcctcccgggttcacgccattctcctgcctcagcctcccgagtagctgggactacaggggcccgccaccacacctggctaattttttaaaaatatttttagtagagacagggtttcactgtgttagccagggtggtcttgatctcctgacctcgtgatccacccacctcggcctcccaaagtgctgggattacaggcgtgagccaccgcgcctggccgatggtactatttagatataacactatgtttatttactaattttctagattttctactttattaattgttttgcacttttttataagagctaaagttaaataggatattaacaacaataacactgtctcctttctcttatgcttaaggctttgggaatgtttttagctggtggcaataaataccagacacgtacaaaatccagctatgaatatagagggcttatgattcagattgttatctatcaactataagcccactgttaatattctattaactttaattctctttcaaagctaaattccacactaccacattaaaaaaattagaaagtagccacgtatggtggctcatgtctataatcccagcactttgggaggttgaggtgggaggattgcttgaacccaagaggtcaaggctgcagtgagccatgttcacaccgctgcactcaagcttgggtgacagaacaagaccccgtctcaaaaaaaattttttttttaataaaacaaaatttgtttgaaaacttttaaaaattcaaatgatttttacaagttttaaataagctctccccaaacttgctttatgccttcttattgcttttatgatatatatatgcttggctaactatatttgctttttgctaacaatgctctggggtctttttatgcatttgcatttgctctttcatctctgcttggattattttaaatcattaggaattaagttatctttaaaatttaagtatcttttttcaaaaacattttttaatagaataaaatataatttgatctta

SEQ ID NO: 285790 - DNA, 2444 bp, Homo sapiens
agtagagctggctggctgtgcccttccgtccttcattagacgtttgctcttgtcttagatgctcagatggtagtggataggcctgtgacgaaggtgctaccatcgtgagagtaagattatattctcctgccttttaaaaagatggacttcagcagaaatctttatgatattggggaacaactggacagtgaagatctggcctccctcaagttcctgagcctggactacattccgcaaaggaagcaagaacccatcaaggatgccttgatgttattccagagactccaggaaaagagaatgttggaggaaagcaatctgtccttcctgaaggagctgctcttccgaattaatagactggatttgctgattacctacctaaacactagaaaggaggagatggaaagggaacttcagacaccaggcagggctcaaatttctgcctacagggtcatgctctatcagatttcagaagaagtgagcagatcagaattgaggtcttttaagtttcttttgcaagaggaaatctccaaatgcaaactggatgatgacatgaacctgctggatattttcatagagatggagaagagggtcatcctgggagaaggaaagttggacatcctgaaaagagtctgtgcccaaatcaacaagagcctgctgaagataatcaacgactatgaagaattcagcaaaggggctttgaccacgacctttgaagagcttcattttgagatcaagccccacgatgactgcacagtagagcaaatctatgagattttgaaaatctaccaactcatggaccacagtaacatggactgcttcatctgctgtatcctctcccatggagacaagggcatcatctatggcactgatggacaggaggcccccatctatgagctgacatctcagttcactggtttgaagtgcccttcccttgctggaaaacccaaagtgttttttattcaggcttgtcagggggataactaccagaaaggtatacctgttgagactgattcagaggagcaaccctatttagaaatggatttatcatcacctcaaacgagatatatcccggatgaggctgactttctgctggggatggccactgtgaataactgtgtttcctaccgaaaccctgcagagggaacctggtacatccagtcactttgccagagcctgagagagcgatgtcctcgaggcgatgatattctcaccatcctgactgaagtgaactatgaagtaagcaacaaggatgacaagaaaaacatggggaaacagatgcctcagcctactttcacactaagaaaaaaacttgtcttcccttctgattgatggtgctattttgtttgttttgttttgttttgtttttttgagacagaatctcgctctgtcgcccaggctggagtgcagtggcgtgatctcggctcaccgcaagctccgcctcccgggttcacgccattctcctgcctcagcctcccgagtagctgggactacaggggcccgccaccacacctggctaattttttaaaaatatttttagtagagacagggtttcactgtgttagccagggtggtcttgatctcctgacctcgtgatccacccacctcggcctcccaaagtgctgggattacaggcgtgagccaccgcgcctggccgatggtactatttagatataacactatgtttatttactaattttctagattttctactttattaattgttttgcacttttttataagagctaaagttaaataggatattaacaacaataacactgtctcctttctcttatgcttaaggctttgggaatgtttttagctggtggcaataaataccagacacgtacaaaatccagctatgaatatagagggcttatgattcagattgttatctatcaactataagcccactgttaatattctattaactttaattctctttcaaagctaaattccacactaccacattaaaaaaattagaaagtagccacgtatggtggctcatgtctataatcccagcactttgggaggttgaggtgggaggattgcttgaacccaagaggtcaaggctgcagtgagccatgttcacaccgctgcactcaagcttgggtgacagaacaagaccccgtctcaaaaaaaattttttttttaataaaacaaaatttgtttgaaaacttttaaaaattcaaatgatttttacaagttttaaataagctctccccaaacttgctttatgccttcttattgcttttatgatatatatatgcttggctaactatatttgctttttgctaacaatgctctggggtctttttatgcatttgcatttgctctttcatctctgcttggattattttaaatcattaggaattaagttatctttaaaatttaagtatcttttttcaaaaacattttttaatagaataaaatataatttgatctta

SEQ ID NO: 285791 - DNA, 2817 bp, Homo sapiens
agtagagctggctggctgtgcccttccgtccttcattagacgtttgctcttgtcttagatgctcagatggtagtggataggcctgtgacgaaggtgctaccatcgtgagagtaagattatattctcctgccttttaaaaagatggacttcagcagaaatctttatgatattggggaacaactggacagtgaagatctggcctccctcaagttcctgagcctggactacattccgcaaaggaagcaagaacccatcaaggatgccttgatgttattccagagactccaggaaaagagaatgttggaggaaagcaatctgtccttcctgaaggagctgctcttccgaattaatagactggatttgctgattacctacctaaacactagaaaggaggagatggaaagggaacttcagacaccaggcagggctcaaatttctgcctacagggtcatgctctatcagatttcagaagaagtgagcagatcagaattgaggtcttttaagtttcttttgcaagaggaaatctccaaatgcaaactggatgatgacatgaacctgctggatattttcatagagatggagaagagggtcatcctgggagaaggaaagttggacatcctgaaaagagtctgtgcccaaatcaacaagagcctgctgaagataatcaacgactatgaagaattcagcaaaggtagaaacaacctgacagccgggaatcggcaaaacctactctaaaattgaaactgacaaatcgctccatatcacagttgtttctaatcaaatattgtttggggtttccccttttaattcagagagaagcagcagccttgaaggaagtcctgatgaattttcaaatggggaggagttgtgtggggtaatgacaatctcggactctccaagagaacaggatagtgaatcacagactttggacaaagtttaccaaatgaaaagcaaacctcggggatactgtctgatcatcaacaatcacaattttgcaaaagcacgggagaaagtgcccaaacttcacagcattagggacaggaatggaacacacttggatgcaggggctttgaccacgacctttgaagagcttcattttgagatcaagccccacgatgactgcacagtagagcaaatctatgagattttgaaaatctaccaactcatggaccacagtaacatggactgcttcatctgctgtatcctctcccatggagacaagggcatcatctatggcactgatggacaggaggcccccatctatgagctgacatctcagttcactggtttgaagtgcccttcccttgctggaaaacccaaagtgttttttattcaggcttgtcagggggataactaccagaaaggtatacctgttgagactgattcagaggagcaaccctatttagaaatggatttatcatcacctcaaacgagatatatcccggatgaggctgactttctgctggggatggccactgtgaataactgtgtttcctaccgaaaccctgcagagggaacctggtacatccagtcactttgccagagcctgagagagcgatgtcctcgaggcgatgatattctcaccatcctgactgaagtgaactatgaagtaagcaacaaggatgacaagaaaaacatggggaaacagatgcctcagcctactttcacactaagaaaaaaacttgtcttcccttctgattgatggtgctattttgtttgttttgttttgttttgtttttttgagacagaatctcgctctgtcgcccaggctggagtgcagtggcgtgatctcggctcaccgcaagctccgcctcccgggttcacgccattctcctgcctcagcctcccgagtagctgggactacaggggcccgccaccacacctggctaattttttaaaaatatttttagtagagacagggtttcactgtgttagccagggtggtcttgatctcctgacctcgtgatccacccacctcggcctcccaaagtgctgggattacaggcgtgagccaccgcgcctggccgatggtactatttagatataacactatgtttatttactaattttctagattttctactttattaattgttttgcacttttttataagagctaaagttaaataggatattaacaacaataacactgtctcctttctcttatgcttaaggctttgggaatgtttttagctggtggcaataaataccagacacgtacaaaatccagctatgaatatagagggcttatgattcagattgttatctatcaactataagcccactgttaatattctattaactttaattctctttcaaagctaaattccacactaccacattaaaaaaattagaaagtagccacgtatggtggctcatgtctataatcccagcactttgggaggttgaggtgggaggattgcttgaacccaagaggtcaaggctgcagtgagccatgttcacaccgctgcactcaagcttgggtgacagaacaagaccccgtctcaaaaaaaattttttttttaataaaacaaaatttgtttgaaaacttttaaaaattcaaatgatttttacaagttttaaataagctctccccaaacttgctttatgccttcttattgcttttatgatatatatatgcttggctaactatatttgctttttgctaacaatgctctggggtctttttatgcatttgcatttgctctttcatctctgcttggattattttaaatcattaggaattaagttatctttaaaatttaagtatcttttttcaaaaacattttttaatagaataaaatataatttgatctta

SEQ ID NO: 285792 - DNA, 2160 bp, Homo sapiens
ataatacaatgtgatgacaacaatattaatatatgtgcaaagtgctcaggaggcccaggtattgggacactgactttacaacgatggggcagaagtctgagaggtcctgtgtgaaggaaataggtagaaactagttcttcgaggaaacgaccccgagttggggtggtgcaatggaaagcaagtcctcttactagggagttgtttgtttacatctctagtgtttgacccacagagtcagctcctgggttgggtttttgttttccagactttggacaaagtttaccaaatgaaaagcaaacctcggggatactgtctgatcatcaacaatcacaattttgcaaaagcacgggagaaagtgcccaaacttcacagcattagggacaggaatggaacacacttggatgcaggggctttgaccacgacctttgaagagcttcattttgagatcaagccccacgatgactgcacagtagagcaaatctatgagattttgaaaatctaccaactcatggaccacagtaacatggactgcttcatctgctgtatcctctcccatggagacaagggcatcatctatggcactgatggacaggaggcccccatctatgagctgacatctcagttcactggtttgaagtgcccttcccttgctggaaaacccaaagtgttttttattcaggcttgtcagggggataactaccagaaaggtatacctgttgagactgattcagaggagcaaccctatttagaaatggatttatcatcacctcaaacgagatatatcccggatgaggctgactttctgctggggatggccactgtgaataactgtgtttcctaccgaaaccctgcagagggaacctggtacatccagtcactttgccagagcctgagagagcgatgtcctcgaggcgatgatattctcaccatcctgactgaagtgaactatgaagtaagcaacaaggatgacaagaaaaacatggggaaacagatgcctcagcctactttcacactaagaaaaaaacttgtcttcccttctgattgatggtgctattttgtttgttttgttttgttttgtttttttgagacagaatctcgctctgtcgcccaggctggagtgcagtggcgtgatctcggctcaccgcaagctccgcctcccgggttcacgccattctcctgcctcagcctcccgagtagctgggactacaggggcccgccaccacacctggctaattttttaaaaatatttttagtagagacagggtttcactgtgttagccagggtggtcttgatctcctgacctcgtgatccacccacctcggcctcccaaagtgctgggattacaggcgtgagccaccgcgcctggccgatggtactatttagatataacactatgtttatttactaattttctagattttctactttattaattgttttgcacttttttataagagctaaagttaaataggatattaacaacaataacactgtctcctttctcttatgcttaaggctttgggaatgtttttagctggtggcaataaataccagacacgtacaaaatccagctatgaatatagagggcttatgattcagattgttatctatcaactataagcccactgttaatattctattaactttaattctctttcaaagctaaattccacactaccacattaaaaaaattagaaagtagccacgtatggtggctcatgtctataatcccagcactttgggaggttgaggtgggaggattgcttgaacccaagaggtcaaggctgcagtgagccatgttcacaccgctgcactcaagcttgggtgacagaacaagaccccgtctcaaaaaaaattttttttttaataaaacaaaatttgtttgaaaacttttaaaaattcaaatgatttttacaagttttaaataagctctccccaaacttgctttatgccttcttattgcttttatgatatatatatgcttggctaactatatttgctttttgctaacaatgctctggggtctttttatgcatttgcatttgctctttcatctctgcttggattattttaaatcattaggaattaagttatctttaaaatttaagtatcttttttcaaaaacattttttaatagaataaaatataatttgatctta

SEQ ID NO: 285793 - DNA, 1955 bp, Homo sapiens
agtagagctggctggctgtgcccttccgtccttcattagacgtttgctcttgtcttagatgctcagatggtagtggataggcctgtgacgaaggtgctaccatcgtgagagtaagattatattctcctgccttttaaaaagatggacttcagcagaaatctttatgatattggggaacaactggacagtgaagatctggcctccctcaagttcctgagcctggactacattccgcaaaggaagcaagaacccatcaaggatgccttgatgttattccagagactccaggaaaagagaatgttggaggaaagcaatctgtccttcctgaaggagctgctcttccgaattaatagactggatttgctgattacctacctaaacactagaaaggaggagatggaaagggaacttcagacaccaggcagggctcaaatttctgcctacagggtcatgctctatcagatttcagaagaagtgagcagatcagaattgaggtcttttaagtttcttttgcaagaggaaatctccaaatgcaaactggatgatgacatgaacctgctggatattttcatagagatggagaagagggtcatcctgggagaaggaaagttggacatcctgaaaagagtctgtgcccaaatcaacaagagcctgctgaagataatcaacgactatgaagaattcagcaaagagagaagcagcagccttgaaggaagtcctgatgaattttcaaatggggaggagttgtgtggggtaatgacaatctcggactctccaagagaacaggatagtgaatcacagactttggacaaagtttaccaaatgaaaagcaaacctcggggatactgtctgatcatcaacaatcacaattttgcaaaagcacgggagaaagtgcccaaacttcacagcattagggacaggaatggaacacacttggatgcaggggctttgaccacgacctttgaagagcttcattttgagatcaagccccacgatgactgcacagtagagcaaatctatgagattttgaaaatctaccaactcatggaccacagtaacatggactgcttcatctgctgtatcctctcccatggagacaagggcatcatctatggcactgatggacaggaggcccccatctatgagctgacatctcagttcactggtttgaagtgcccttcccttgctggaaaacccaaagtgttttttattcaggcttgtcagggggataactaccagaaaggtatacctgttgagactgattcagaggagcaaccctatttagaaatggatttatcatcacctcaaacgagatatatcccggatgaggctgactttctgctggggatggccactgtgaataactgtgtttcctaccgaaaccctgcagagggaacctggtacatccagtcactttgccagagcctgagagagcgatgtcctcgaggcgatgatattctcaccatcctgactgaagtgaactatgaagtaagcaacaaggatgacaagaaaaacatggggaaacagatgcctcagcctactttcacactaagaaaaaaacttgtcttcccttctgattgatggtgctattttgtttgttttgttttgttttgtttttttgagacagaataagaccccgtctcaaaaaaaattttttttttaataaaacaaaatttgtttgaaaacttttaaaaattcaaatgatttttacaagttttaaataagctctccccaaacttgctttatgccttcttattgcttttatgatatatatatgcttggctaactatatttgctttttgctaacaatgctctggggtctttttatgcatttgcatttgctctttcatctctgcttggattattttaaatcattaggaattaagttatctttaaaatttaagtatcttttttcaaaaacattttttaatagaataaaatataatttgatctta

SEQ ID NO: 285794 - DNA, 970 bp, Homo sapiens
  misc_feature (950)..(950): n is a, c, g, or t
agtagagctggctggctgtgcccttccgtccttcattagacgtttgctcttgtcttagatgctcagatggtagtggataggcctgtgacgaaggtgctaccatcgtgagagtaagattatattctcctgccttttaaaaagatggacttcagcagaaatctttatgatattggggaacaactggacagtgaagatctggcctccctcaagttcctgagcctggactacattccgcaaaggaagcaagaacccatcaaggatgccttgatgttattccagagactccaggaaaagagaatgttggaggaaagcaatctgtccttcctgaaggagctgctcttccgaattaatagactggatttgctgattacctacctaaacactagaaaggaggagatggaaagggaacttcagacaccaggcagggctcaaatttctgcctacagggtcatgctctatcagatttcagaagaagtgagcagatcagaattgaggtcttttaagtttcttttgcaagaggaaatctccaaatgcaaactggatgatgacatgaacctgctggatattttcatagagatggagaagagggtcatcctgggagaaggaaagttggacatcctgaaaagagtctgtgcccaaatcaacaagagcctgctgaagataatcaacgactatgaagaattcagcaaagagagaagcagcagccttgaaggaagtcctgatgaattttcaaatggggaggagttgtgtggggtaatgacaatctcggactctccaagagaacaggatagtgaatcacagactttggacaaagtttaccaaatgaaaagcaaacctcggggatactgtctgatcatcaacaatcacaattttgcaaaagcacgggagaaagtgcccaaacttcacagcattagggacaggaatggaacacacttggatgcagggtttgngaatgtttttagctggtggc

SEQ ID NO: 285795 - DNA, 925 bp, Homo sapiens
  misc_feature (905)..(905): n is a, c, g, or t
agtagagctggctggctgtgcccttccgtccttcattagacgtttgctcttgtcttagatgctcagatggtagtggataggcctgtgacgaaggtgctaccatcgtgagagtaagattatattctcctgccttttaaaaagatggacttcagcagaaatctttatgatattggggaacaactggacagtgaagatctggcctccctcaagttcctgagcctggactacattccgcaaaggaagcaagaacccatcaaggatgccttgatgttattccagagactccaggaaaagagaatgttggaggaaagcaatctgtccttcctgaaggagctgctcttccgaattaatagactggatttgctgattacctacctaaacactagaaaggaggagatggaaagggaacttcagacaccaggcagggctcaaatttctgcctacagggtcatgctctatcagatttcagaagaagtgagcagatcagaattgaggtcttttaagtttcttttgcaagaggaaatctccaaatgcaaactggatgatgacatgaacctgctggatattttcatagagatggagaagagggtcatcctgggagaaggaaagttggacatcctgaaaagagtctgtgcccaaatcaacaagagcctgctgaagataatcaacgactatgaagaattcagcaaaggggaggagttgtgtggggtaatgacaatctcggactctccaagagaacaggatagtgaatcacagactttggacaaagtttaccaaatgaaaagcaaacctcggggatactgtctgatcatcaacaatcacaattttgcaaaagcacgggagaaagtgcccaaacttcacagcattagggacaggaatggaacacacttggatgcagggtttgngaatgtttttagctggtggc

SEQ ID NO: 285796 - DNA, 1430 bp, Homo sapiens
  misc_feature (1)..(3): n is a, c, g, or t
nnnggtttcaccttgtgtctgagctggtctgaaggctggttgttcagactgagcttcctgcctgcctgtaccccgccaacagcttcagaagaaggtgactggtggctgcctgaggaataccagtgggcaagagaattagcatttctggagcatctgctgtctgagcagcccctgggtgcgtccactttctgggcacgtgaggttgggccttggccgcctgagcccttgagttggtcacttgaaccttgggaatattgagagaaacattagaatcattgccctttagaagagcagaactatgatgcctcctgtcagggatggaacgaggcattccatgcagatgacaacccaaagagagcaagagtggctctatttatatcagacaaaatcgactttaagtcaaaaactgtcacaagagacattaaagtatattatataatgaaaaaagcatcaatccaccatgaagatataacaattataaatatatgcactcaatatcagagcacctaaatatatgaaacaaacaatgacagaactgaagggagaaatagccagccatacaaaaatagtaggagacttcaacactgtactttaaataatggatagaacattcagacagaagattaataaggaaacaggggacttaaacaacattatagaccaaatggaccgaacagaaatacacagaacgttccaccctacagcagtagaacacacattatcctcaaatgcacatggaactttctccaaggtagatcacaagttgggtcacaaaacaagtctttgcaaatttaagagactgaaatcataccatgtatcttttctgaccatgatggaatgaaactaaaaatcaatggcagaaggaaaaatagaaagttcacaaatatgtggaaattaaacaacacactcttgaacaacaattaggccataaaaataaaaaaagaaattaggaaatatcttgagataaatgaaaagaaaagcacaacatacccaaacttacaggataaaagcagtactaagcaaagaagtactaagaggtactttattgcaatacacatctgcagtgaaaaagaagaaagatctcaagtaaatagtctaacttcgtgcctcaaggagaggagaagaagatgaagaagaagaggaactaagcctaaaattagtgaaggaaataacaaagattagagtaggaaccaagaaaatacagaatagaaaagcaatagaaaaaaaatcaacaaattttttgaaaagaataacaaaagaattggttttttgaaaagataaacaaaatcaacaaatccctagttaggctaagtaagaaagagagaagactcaaataaacaatatcagaaataaaagaggagacattacaactgatgccacagaaataaaaacatgaggctataatgaacaattctattccaacaaactgg

SEQ ID NO: 285797 - DNA, 1399 bp, Homo sapiens
agtagagctggctggctgtgcccttccgtccttcattagacgtttgctcttgtcttagatgctcagatggtagtggataggcctgtgacgaaggtgctaccatcgtgagagtaagattatattctcctgccttttaaaaagatggacttcagcagaaatctttatgatattggggaacaactggacagtgaagatctggcctccctcaagttcctgagcctggactacattccgcaaaggaagcaagaacccatcaaggatgccttgatgttattccagagactccaggaaaagagaatgttggaggaaagcaatctgtccttcctgaaggagctgctcttccgaattaatagactggatttgctgattacctacctaaacactagaaaggaggagatggaaagggaacttcagacaccaggcagggctcaaatttctgcctacagggtcatgctctatcagatttcagaagaagtgagcagatcagaattgaggtcttttaagtttcttttgcaagaggaaatctccaaatgcaaactggatgatgacatgaacctgctggatattttcatagagatggagaagagggtcatcctgggagaaggaaagttggacatcctgaaaagagtctgtgcccaaatcaacaagagcctgctgaagataatcaacgactatgaagaattcagcaaagagagaagcagcagccttgaaggaagtcctgatgaattttcaaatggggaggagttgtgtggggtaatgacaatctcggactctccaagagaacaggatagtgaatcacagactttggacaaagtttaccaaatgaaaagcaaacctcggggatactgtctgatcatcaacaatcacaattttgcaaaagcacgggagaaagtgcccaaacttcacagcattagggacaggaatggaacacacttggatgcaggtacagtagaacccaaaagagaaaagtaaaatatttcttatgcctatttttttttaaatcaaaagggagagaacaaaagctataccaaaagggccatgtttcaagaaaatggatttaaacatatttccctgtggaggtaaagaacattcttatacatttatcagtttcctgctttttttaaaaattaattttttaaataaaagtaatgtatgtataaatataaaatatcaaatcttactaaaagacataatgaaaagcagtaataagctttgttttgaattcagctaaatgcatagcgcttctgtggaatgtattaggcgatgaaattgctgtggtatcaaagttcttatagaggctgcatttttacaggttgggctgttaagtgcagcagaaattgtgggttcttaacagaaatagcattttcaagtattaaatattaaactggttagcaattct

SEQ ID NO: 285798 - DNA, 860 bp, Homo sapiens
  misc_feature (840)..(840): n is a, c, g, or t
agtagagctggctggctgtgcccttccgtccttcattagacgtttgctcttgtcttagatgctcagatggtagtggataggcctgtgacgaaggtgctaccatcgtgagagtaagattatattctcctgccttttaaaaagatggacttcagcagaaatctttatgatattggggaacaactggacagtgaagatctggcctccctcaagttcctgagcctggactacattccgcaaaggaagcaagaacccatcaaggatgccttgatgttattccagagactccaggaaaagagaatgttggaggaaagcaatctgtccttcctgaaggagctgctcttccgaattaatagactggatttgctgattacctacctaaacactagaaaggaggagatggaaagggaacttcagacaccaggcagggctcaaatttctgcctacagggtcatgctctatcagatttcagaagaagtgagcagatcagaattgaggtcttttaagtttcttttgcaagaggaaatctccaaatgcaaactggatgatgacatgaacctgctggatattttcatagagatggagaagagggtcatcctgggagaaggaaagttggacatcctgaaaagagtctgtgcccaaatcaacaagagcctgctgaagataatcaacgactatgaagaattcagcaaagactttggacaaagtttaccaaatgaaaagcaaacctcggggatactgtctgatcatcaacaatcacaattttgcaaaagcacgggagaaagtgcccaaacttcacagcattagggacaggaatggaacacacttggatgcagggtttgngaatgtttttagctggtggc

SEQ ID NO: 285799 - DNA, 804 bp, Homo sapiens
agtagagctggctggctgtgcccttccgtccttcattagacgtttgctcttgtcttagatgctcagatggtagtggataggcctgtgacgaaggtgctaccatcgtgagagtaagattatattctcctgccttttaaaaagatggacttcagcagaaatctttatgatattggggaacaactggacagtgaagatctggcctccctcaagttcctgagcctggactacattccgcaaaggaagcaagaacccatcaaggatgccttgatgttattccagagactccaggaaaagagaatgttggaggaaagcaatctgtccttcctgaaggagctgctcttccgaattaatagactggatttgctgattacctacctaaacactagaaaggaggagatggaaagggaacttcagacaccaggcagggctcaaatttctgcctacagggtcatgctctatcagatttcagaagaagtgagcagatcagaattgaggtcttttaagtttcttttgcaagaggaaatctccaaatgcaaactggatgatgacatgaacctgctggatattttcatagagatggagaagagggtcatcctgggagaaggaaagttggacatcctgaaaagagtctgtgcccaaatcaacaagagcctgctgaagataatcaacgactatgaagaattcagcaaaggggaggagttgtgtggggtaatgacaatctcggactctccaagagaacaggatagtgaatcacaggaagaagaggaaatcctgaatatctgaagtaggcttgagagagattat

SEQ ID NO: 285800 - DNA, 539 bp, Homo sapiens
ttatactttcacttgccttaagtttaattgcatcaaagatgaatccgcagatgcgatgtcaattcgaggcagagagtattggggggcattgaagcaatggggagccaagtaacgtggagaagagtgagagacacacaggtcaggagagaaagaaaccaactctaatactgacaccgaggtttctgatggtcaaaagagttcctgaataaaccaaaagtaagttattaagctctgagacaacccatttaccaggaaagctggggtaggtcttggtttcgcaccttattgtttcaaatgactgatattttgagagaaagaactacagaactatctctgagcacagcagaggagacagttcatcagttgctttcccccacagacagtcacaatattatgtgatgtatttcagaggcgatgatattctcaccatcctgactgaagtgaactatgaagtaagcaacaaggatgacaagaaaaacatggggaaacagatgcctcagcctactttcacactaagaaaaaaacttgtcttcccttct

SEQ ID NO: 285801 - DNA, 287 bp, Homo sapiens
  misc_feature (243)..(243): n is a, c, g, or t
ggaatcccagagaaggagaagcccctgtcaaccttttattgggagtggaacacatgaggttcagctcgtgccgggcactgtacattcactgaagcagctcaaggggctcagccccgacactgacgccacactgagcaggatgcacggcccggggctcacactgtccatggaggaggtggggtcagcccgaggtgggcggatggtggcccgagacaccgagagcttggttctgggactgtggcncagctgacccgtggcacagctgcacctaagactggccctggcta

SEQ ID NO: 285802 - DNA, 2068 bp, Homo sapiens
  misc_feature (833)..(833): n is a, c, g, or t
  misc_feature (1152)..(1152): n is a, c, g, or t
gcttaggggagaattagggagggactgaatactcaagggacagatttgtggataagtagcttggagggaggagaaaccgggagggggcagatggcgtagtgctggggaggcggggacacaggggaagagagagggggaaaggaatcccctgaatattcattcccagacttcaggcctgtcagtcgcagtctcggtcgtacctcccctagttgcaaccttagctgttggcagggtgaagagatggcttccccgtctagacagcccccgccaggggggtcaggactgcttcaagggagccgggctcgttcatatggaagcctggtgcaatcggcctgctccccagtgagggaaagacgcctggagcatcagttggagcccggagacaccctggctggactagcactcaaatatggggtgacgatggaacagattaaacgtgcaaaccgcctttatactaatgactccatcttcctgaagaaaaccctctacatccccatcctgacagagcccagagacctgttcaatggtttggactctgaggaagagaaagatggagaggaaaaagtacacccaagtaacagtgaagtttggccacactcaactgagaggaagaaacaagagacaggagcaggacgtgccaatggtgaagtcctccccacacctggccaggaaacccccacgcccatccatgacctctctgcctctgatttccttaagaagcttgattcacagatcagcctgtccaagaaggctgctgctcagaagctgaaaaaaggggaaaatggggtacctggggaggatgcaggtctccacctgagctccccttggatgcngcaacgagcagtcctaggtcctgtgccgctgacccgtacctctcggacccggacactacgggaccaggaggatgaaatcttcaaactctgatgtccccagaactgactgagagaagcaagatgttgaaagagaaacttcagggggagaggagcctgaggtgaggctcaagaacatggcttatgagcctgcctccctccactccagccatcctccccagcctccttgtctgccaaaaattccttggcctggggcagttttattggcaagattagggaatgggaactggacctttcccagttcttgggctgaatctagagntgagtcctttagactcaaaaggctctttttatatccttgttgcctttcctatcctttttacctttccctggccttagaacagggaagcagagactccccctcagcttcttcctcatctccaactatgtgacataatttatttggtgctaatattgaagtaatatttatttgctatattttatttcttcccactcttagctgaaaaatggaatttctatagccctggggtgaggagaacccgggaacagtgagccagtgactgctggttctccactttccccaccttgttagccaaacatgttattgaggatgaggcaatcggtgatatagcccaccacagagaatggatgactgttggccttttctccaatctcaaagtgacagatttgggctgattctttttttttttttttttggtaccccattcctgttgaatgggctcagtcttgacaaaccaattccctgtaactttttcacaattcttgactctgagaaaaagcagcactgtagggacctgaactctccattctaccagttcacccttctgacctgttctgctcagcctgtggtgaggggaacagatggaagaaggctttccttggggtttgaagaggaagccagttgtgggagtctctttgttacaccccctcccctccagaccctctctctctatgccttcctcctcactgcatatttatttgcgatttgtagcactgatctatggtacagttgttttgtttcttaaacagaagtaggtaagggaacctcagtaataatggaaatctgcctcagtctcctgtttggaaatgatgagaggtgagataagtaatgtttatatacctcctttcttctgtgatgattataaggtatacgaagctggacagattaaacattgagccctgtgcaaaaattagta

SEQ ID NO: 285803 - DNA, 668 bp, Homo sapiens
ggccagttgcacggtggccgcccccaaattcgaggaggaaggtgcaaagtggtgggaggctgcgggtctcccggagggtgaggcgttggggaccaggcgggagcacagccgaacccctacctttcgggcggggcggacaccagccgcgcgccctcgccgggcgccgggaccggaaaatcaccgcgaagggagggacgaggaaaggcggcgggtggcttcaggacaagctgtgagatatcggtgggcgaggatgtgatgcctgaagatgtggcatctaccttgaaacagtcaaggacctgaggatgaagccagcatctgaggaagacagacagaaaggatctggatacatcatgagcctgaaaagtatcttgcatacacaactggcagcacagaatcctgacaaacctctcatcagaaatcaaccacagactctttatgctcttaccaaaatgctggctttgagaactaattatgaatgaaaattactgatgtgattttcagtctagggaagaatatcaagttaaactttatgaagtccaagacaatgggaaaagaagaggtgttcctgtccaggccctcttccagttagaaggtgatggtttccagaagtctgcacctgtatttcaattacctataatggagtttataggactaaactatattcacta

SEQ ID NO: 285804 - DNA, 734 bp, Homo sapiens
ggccagttgcacggtggccgcccccaaattcgaggaggaaggtgcaaagtggtgggaggctgcgggtctcccggagggtgaggcgttggggaccaggcgggagcacagccgaacccctacctttcgggcggggcggacaccagccgcgcgccctcgccgggcgccgggaccggaaaatcaccgcgaagggagggacgaggaaaggcggcgggtggcttcaggacaaggactttgtgattacattgggcccatccagatcatccaggatcatcttcccatctcaagattcttcacttaatcacatctgcaaaattccttttgctgtgtaaggtgacgtattcacagtttctgggtattaggatgtagacatctttgtgggtggagggaggaattatttttctacatatgctatttattttgttctatcaaaaaactcttgagggtgccgagcacggtggctcacgtctataatcctagcactttggaaggccgaggtgggcggatcatttgaggtcagtagttcgagaccagcttgtccaacatggtgagaccccagtctctactaaaaatacaaaaattagtggggtgtggtggtgcgtgcctgtaatcccagctactcgggaggctgaggtaggagaatcacttgaatccaggaggcagaggttgcagtgagctgatatcatgctactgcactctggcctgggcaacagagtgagactccatctcaaaaaaaa

SEQ ID NO: 285805 - DNA, 725 bp, Homo sapiens
ggccagttgcacggtggccgcccccaaattcgaggaggaaggtgcaaagtggtgggaggctgcgggtctcccggagggtgaggcgttggggaccaggcgggagcacagccgaacccctacctttcgggcggggcggacaccagccgcgcgccctcgccgggcgccgggaccggaaaatcaccgcgaagggagggacgaggaaaggcggcgggtggcttcaggacaaggactttgtgattacattgggcccatccagatcatccaggatcatcttcccatctcaagattcttcacttaatcacatctgcaaaattccttttgctgtctgtgagatatcggtgggcgaggatgtgatgcctgaagatgtggcatctaccttgaaacagtcaaggacctgaggatgaagccagcatctgaggaagacagacagaaaggatctggatacatcatgagcctgaaaagtatcttgcatacacaactggcagcacagaatcctgacaaacctctcatcagaaatcaaccacagactctttatgctcttaccaaaatgctggctttgagaactaattatgaatgaaaattactgatgtgattttcaggtgagagaccctattagacaaaattttggattcatttttttctcttgagtaaaacatggggaaaaaatcttagaaaaaagaaaaagaaacggaaagacggagaggaatatatgagggtggcggaag

SEQ ID NO: 285806 - DNA, 2131 bp, Homo sapiens
cggccttcctcacccaccatgtctcggcagtcctccatcaccttccagtctggcagccgcaggggcttcagcaccacctcggccatcaccccggcagctggccgctcccgcttcagctctgtctctgtggcccgctctgcagcagggagtgggggcctgggaaggatcagcagtgctggggccagctttggaagccgcagcctctacaacctggggggtgccaagcgggtctccatcaatgggtgtggcagcagctgccgaagtggctttggtggcagggccagcaacgggtttggagtcaacagtggatttggctatgggggtggagttggaggaggcttcagtggccccagcttccccgtgtgtccccctggaggcatccaagaggtcactgtcaaccagagtctcctgactcctcttcacctgcaaatcgaccccaccatccagcgggtgcgggccgaggagcgcgagcagatcaagaccctcaacaataagttcgcctccttcatcgacaaggtgaggttcttggagcagcagaacaaggtcctggagaccaagtgggccctcctgcaggagcagggctccaggactgtgaggcagaacctagagcccctctttgattcctataccagtgagctccgacggcagctggaaagcatcaccaccgagaggggcaggcttgaagctgaactgaggaacatgcaggatgttgtggaagatttcaaagtcaggtacgaagatgaaattaacaagcgcacagctgctgagaatgaatttgtagccctgaaaaaggacgtagatgctgcctatatgaacaaggtggagctggaagccaaggtcaaatctctgcccgaggagatcaacttcagccactcagtctttgatgcagagctgtcccagttgcagacccaggtcggtgacacatccgtggtgctgtccatggacaacaaccgcaacctggacctggatagtatcatcgccgaggtcaaagcacaatacgaggacattgccaaccgcagccgggccgaggctgagtcctggtaccagaccaagtacgaggagctgcaggtcaccgcaggcagacatggggatgaccttcgaaacaccaaacaagagatctctgaaatgaaccgcatgatccagaggctgagagctgagattgacagcgtcaagaagcagtgttccagcttgcaaacggccattgctgatgcagagcagcggggagaactggctctcaaggatgcacgggccaagctggtggaccttgaggaggccctgcagaaggccaagcaggacatggctcggctcctgcgtgagtaccaggagctgatgaacatcaagctggccctggacgtggagatcgccacctaccgcaagctgctggaaggcgaggagtgcaggttgagtggagagggagtttctccagttaacatttctgtggtcacctctactctttccagtggctatggaagcggcagcagcattggaggtggaaacctgggcctcggtgggggcagcggctactccttcaccaccagtggtgggcatagcctgggtgcaggcctgggaggttctggattcagtgccaccagcaaccggggcttagggggcagtggttctagcgtcaagtttgtctccaccacatcctccagccagaagagctacacgcactaagagagccccatggctccctctaccctgccttgaggcctgtttgcagtcacacctggacaccagggtcctcctccttcctctctccttgtaaggtgcacctgtgctgctgggagcctggagtactggctatacccattcccaggcctaagccagcctctccctcctgacagtgcccagactgccagcagcacccgtctgttacacatgtgaaaccaaagcctgctctctcctaaggctctcattcagcctatcttgcgaggcccgggcagctggaaagtcctcctccagctccacctccctccctccctccagatgcagaggctggggagtctctcaatgccaggttgtcacccacctgtctcatagtgtttataagtggcctgctgggagtgagtgctccctctgttccctccctggaatgtgtctattaaatgcatgtgtcacctgaaaggtgtct

SEQ ID NO: 285807 - DNA, 556 bp, Homo sapiens
gggagctgccacctcagcctggagccccttggtcccagctcgccctgaggccaggcctggcccggggggtgcagtggggcccctgcccataccctgcaggcgcaggtgcagggggaaggcacgctgaattcccgaaaaaggcctgctgagaggacaggcttccccagctctgaccacagcctgcagcccagatgacccaggacagggatgcatgaaggagcatagtcagagcagtgcccgccgcggtattgaaggtgggagtgccacctggaggccccagggacacagatgtgagtagctgggcagagggctggtggctctgcacagagcccagtgggaaaagtgacgggggtgcagaggggccgtgggaagcccccaggccgcggtgcccgggagcagatgtgcaaagtacatgatgtggctgagccacagtcctgcctgcgggaaggcctggcaggacccgcccactcacccgtgctgagaggacagcgtccgcaggttgttttctggagtgagggtcaccaccacccccacgacgttcttcatgtccttctcc

SEQ ID NO: 285808 - DNA, 807 bp, Homo sapiens
cttacagttgcagccatgttccctctcaatgatctgaaaatgtgcttctctcccccttgagtgctggctgtaggtcatggcttggcactcctaggctgcccactgcagctctggggcaatctcagtgtttatatttctttcctaactttgaggcagaagaggaagggacattagtagtggttgtagccaagggtcttttgtttgtctcctcagagttccaccacccctggagaatacagcaactgtttactgcaatcagcaatcaggatggagaattcgtgctgtgggggccaatccaggggttccctgtcatgagcagtggggagtgtgtagaacccatgagagatgggctttggtcaattaaagcttgttgaaggtgtagataagggtgttagctccttcatcagtctgagggtagcaaggacagttccactgcagaagcagtggcagagaggctttcagttgcccctggaggctctctccagggagtggctgagttgctactggctcaacagttctggtagggggggttaggtagaggtccaggcctgcaagacttgcctagtgagaagatataggaatgggaacccaggtaacagtctggccacttttccatagggctgctgcagtatgcccagggcccgctccagtctctagtagcctcagattttccagtacctggagttatcatcagtgaagcctgtgaaacagcaaagatggcagcctaccgctccctttggaagctttgccctagggaggtatgaatgaacttgttgctggcccaaacacacctgtaggaggtggctg

SEQ ID NO: 285809 - DNA, 1063 bp, Homo sapiens
cgcccccgccacttttgatttgcataatataatctctccttttcaggagatgacatttgagcaagatcttaaagaaaatcagatgccttcacctgaccactgcttggtgatcccatggcactttgtacatctctccattagctctcatctcaccagcccatcattattgtatgtgctgccttctgaagcttgcagctggctacatcagtccaatgtgaataacaaaatgaagaatatcaggatgattcgagaccaggaatactacagatgtccaacacttccacctggaatccccaaagaggcccgcttttagcctccacactggttggtgacctgacatgagagaaatgacagaaatctcagaagactggcctcatgaataatcttcagtttcaatgtaacaaagcaagccttctagaaattacctgcctctgcagttcactctgctgcttcagatgaaaattttcagagttccaccacccctggagaatacagcaactgtttactgcaatcagcaatcaggatggagaattcgtgctgtgggggccaatccaggggttccctgtcatgagcagtggggagtgtgtagaacccatgagagatgggctttggtcaattaaagcttgttgaaggtgtagataagggtgttagctccttcatcagtctgagggtagcaaggacagttccactgcagaagcagtggcagagaggctttcagttgcccctggaggctctctccagggagtggctgagttgctactggctcaacagttctggtagggggggttaggtagaggtccaggcctgcaagacttgcctagtgagaagatataggaatgggaacccaggtaacagtctggccacttttccatagggctgctgcagtatgcccagggcccgctccagtctctagtagcctcagattttccagtacctggagttatcatcagtgaagcctgtgaaacagcaaagatggcagcctaccgctccctttggaagctttgccctagggaggtatgaatgaacttgttgctggcccaaacacacctgtaggaggtggctg

SEQ ID NO: 285810 - DNA, 353 bp, Homo sapiens
tagactccatctaaaaaaaacaaacaaataaacagagaagtgtaaaaagcagacgtggcctcaaggaagggactacatggccctacccttcaataggcagtcctgaggatcacagatcagtgtggtaaatgacatccattctctgactgtcagtcagagaaaggctatgttagccaacaggctttgtctaacgagacagggaagggggtgttatatatttaaaaggcttctgtgtaaaatggactacaaacattttaaagtgtcagagtaagtgtcatatatgtagatgccctattgcctccaatcaccagacttctaagcatagtcaaggtgaagtgagagttgcatgcata

SEQ ID NO: 285811 - DNA, 504 bp, Homo sapiens
tgctcctagcattaactacgtcgttaaacccttctgaatttatttcgtctgtgaaatggggaaaagatagccaccttgcataactggtgaagaattcgtaaactgacagcagaatctagtaagaggactggcccgtggtcggctcttaatggtgtcacagaataaagaaaaagactgggagagagatgggagagagatggtcagaggagaccaaagactgaaactgaagactaaaccatggaaattgggaacaagcacttactcgcttagagggtgaaaaaagtgaatttgcctacagggccaatttggaagcacctctccctggaagccagtcaatgaagagccattggaggattttaaataaggaaccgaaaaatggagtctgaaaatagaggcgcagagaccggtcaaccacaatgaagaacaagccattttgacctccatcctggctcatctcctctgtgttctcatagcatcatattatagaatggatcacaaaaaaat

SEQ ID NO: 285812 - DNA, 427 bp, Homo sapiens
aaatggaccccaggtggcctgcagtgccaagctgtttccctgccagcctcccagtctggccctgactctccaatgtgtcacagaataaagaaaaagactgggagagagatgggagagagatggtcagaggagaccaaagactgaaactgaagactaaaccatggaaattgggaacaagcacttactcgcttagagggtgaaaaaagtgaatttgcctacagggccaatttggaagcacctctccctggaagccagtcaatgaagagccattggaggattttaaataaggaaccgaaaaatggagtctgaaaatagaggcgcagagaccggtcaaccacaatgaagaacaagccattttgacctccatcctggctcatctcctctgtgttctcatagcatcatattatagaatggatcacaaaaaaat

SEQ ID NO: 285813 - DNA, 379 bp, Homo sapiens
atgacagcagaagctgccaggcatggtggtgagcacacagcaggccctcactaaaagtggagtccaaaccccacacctcagcaaagctggtttaggaacactccagggaatttctcaacatttttcctgtaagtcaatgaagagccattggaggattttaaataaggaaccgaaaaatggagtctgaaaatagaggcgcagagaccgtcaatgaagagccattggaggattttaaataaggaaccgaaaaatggagtctgaaaatagaggcgcagagaccggtcaaccacaatgaagaacaagccattttgacctccatcctggctcatctcctctgtgttctcatagcatcatattatagaatggatcacaaaaaaat

SEQ ID NO: 285814 - DNA, 246 bp, Homo sapiens
aaatggaccccaggtggcctgcagtgccaagctgtttccctgccagcctcccagtctggccctgactctccaattcaatgaagagccattggaggattttaaataaggaaccgaaaaatggagtctgaaaatagaggcgcagagaccggtcaaccacaatgaagaacaagccattttgacctccatcctggctcatctcctctgtgttctcatagcatcatattatagaatggatcacaaaaaaat

SEQ ID NO: 285815 - DNA, 1289 bp, Homo sapiens
ctttaaggccggcggttttcgcagccagcccggggcggggaaagcggagcgcgcgctccacgcgggaccgcctcccgggccgtaagtaccggcgtggcggcgcctcagcccggcctgggcgagccctgggtgctccgccgggcagctcacggcgccccgtatggcctggggatcctaagaggccctgtgacccccctcgcctggtctccctctcacccctggagggttgccgcagctccggggcccccgggcaggaagggcgcactggtcgtcccgggagaggggtctgagcagagggcggggtgcaggcggaatggccctcgtgccctatgaggagaccacggaatttgggttgcagaaattccacaagcctcttgcaactttttcctttgcaaaccacacgatccagatccggcaggactggagacacctgggagtcgcagcggtggtttgggatgcggccatcgttctttccacatacctggagatgggagctgtggagctcaggggccgctctgccgtggagctgggtgctggcacggggctggtgggcatagtggctgccctgctgggtgctcatgtgactatcacggatcgaaaagtagcattagaatttcttaaatcaaacgttcaagccaacttacctcctcatatccaaactaaaactgttgttaaggagctgacttggggacaaaatttggggagtttttctcctggagaatttgacctgatacttggtgctgatatcatatatttagaagaaacattcacagatcttcttcaaacactggaacatctctgtagcaatcactctgtgattcttttagcatgccgaattcgctatgaacgggataacaacttcttagcaatgctggagaggcaatttattgtgagaaaggttcactacgatcctgaaaaagatgtacatatttacgaagcacagaagagaaaccagaaggaggacttataattggctataatttataagaatgttgtcattgagtgtgtcacttaaggtcttagactgcaaatctaaccatatttaatgaaatgtcttactgtacaaaaagtctaagccaaaggttctcaggggagaaagcacatgtgcagttttaaaacaaagcagtgctttgtcccattgctgtgatttttagtcagactttactcagtctgaaatgcaattaacattaaaggattaagtgtgagatttcgatttatgctatttgtgtatcccatactcctcccttttaataaacagtttccactgatgatatgaagggccggtataa

SEQ ID NO: 285816 - DNA, 1135 bp, Homo sapiens
acttccagggtcggggagacggaactgcggcgaccatgtatttctggtttatcaaaccgctaacacccagtctaagggcaggttctgtcccattgttatcactatcgaagcagccgatggaggaggggaggtctgagcagagggcggggtgcaggcggaatggccctcgtgccctatgaggagaccacggaatttgggttgcagaaattccacaagcctcttgcaactttttcctttgcaaaccacacgatccagatccggcaggactggagacacctgggagtcgcagcggtggtttgggatgcggccatcgttctttccacatacctggagatgggagctgtggagctcaggggccgctctgccgtggagctgggtgctggcacggggctggtgggcatagtggctgccctgctgggtgctcatgtgactatcacggatcgaaaagtagcattagaatttcttaaatcaaacgttcaagccaacttacctcctcatatccaaactaaaactgttgttaaggagctgacttggggacaaaatttggggagtttttctcctggagaatttgacctgatacttggtgctgatatcatatatttagaagaaacattcacagatcttcttcaaacactggaacatctctgtagcaatcactctgtgattcttttagcatgccgaattcgctatgaacgggataacaacttcttagcaatgctggagaggcaatttattgtgagaaaggttcactacgatcctgaaaaagatgtacatatttacgaagcacagaagagaaaccagaaggaggacttataattggctataatttataagaatgttgtcattgagtgtgtcacttaaggtcttagactgcaaatctaaccatatttaatgaaatgtcttactgtacaaaaagtctaagccaaaggttctcaggggagaaagcacatgtgcagttttaaaacaaagcagtgctttgtcccattgctgtgatttttagtcagactttactcagtctgaaatgcaattaacattaaaggattaagtgtgagatttcgatttatgctatttgtgtatcccatactcctcccttttaataaacagtttccactgatgatatgaagggccggtataa

SEQ ID NO: 285817 - DNA, 1080 bp, Homo sapiens
acttccagggtcggggagacggaactgcggcgaccatgtatttctggtttatcaaaccgctaacacccagtctaagggcaggttctgtcccattgttatcactatcgaagcagccgatggaggaggggaggtctgagcagagggcggggtgcaggcggaatggccctcgtgccctatgaggagaccacggaatttgggttgcagaaattccacaagcctcttgcaactttttcctttgcaaaccacacgatccagatccggcaggactggagacacctgggagtcgcagcggtggtttgggatgcggccatcgttctttccacatacctggagatgggagctgtggagctcaggggccgctctgccgtggagctgggtgctggcacggggctggtgggcatagtggctgccctgctgggtgctcatgtgactatcacggatcgaaaagtagcattagaatttcttaaatcaaacgttcaagccaacttacctcctcatatccaaactaaaactgttgttaaggagctgacttggggaccatatatttagaagaaacattcacagatcttcttcaaacactggaacatctctgtagcaatcactctgtgattcttttagcatgccgaattcgctatgaacgggataacaacttcttagcaatgctggagaggcaatttattgtgagaaaggttcactacgatcctgaaaaagatgtacatatttacgaagcacagaagagaaaccagaaggaggacttataattggctataatttataagaatgttgtcattgagtgtgtcacttaaggtcttagactgcaaatctaaccatatttaatgaaatgtcttactgtacaaaaagtctaagccaaaggttctcaggggagaaagcacatgtgcagttttaaaacaaagcagtgctttgtcccattgctgtgatttttagtcagactttactcagtctgaaatgcaattaacattaaaggattaagtgtgagatttcgatttatgctatttgtgtatcccatactcctcccttttaataaacagtttccactgatgatatgaagggccggtataa

SEQ ID NO: 285818 - DNA, 570 bp, Homo sapiens
tttaatagaaaattatttcatagtgacacataatcactatacgacagtaagtataatcggtacattgacttttgagggatattctaaaagaaaacagatcactactcttcaaaagttacaaggccatcaaagacaaggaaacaaactttcacagactgaaggagactataattaaatgcgatatggtacccaaactggattatgaagagttcattcccactccactgactttgggcttgtccttgcctgtgctgtggctaacagatcacgagtagatgtaacgttcaccaaaatcaagcaaatgctttcaaaagcattgcccttttctcaaagacgtgctgctctatctagcccaggatcctagacccagatgggcacatgaaggagagccacagcaactgacctgcagctgccaaaatgtaacagaagtgaggaagaaattttaagacactgagattcgtggttgttactgtagcaacacaaattaacagaagagctgtctacactttcttttagaatgtttaccacttaccttcatcttgaaataaatggcaatttggatagtgatga

SEQ ID NO: 285819 - DNA, 659 bp, Homo sapiens
ttagaatttttcaaattttttaccctatccattttctaagaatctgcctatttatatccctcaactcattagtcttctgacattatttgttaaaatgtttgctactttatcttttactttcctaaatagggggtttatagttttatatggtcaaatccatttaaccttttcctttgttacttctgcctttagggaatctgcttttaaaatccccctacaatgtaaagttacataaaggcaaaggtgatagattgtattactttcacaatttttcactctccacttcctgtaggaagagttcattcccactccactgactttgggcttgtccttgcctgtgctgtggctaacagatcacgagtagatgtaacgttcaccaaaatcaagcaaatgctttcaaaagcattgcccttttctcaaagacgtgctgctctatctagcccaggatcctagacccagatgggcacatgaaggagagccacagcaactgacctgcagctgccaaaatgtaacagaagtgaggaagaaattttaagacactgagattcgtggttgttactgtagcaacacaaattaacagaagagctgtctacactttcttttagaatgtttaccacttaccttcatcttgaaataaatggcaatttggatagtgatga

SEQ ID NO: 285820 - DNA, 1309 bp, Homo sapiens
tcttcttccccaaacacatccgttgacacaaattccgagccaaatctcactcagattcggaagagccatgcaaaagaaattggacaaaggcttcctccacctgtttctttttttcttttgaacttgtaaacgaccttaaaagcatttggagttagttaagaacagataatgtatcttttggccagagcgtcacccaggattcttttgcacggcaggtctgagcagagggcggggtgcaggcggaatggccctcgtgccctatgaggagaccacggaatttgggttgcagaaattccacaagcctcttgcaactttttcctttgcaaaccacacgatccagatccggcaggactggagacacctgggagtcgcagcggtggtttgggatgcggccatcgttctttccacatacctggagatgggagctgtggagctcaggggccgctctgccgtggagctgggtgctggcacggggctggtgggcatagtggctgccctgctgggaggtggaatttaattctcctccccttgaatatgggctggacaaagagaaaaatggtagctcaacagtggagacacctggacagcactttaaccaagtgatcaaagttaatatcgccaattatgtatgtgctcccggatgtgatgttatgagaaaggcacactatacctctgtggaattcctccccaaaacctattatctcaatctatccatagaaaacactggacaaatgcaaactgagggatattctaaaagaaaacagatcactactcttcaaaagttacaaggccatcaaagacaaggaaacaaactttcacagactgaaggagactataattaaatgcgatatggtacccaaactggattatgtaagtaaaaaaactggggaaataaaatgtataattcagttaatggtattataccaatgtacttttatttttgataaatgtaccctggttatgtaatatactaagattagagaaagctggatgaagggtatccggaactctgtatttttacaactcctttgtaagtttaaaattacttaaaaatatattaaaaatgtatatttacctttgtactggtttgagtaaaaaaactgactttagaatgttaacattttagatggtgaaattagaagtaattcaatttttaggtaatgtttcttaatttacttataatgaacatgttttacttgtgtaataataaatttaaaaaacctgatagtaatgtaaatactctttggtaacctgcttttgtccgagaacatcttcccatcttaataaaaatacacctttatttactctt

SEQ ID NO: 285821 - DNA, 1092 bp, Homo sapiens
ctttaaggccggcggttttcgcagccagcccggggcggggaaagcggagcgcgcgctccacgcgggaccgcctcccgggccgtaagtaccggcgtggcggcgcctcagcccggcctgggcgagccctgggtgctccgccgggcagctcacggcgccccgtatggcctggggatcctaagaggccctgtgacccccctcgcctggtctccctctcacccctggagggttgccgcagctccggggcccccgggcaggaagggcgcactggtcgtcccgggagaggggtctgagcagagggcggggtgcaggcggaatggccctcgtgccctatgaggagaccacggaatttgggttgcagaaattccacaagcctcttgcaactttttcctttgcaaaccacacgatccagatccggcaggactggagacacctgggagtcgcagcggtggtttgggatgcggccatcgttctttccacatacctggagatgggagctgtggagctcaggggccgctctgccgtggagctgggtgctggcacggggctggtgggcatagtggctgccctgctggaaaacactggacaaatgcaaactgagggatattctaaaagaaaacagatcactactcttcaaaagttacaaggccatcaaagacaaggaaacaaactttcacagactgaaggagactataattaaatgcgatatggtacccaaactggattatgaagagttcattcccactccactgactttgggcttgtccttgcctgtgctgtggctaacagatcacgagtagatgtaacgttcaccaaaatcaagcaaatgctttcaaaagcattgcccttttctcaaagacgtgctgctctatctagcccaggatcctagacccagatgggcacatgaaggagagccacagcaactgacctgcagctgccaaaatgtaacagaagtgaggaagaaattttaagacactgagattcgtggttgttactgtagcaacacaaattaacagaagagctgtctacactttcttttagaatgtttaccacttaccttcatcttgaaataaatggcaatttggatagtgatga

SEQ ID NO: 285822 - DNA, 1038 bp, Homo sapiens
ctttaaggccggcggttttcgcagccagcccggggcggggaaagcggagcgcgcgctccacgcgggaccgcctcccgggccgtaagtaccggcgtggcggcgcctcagcccggcctgggcgagccctgggtgctccgccgggcagctcacggcgccccgtatggcctggggatcctaagaggccctgtgacccccctcgcctggtctccctctcacccctggagggttgccgcagctccggggcccccgggcaggaagggcgcactggtcgtcccgggagaggggtctgagcagagggcggggtgcaggcggaatggccctcgtgccctatgaggagaccacggaatttgggttgcagaaattccacaagcctcttgcaactttttcctttgcaaaccacacgatccagatccggcaggactggagacacctgggagtcgcagcggtggtttgggatgcggccatcgttctttccacatacctggagatgggagctgtggagctcaggggccgctctgccgtggagctgggtgctggcacggggctggtgggcatagtggctgccctgctggaaaacactggacaaatgcaaactgagggatattctaaaagaaaacagatcactactcttcactataattaaatgcgatatggtacccaaactggattatgaagagttcattcccactccactgactttgggcttgtccttgcctgtgctgtggctaacagatcacgagtagatgtaacgttcaccaaaatcaagcaaatgctttcaaaagcattgcccttttctcaaagacgtgctgctctatctagcccaggatcctagacccagatgggcacatgaaggagagccacagcaactgacctgcagctgccaaaatgtaacagaagtgaggaagaaattttaagacactgagattcgtggttgttactgtagcaacacaaattaacagaagagctgtctacactttcttttagaatgtttaccacttaccttcatcttgaaataaatggcaatttggatagtgatga

SEQ ID NO: 285823 - DNA, 686 bp, Homo sapiens
aataaataacaatagtattggattataactcccaaagtatgtgtctgtattgataaaataaataatgtggagaagaaacaaatcttgtttatagaattcagttgttaaatatattagaagggatggagatatacaaaattcccattagaatagcaaatagtaataattactgtagacaagatttactgatgaattctaaaactggtgggcaaaactttaaagagaaaagaatatatctgcatagcctccaagtacttcttctaaaatacacctaattactgtggtggttttaacatatgaccacaaatttctttcatattctcccttttaggaggtggaatttaattctcctccccttgaatatgggctggacaaagagaaaaatggtagctcaacagtggagacacctggacagcactttaaccaagtgatcaaagttaatatcgccaattatgtatgtgctcccggatgtgatgttatgagaaaggcacactatacctctgtggaattcctccccaaaacctattatctcaatctatccatagaaaacactggacaaatgcaaactgagggatattctaaaagaaaacagatcactactcttcaaaagttacaaggccatcaaagacaaggaaacaaactttcacagactgaaggagactataattaaatgcgatatggtaccc

SEQ ID NO: 285824 - DNA, 1378 bp, Homo sapiens
ctttaaggccggcggttttcgcagccagcccggggcggggaaagcggagcgcgcgctccacgcgggaccgcctcccgggccgtaagtaccggcgtggcggcgcctcagcccggcctgggcgagccctgggtgctccgccgggcagctcacggcgccccgtatggcctggggatcctaagaggccctgtgacccccctcgcctggtctccctctcacccctggagggttgccgcagctccggggcccccgggcaggaagggcgcactggtcgtcccgggagaggggtctgagcagagggcggggtgcaggcggaatggccctcgtgccctatgaggagaccacggaatttgggttgcagaaattccacaagcctcttgcaactttttcctttgcaaaccacacgatccagatccggcaggactggagacacctgggagtcgcagcggtggtttgggatgcggccatcgttctttccacatacctggagatgggagctgtggagctcaggggccgctctgccgtggagctgggtgctggcacggggctggtgggcatagtggctgccctgctgggaggtggaatttaattctcctccccttgaatatgggctggacaaagagaaaaatggtagctcaacagtggagacacctggacagcactttaaccaagtgatcaaagttaatatcgccaattatgtatgtgctcccggatgtgatgttatgagaaaggcacactatacctctgtggaattcctccccaaaacctattatctcaatctatccatagaaaacactggacaaatgcaaactgagggatattctaaaagaaaacagatcactactcttcaaaagttacaaggccatcaaagacaaggaaacaaactttcacagactgaaggagactataattaaatgcgatatggtacccaaactggattatgtaagtaaaaaaactggggaaataaaatgtataattcagttaatggtattataccaatgtacttttatttttgataaatgtaccctggttatgtaatatactaagattagagaaagctggatgaagggtatccggaactctgtatttttacaactcctttgtaagtttaaaattacttaaaaatatattaaaaatgtatatttacctttgtactggtttgagtaaaaaaactgactttagaatgttaacattttagatggtgaaattagaagtaattcaatttttaggtaatgtttcttaatttacttataatgaacatgttttacttgtgtaataataaatttaaaaaacctgatagtaatgtaaatactctttggtaacctgcttttgtccgagaacatcttcccatcttaataaaaatacacctttatttactctt

SEQ ID NO: 285825 - DNA, 1086 bp, Homo sapiens
ctttaaggccggcggttttcgcagccagcccggggcggggaaagcggagcgcgcgctccacgcgggaccgcctcccgggccgtctgagcagagggcggggtgcaggcggaatggccctcgtgccctatgaggagaccacggaatttgggttgcagaaattccacaagcctcttgcaactttttcctttgcaaaccacacgatccagatccggcaggactggagacacctgggagtcgcagcggtggtttgggatgcggccatcgttctttccacatacctggagatgggagctgtggagctcaggggccgctctgccgtggagctgggtgctggcacggggctggtgggcatagtggctgccctgctgggtgctcatgtgactatcacggatcgaaaagtagcattagaatttcttaaatcaaacgttcaagccaacttacctcctcatatccaaactaaaactgttgttaaggagctgacttggggacaaaatttggggagtttttctcctggagaatttgacctgatacttggtgctgatatcatatatttagaagaaacattcacagatcttcttcaaacactggaacatctctgtagcaatcactctgtgattcttttagcatgccgaattcgctatgaacgggataacaacttcttagcaatgctggagaggcaatttattgtgagaaaggttcactacgatcctgaaaaagatgtacatatttacgaagcacagaagagaaaccagaaggaggacttataattggctataatttataagaatgttgtcattgagtgtgtcacttaaggtcttagactgcaaatctaaccatatttaatgaaatgtcttactgtacaaaaagtctaagccaaaggttctcaggggagaaagcacatgtgcagttttaaaacaaagcagtgctttgtcccattgctgtgatttttagtcagactttactcagtctgaaatgcaattaacattaaaggattaagtgtgagatttcgatttatgctatttgtgtatcccatactcctcccttttaataaacagtttccactgatgatatgaagggccggtataa

SEQ ID NO: 285826 - DNA, 1220 bp, Homo sapiens
tcttcttccccaaacacatccgttgacacaaattccgagccaaatctcactcagattcggaagagccatgcaaaagaaattggacaaaggcttcctccacctgtttctttttttcttttgaacttgtaaacgaccttaaaagcatttggagttagttaagaacagataatgtatcttttggccagagcgtcacccaggattcttttgcacggcaggtctgagcagagggcggggtgcaggcggaatggccctcgtgccctatgaggagaccacggaatttgggttgcagaaattccacaagcctcttgcaactttttcctttgcaaaccacacgatccagatccggcaggactggagacacctgggagtcgcagcggtggtttgggatgcggccatcgttctttccacatacctggagatgggagctgtggagctcaggggccgctctgccgtggagctgggtgctggcacggggctggtgggcatagtggctgccctgctgggtgctcatgtgactatcacggatcgaaaagtagcattagaatttcttaaatcaaacgttcaagccaacttacctcctcatatccaaactaaaactgttgttaaggagctgacttggggacaaaatttggggagtttttctcctggagaatttgacctgatacttggtgctgatatcatatatttagaagaaacattcacagatcttcttcaaacactggaacatctctgtagcaatcactctgtgattcttttagcatgccgaattcgctatgaacgggataacaacttcttagcaatgctggagaggcaatttattgtgagaaaggttcactacgatcctgaaaaagatgtacatatttacgaagcacagaagagaaaccagaaggaggacttataattggctataatttataagaatgttgtcattgagtgtgtcacttaaggtcttagactgcaaatctaaccatatttaatgaaatgtcttactgtacaaaaagtctaagccaaaggttctcaggggagaaagcacatgtgcagttttaaaacaaagcagtgctttgtcccattgctgtgatttttagtcagactttactcagtctgaaatgcaattaacattaaaggattaagtgtgagatttcgatttatgctatttgtgtatcccatactcctcccttttaataaacagtttccactgatgatatgaagggccggtataa

SEQ ID NO: 285827 - DNA, 1109 bp, Homo sapiens
tcttcttccccaaacacatccgttgacacaaattccgagccaaatctcactcagattcggaagagccatgcaaaagaaattggacaaaggcttcctccacctgtttctttttttcttttgaacttgtaaacgaccttaaaagcatttggagttagttaagaacagataatgtatcttttggccagagcgtcacccaggattcttttgcacggcaggtctgagcagagggcggggtgcaggcggaatggccctcgtgccctatgaggagaccacggaatttgggttgcagaaattccacaagcctcttgcaactttttcctttgcaaaccacacgatccagatccggcaggactggagacacctgggagtcgcagcggtggtttgggatgcggccatcgttctttccacatacctggagatgggagctgtggagctcaggggccgctctgccgtggagctgggtgctggcacggggctggtgggcatagtggctgccctgctgggttgtggccaagccagtccattttccaccttaacaggtgaaaatttaaatcccaaattaatctgatttgtggcagtaaaggtccttaagtgcttttagctcctcaaaaaaagaaggcaaggaaaagacaagaaagaaagaaaaaccacaacggaaagaacaaagaaacaggaaaaagaaaaaagaagaagaaagaaacgaagagaggcagaacgagaaagagaacgcacgaagaagagacagaagagagcagaaaagcaagtgagggcgggggcggggcgcggacacgagatcctgcgcgcaaggggggcacgaaccacagggcggacgggcggcagcgacaagaacccagagcccgtcggaacaggagcaacggcgggcgctccgcacagaggcaaaaggagcagaggggacaggacgacaaaacagcagaaagacgcggcgagcggcggcgcgagcaggtaggaacaaaagaaaacgagagggcggagagggaaccaacaacaccgacagcgagaggcgagcggagtcgagtcgagaaacaaagagaaacaacactagagaggggaggagaaacagaacaaggacgagaccaaacagaaaaggg

SEQ ID NO: 285828 - DNA, 2392 bp, Homo sapiens
tgagccgctgagaggctgagtggagttcactcacatggattgaggcccagttcctgggagaagagatgctgggcaggaaggtgtctgcatgtgggactctgtacagcccggtcctctcccacatctgggaggggccagagtcagacaactgctgggttcgtccctaagagaggtcatctgactggctgttcagcctaggctgcacacacccccactttcctctaccaggccacaccggaggcagtgctcacacaggcaagctaccaggccacaacaacgacacccacctcacctctggcacctctgagcatccacgtacttgcaagaactcttgctcacatcagctaagagattgcacctgctgacctagagattccggcctgtgctcctgtgctgctgagcagggcaaccagtagcaccatgtctgtgactggcgggaagatggcaccgtccctcacccaggagatcctcagccacctgggcctggccagcaagactgcagcgtgggggaccctgggcaccctcaggaccttcttgaacttcagcgtggacaaggatgcgcagaggctactgagggccattactggccaaggcgtggaccgcagtgccattgtggacgtgctgaccaaccggagcagagagcaaaggcagctcatctcacgaaacttccaggagcgcacccaacaggacctgatgaagtctctacaggcagcactttccggcaacctggagaggattgtgatggctctgctgcagcccacagcccagtttgacgcccaggaattgaggacagctctgaaggcctcagattctgctgtggacgtggccattgaaattcttgccactcgaaccccaccccagctgcaggagtgcctggcagtctacaaacacaatttccaggtggaggctgtggatggcatcacatctgagaccagtggcatcttgcaggacctgctgttggccctggccaaggggggccgtgacagctactctggaatcattgactataatctggcagaacaagatgtccaggcactgcagcgggcagaaggacctagcagagaggaaacatgggtcccagtcttcacccagcgaaatcctgaacacctcatccgagtgtttgatcagtaccagcggagcactgggcaagagctggaggaggctgtccagaaccgtttccatggagatgctcaggtggctctgctcggcctagcttcggtgatcaagaacacaccgctgtactttgctgacaaacttcatcaagccctccaggaaactgagcccaattaccaagtcctgattcgcatccttatctctcgatgtgagactgaccttctgagtatcagagctgagttcaggaagaaatttgggaagtccctctactcttctctccaggatgcagtgaaaggggattgccagtcagccctcctggccttgtgcagggctgaagacatgtgagacttccctgccccaccccacatgacatccgaggatctgagatttccgtgtttggctgaacctgggagaccagctgggcctccaagtaggataacccctcactgagcaccacattctctagcttcttgttgaggctggaactgtttctttaaaatcccttaattttcccatctcaaaattatatctgtacctgggtcatccagctccttcttgggtgtggggaaatgagttttctttgatagtttctgcctcactcatccctcctgtaccctggccagaacatctcactgatactcgaattcttttggcaaacttcgctgttgtttgtgttccctgattgaaggttgggtggagcaggacatggaccgggaagaggcactggagttggaggtgcctttgatgtgcacttggctattccgcaggaatcctgttttgccttagtgctacagtaatccacacccaggtctcccactccaggtctcccctcaccctcattctccaggaaacttcaggcaaaataattgagaaacaggcattagaacaaggtgagaaatagagggagcaaaggaccatctgtatgaactgggaagcaagcggagggccaagctaccctccccagcatgggaattcttgggttagtggagagcacaaccctcaaattcatgtgtccaagcagagatttggaaacccacctcccaggagagcactatttcccatagaaaacaaaaacaaaaacagaaacaaaaacaaaaagtcaggctttggttccccctgcaggctatattagaaatgacaggtagctgggcgcagtggctcacgcctgtaattccagcacttcgggaggccaaggcaggcggatcacttgaggtcaggaattcaagactagcctgaccaaagtgaccttatgcttagtcatggtgctaaagtggttgtt

SEQ ID NO: 285829 - DNA, 1793 bp, Homo sapiens
tgagccgctgagaggctgagtggagttcactcacatggattgaggcccagttcctgggagaagagatgctgggcaggaaggtgtctgcatgtgggactctgtacagcccggtcctctcccacatctgggaggggccagagtcagacaactgctgggttcgtccctaagagaggtcatctgactggctgttcagcctaggctgcacacacccccactttcctctaccaggccacaccggaggcagtgctcacacaggcaagctaccaggccacaacaacgacacccacctcacctctggcacctctgagcatccacgtacttgcaagaactcttgctcacatcagctaagagattgcacctgctgacctagagattccggcctgtgctcctgtgctgctgagcagggcaaccagtagcaccatgtctgtgactggcgggaagatggcaccgtccctcacccaggagatcctcagccacctgggcctggccagcaagactgcagcgtgggggaccctgggcaccctcaggaccttcttgaacttcagcgtggacaaggatgcgcagaggctactgagggccattactggccaaggcgtggaccgcagtgccattgtggacgtgctgaccaaccggagcagagagcaaaggcagctcatctcacgaaacttccaggagcgcacccaacaggacctgatgaagtctctacaggcagcactttccggcaacctggagaggattgtgatggctctgctgcagcccacagcccagtttgacgcccaggaattgaggacagctctgaaggcctcagattctgctgtggacgtggccattgaaattcttgccactcgaaccccaccccagctgcaggagtgcctggcagtctacaaacacaatttccaggtggaggctgtggatggcatcacatctgagaccagtggcatcttgcaggacctgctgttggccctggccaaggggggccgtgacagctactctggaatcattgactataatctggcagaacaagatgtccaggcactgcagcgggcagaaggacctagcagagaggaaacatgggtcccagtcttcacccagcgaaatcctgaacacctcatccgagtgtttgatcagtaccagcggagcactgggcaagagctggaggaggctgtccagaaccgtttccatggagatgctcaggtggctctgctcggcctagcttcggtgatcaagaacacaccgctgtactttgctgacaaacttcatcaagccctccaggaaactgagcccaattaccaagtcctgattcgcatccttatctctcgatgtgagactgaccttctgagtatcagagctgagttcaggaagaaatttgggaagtccctctactcttctctccaggatgcagtgaaaggggattgccagtcagccctcctggccttgtgcagggctgaagacatgtgagacttccctgccccaccccacatgacatccgaggatctgagatttccgtgtttggctgaacctgggagaccagctgggcctccaagtaggataacccctcactgagcaccacattctctagcttcttgttgaggctggaactgtttctttaaaatcccttaattttcccatctcaaaattatatctgtacctgggtcatccagctccttcttgggtgtggggaaatgagttttctttgatagtttctgcctcactcatccctcctgtaccctggccagaacatctcactgatactcgaattcttttggcaaaaaaaagtatttaaaaaaaaagaa

SEQ ID NO: 285830 - DNA, 2368 bp, Homo sapiens
  misc_feature (2346)..(2346): n is a, c, g, or t
tgagccgctgagaggctgagtggagttcactcacatggattgaggcccagttcctgggagaagagatgctgggcaggaaggtgtctgcatgtgggactctgtacagcccggtcctctcccacatctgggaggggccagagtcagacaactgctgggttcgtccctaagagaggtcatctgactggctgttcagcctaggctgcacacacccccactttcctctaccaggccacaccggaggcagtgctcacacaggcaagctaccaggccacaacaacgacacccacctcacctctggcacctctgagcatccacgtacttgcaagaactcttgctcacatcagctaagagattgcacctgctgacctagagattccggcctgtgctcctgtgctgctgagcagggcaaccagtagcaccatgtctgtgactggcgggaagatggcaccgtccctcacccaggagatcctcagccacctgggcctggccagcaagactgcagcgtgggggaccctgggcaccctcaggaccttcttgaacttcagcgtggacaaggatgcgcagaggctactgagggccattactggccaaggcgtggaccgcagtgccattgtggacgtgctgaccaaccggagcagagagcaaaggcagctcatctcacgaaacttccaggagcgcacccaacaggacctgatgaagtctctacaggcagcactttccggcaacctggagaggattgtgatggctctgctgcagcccacagcccagtttgacgcccaggaattgaggacagctctgaaggcctcagattctgctgtggacgtggccattgaaattcttgccactcgaaccccaccccagctgcaggagtgcctggcagtctacaaacacaatttccaggtggaggctgtggatggcatcacatctgagaccagtggcatcttgcaggacctgctgttggccctggccaaggggggccgtgacagctactctggaatcattgactataatctggcagaacaagatgtccaggcactgcagcgggcagaaggacctagcagagaggaaacatgggtcccagtcttcacccagcgaaatcctgaacacctcatccgagtgtttgatcagtaccagcggagcactgggcaagagctggaggaggctgtccagaaccgtttccatggagatgctcaggtggctctgctcggcctagcttcggtgatcaagaacacaccgctgtactttgctgacaaacttcatcaagccctccaggaaactgagcccaattaccaagtcctgattcgcatccttatctctcgatgtgagactgaccttctgagtatcagagctgagttcaggaagaaatttgggaagtccctctactcttctctccaggatgcagtgaaaggggattgccagtcagccctcctggccttgtgcagggctgaagacatgtgagacttccctgccccaccccacatgacatccgaggatctgagatttccgtgtttggctgaacctgggagaccagctgggcctccaagtaggataacccctcactgagcaccacattctctagcttcttgttgaggctggaactgtttctttaaaatcccttaattttcccatctcaaaattatatctgtacctgggtcatccagctccttcttgggtgtggggaaatgagttttctttgatagtttctgcctcactcatccctcctgtaccctggccagaacatctcactgatactcgaattcttttggcaaacttcgctgttgtttgtgttccctgattgaaggttgggtggagcaggacatggaccgggaagaggcactggagttggaggtgcctttgatgtgcacttggctattccgcaggaatcctgttttgccttagtgctacagtaatccacacccaggtctcccactccaggtctcccctcaccctcattctccaggaaacttcaggcaaaataattgagaaacaggcattagaacaaggtgagaaatagagggagcaaaggaccatctgtatgaactgggaagcaagcggagggccaagctaccctccccagcatgggaattcttgggttagtggagagcacaaccctcaaattcatgtgtccaagcagagatttggaaacccacctcccaggagagcactatttcccatagaaaacaaaaacaaaaacagaaacaaaaacaaaaagtcaggctttggttccccctgcaggctatattagaaatgacaggtagctgggcgcagtggctcacgcctgtaattccagcacttcgggaggccaaggcaggcggatcacttcgagcgcctggtcgacgatatccntacacccggggcgaccaactgg

SEQ ID NO: 285831 - DNA, 2215 bp, Homo sapiens
tgagccgctgagaggctgagtggagttcactcacatggattgaggcccagttcctgggagaagagatgctgggcaggaaggtgtctgcatgtgggactctgtacagcccggtcctctcccacatctgggaggggccagagtcagacaactgctgggttcgtccctaagagaggtcatctgactggctgttcagcctaggctgcacacacccccactttcctctaccaggccacaccggaggcagtgctcacacaggcaagctaccaggccacaacaacgacacccacctcacctctggcacctctgagcatccacgtacttgcaagaactcttgctcacatcagctaagagattgcacctgctgacctagagattccggcctgtgctcctgtgctgctgagcagggcaaccagtagcaccatgtctgtgactggcgggaagatggcaccgtccctcacccaggagatcctcagccacctgggcctggccagcaagactgcagcgtgggggaccctgggcaccctcaggaccttcttgaacttcagcgtggacaaggatgcgcagaggctactgagggccattactggccaaggcgtggaccgcagtgccattgtggacgtgctgaccaaccggagcagagagcaaaggcagctcatctcacgaaacttccaggagcgcacccaacaggacctgatgaagtctctacaggcagcactttccggcaacctggagaggattgtgatggctctgctgcagcccacagcccagtttgacgcccaggaattgaggacagctctgaaggcctcagattctgctgtggacgtggccattgaaattcttgccactcgaaccccaccccagctgcaggagtgcctggcagtctacaaacacaatttccaggtggaggctgtggatggcatcacatctgagaccagtggcatcttgcaggacctgctgttggccctggccaaggggggccgtgacagctactctggaatcattgactataatctggcagaacaagatgtccaggcactgcagcgggcagaaggacctagcagagaggaaacatgggtcccagtcttcacccagcgaaatcctgaacacctcatccgagtgtttgatcagtaccagcggagcactgggcaagagctggaggaggctgtccagaaccgtttccatggagatgctcaggtggctctgctcggcctagcttcggtgatcaagaacacaccgctgtactttgctgacaaacttcatcaagccctccaggatgcagtgaaaggggattgccagtcagccctcctggccttgtgcagggctgaagacatgtgagacttccctgccccaccccacatgacatccgaggatctgagatttccgtgtttggctgaacctgggagaccagctgggcctccaagtaggataacccctcactgagcaccacattctctagcttcttgttgaggctggaactgtttctttaaaatcccttaattttcccatctcattttctttgatagtttctgcctcactcatccctcctgtaccctggccagaacatctcactgatactcgaattcttttggcaaacttcgctgttgtttgtgttccctgattgaaggttgggtggagcaggacatggaccgggaagaggcactggagttggaggtgcctttgatgtgcacttggctattccgcaggaatcctgttttgccttagtgctacagtaatccacacccaggtctcccactccaggtctcccctcaccctcattctccaggaaacttcaggcaaaataattgagaaacaggcattagaacaaggtgagaaatagagggagcaaaggaccatctgtatgaactgggaagcaagcggagggccaagctaccctccccagcatgggaattcttgggttagtggagagcacaaccctcaaattcatgtgtccaagcagagatttggaaacccacctcccaggagagcactatttcccatagaaaacaaaaacaaaaacagaaacaaaaacaaaaagtcaggctttggttccccctgcaggctatattagaaatgacaggtagctgggcgcagtggctcacgcctgtaattccagcacttcgggaggccaaggcaggcggatcacttgaggtcaggaattcaagactagcctgaccaaagtgaccttatgcttagtcatggtgctaaagtggttgtt

SEQ ID NO: 285832 - DNA, 1820 bp, Homo sapiens
caacttagctctagtacgaggctgggtgttatttggccaccccggtgcgcgggtatggcggccagcctgtggatgggcgacctggaaccctacatggatgagaacttcatctccagagcctttgccaccatgggggagaccgtaatgagcgtcaaaattatccgaaaccgcctcactgggatcccagctggctactgctttgtagaatttgcagatttggccacagctgagaagtgtttgcataaaattaatgggaaaccccttccaggagccacacctgcgaaacgttttaaactgaactatgccacttacgggaaacaaccagataacagccctgagtattccctctttgtgggggacctgaccccggacgtggatgatggcatgctgtatgaattcttcgtcaaagtctacccctcctgtcggggaggcaaggtggttttggaccagacaggcgtgtctaagggttatggttttgtgaaattcacagatgaactggaacagaagcgagccctgacggagtgccagggagcagtgggactggggtctaagcctgtgcggctgagcgtggcaatccctaaagcgagccgtgtaaagccagtggaatatagtcagatgtacagttatagctacaaccagtattatcagcagtaccagaactactatgctcagtggggctatgaccagaacacaggcagctacagctacagttacccccagtatggctatacccagagcaccatgcagacatatgaagaagttggagatgatgcattggaagaccccatgccacagctggatgtgactgaggccaacaaggagttcatggaacagagtgaggagctgtatgacgctctgatggactgtcactggcagcccctggacacagtgtcttcagagatccctgccatgatgtagccaggccaaaggacaagccaggttgcatgatgtgagggagatgagagactcctttttaaaaattgtgaaacctttttggaaatatgatttgtaagattttaataatgactgtttttggagatcatgaatgtttctacaacactgctgcattcatttgaccatttgagtttgaagaccaagggaacaacttttaaacaaggttcaaattggtttccttcacaggaatcctttgtccaggtagttatccacataggacagtttgggattatccaaaactgggatgagcagcttgggataattcacacactaaagcctgagttcaaggtttctcagttgacaggtaggtatgtaaatcagggttctctggagtatttgtaggacctgccatatttgagtcctaacttggtgcaagtctggcagctaggtagaaaaggcactctagcaggtgtggtaggagcacgccccagaaggtagaatgtggtggggtgtgatggaacaggccagttggcctaagaattagtacttgctctaataatgggtttcatctattttcatgagttgcagcatctgcatatacaaggcctggatcactttaggatcaatattttgacacgggagaaggcagctcagaaaggattaaggaagatagctcaaagccaaagcagaccctccgtgtgaactttatactgctcacttccgtgtttcccaagtaaatggggaaactgtccaaccttgtcatgtgttgggacttactgcttgaggcaaagcattcatcctacatcataaaaaatctccaaagatctctttaagggctgggcatggtggctcactttgggagatggattgcttgagctcgggaagagaccagttcggtctctacaaaaaaatacaaacacaaatat

SEQ ID NO: 285833 - DNA, 1901 bp, Homo sapiens
agcgggtagcggtctccgcagccaggattggcgcccgcgcgggccttcgagccccgcccgcagagccccgcccgcaaagccccaccccggtgcgcgggtatggcggccagcctgtggatgggcgacctggaaccctacatggatgagaacttcatctccagagcctttgccaccatgggggagaccgtaatgagcgtcaaaattatccgaaaccgcctcactgggatcccagctggctactgctttgtagaatttgcagatttggccacagctgagaagtgtttgcataaaattaatgggaaaccccttccaggagccacacctgcgaaacgttttaaactgaactatgccacttacgggaaacaaccagataacagccctgagtattccctctttgtgggggacctgaccccggacgtggatgatggcatgctgtatgaattcttcgtcaaagtctacccctcctgtcggggaggcaaggtggttttggaccagacaggcgtgtctaagggttatggttttgtgaaattcacagatgaactggaacagaagcgagccctgacggagtgccagggagcagtgggactggggtctaagcctgtgcggctgagcgtggcaatccctaaagcgagccgtgtaaagccagtggaatatagtcagatgtacagttatagctacaaccagtattatcagcagtaccagaactactatgctcagtggggctatgaccagaacacaggcagctacagctacagttacccccagtatggctatacccagagcaccatgcagacatatgaagaagttggagatgatgcattggaagaccccatgccacagctggatgtgactgaggccaacaaggagttcatggaacagagtgaggagctgtatgacgctctgatggactgtcactggcagcccctggacacagtgtcttcagagatccctgccatgatgtagccaggccaaaggacaagccaggttgcatgatgtgagggagatgagagactcctttttaaaaattgtgaaacctttttggaaatatgatttgtaagattttaataatgactgtttttggagatcatgaatgtttctacaacactgctgcattcatttgaccatttgagtttgaagaccaagggaacaacttttaaacaaggttcaaattggtttccttcacaggaatcctttgtccaggtagttatccacataggacagtttgggattatccaaaactgggatgagcagcttgggataattcacacactaaagcctgagttcaaggtttctcagttgacaggtaggtatgtaaatcagggttctctggagtatttgtaggacctgccatatttgagtcctaacttggtgcaagtctggcagctaggtagaaaaggcactctagcaggtgtggtaggagcacgccccagaaggtagaatgtggtggggtgtgatggaacaggccagttggcctaagaattagtacttgctctaataatgggtttcatctattttcatgagttgcagcatctgcatatacaaggcctggatcactttaggatcaatattttgacacgggagaaggcagctcagaaaggattaaggaagatagctcaaagccaaagcagaccctccgtgtgaactttatactgctcacttccgtgtttcccaagtaaatggggaaactgtccaaccttgtcatgtgttgggacttactgcttgaggcaaagcattcatcctacatcataaaaaatctccaaagatctctttaagggctgggcatggtggctcactttgggagatggattgcttgagctcgggaagagaccagttcggtctctacaaaaaaatacaaacacaaatatacttttattagtctttttattcttctttattgatca

SEQ ID NO: 285834 - DNA, 2554 bp, Homo sapiens
caacttagctctagtacgaggctgggtgttatttggccaccccggtgcgcgggtatggcggccagcctgtggatgggcgacgtgagtgagggcagccgtccggggtctgaagacaaggaagcatctcggtttcgcgagagaggaaggatctgagtgggaggggacttgggatcccagaaaggggagacgtgtgacgggggttctttttggtgacacagaagcgggttccagcatctaagtgaagaggctgactggaaccctacatggatgagaacttcatctccagagcctttgccaccatgggggagaccgtaatgagcgtcaaaattatccgaaaccgcctcactgggatcccagctggctactgctttgtagaatttgcagatttggccacagctgagaagtgtttgcataaaattaatgggaaaccccttccaggagccacacctgtaaggacatttagataatgatgatgttgccattattattgtcattgcttactaccatctattgaatccctactgtatacttattttatttaatcctaaaacaaccctttacagtaggcattgttatctttgtaggcccaggaaactgaagctcagggaattgaaataacttgtccaaggcaacacaggtagtaaatggcagagccaggattcagactgaagattggttgcctcccaaatccatgcctttccattctgcattgctgcctcccataaccgaagacttgaaactctagacctcttgcctgattgggaaactagaataggctggcagcagcaaggacacatttcaagagagttgcattctgctcttcccacagttacttagcttacagctgcaccagctggcacacctgggctcatagaaccatggagctggcagtgcccttagcggtcatccgtgcaaccccctcattttatacaggagaaaaagctgaggcttagagagggggagatgttttggccaaggcgaaacgttttaaactgaactatgccacttacgggaaacaaccagataacagccctgagtattccctctttgtgggggacctgaccccggacgtggatgatggcatgctgtatgaattcttcgtcaaagtctacccctcctgtcggggaggcaaggtggttttggaccagacaggcgtgtctaagggttatggttttgtgaaattcacagatgaactggaacagaagcgagccctgacggagtgccagggagcagtgggactggggtctaagcctgtgcggctgagcgtggcaatccctaaagcgagccgtgtaaagccagtggaatatagtcagatgtacagttatagctacaaccagtattatcagcagtaccagaactactatgctcagtggggctatgaccagaacacaggcagctacagctacagttacccccagtatggctatacccagagcaccatgcagacatatgaagaagttggagatgatgcattggaagaccccatgccacagctggatgtgactgaggccaacaaggagttcatggaacagagtgaggagctgtatgacgctctgatggactgtcactggcagcccctggacacagtgtcttcagagatccctgccatgatgtagccaggccaaaggacaagccaggttgcatgatgtgagggagatgagagactcctttttaaaaattgtgaaacctttttggaaatatgatttgtaagattttaataatgactgtttttggagatcatgaatgtttctacaacactgctgcattcatttgaccatttgagtttgaagaccaagggaacaacttttaaacaaggttcaaattggtttccttcacaggaatcctttgtccaggtagttatccacataggacagtttgggattatccaaaactgggatgagcagcttgggataattcacacactaaagcctgagttcaaggtttctcagttgacaggtaggtatgtaaatcagggttctctggagtatttgtaggacctgccatatttgagtcctaacttggtgcaagtctggcagctaggtagaaaaggcactctagcaggtgtggtaggagcacgccccagaaggtagaatgtggtggggtgtgatggaacaggccagttggcctaagaattagtacttgctctaataatgggtttcatctattttcatgagttgcagcatctgcatatacaaggcctggatcactttaggatcaatattttgacacgggagaaggcagctcagaaaggattaaggaagatagctcaaagccaaagcagaccctccgtgtgaactttatactgctcacttccgtgtttcccaagtaaatggggaaactgtccaaccttgtcatgtgttgggacttactgcttgaggcaaagcattcatcctacatcataaaaaatctccaaagatctctttaagggctgggcatggtggctcactttgggagatggattgcttgagctcgggaagagaccagttcggtctctacaaaaaaatacaaacacaaatatacttttattagtctttttattcttctttattgatca

SEQ ID NO: 285835 - DNA, 2751 bp, Homo sapiens
caacttagctctagtacgaggctgggtgttatttggccaccccggtgcgcgggtatggcggccagcctgtggatgggcgacgtgagtgagggcagccgtccggggtctgaagacaaggaagcatctcggtttcgcgagagaggaaggatctgagtgggaggggacttgggatcccagaaaggggagacgtgtgacgggggttctttttggtgacacagaagcgggttccagcatctaagtgaagaggctgagtccgtgaggctaggggtcctggggccccacctgggttcgtgggagggaaaggtggtgctttggggacatagaatgggagcaatccaaggactgaggcgcgctgttctgggaccggaggagtggggtttctaggtccaaggggaggctccctaaagcggggcaagcttgaaccaaaagagctggggtttcaggccgctcagtggaggcgaacctcgcccctcgctcccccagcggcgcgtagccagccctgggctgaacgggaggggctctggaacccggagtgggaagcccggccgccggcctgagccgctgtgctcttgtttttacgcagctggaaccctacatggatgagaacttcatctccagagcctttgccaccatgggggagaccgtaatgagcgtcaaaattatccgaaaccgcctcactgggatcccagctggctactgctttgtagaatttgcagatttggccacagctgagaagtgtttgcataaaattaatgggaaaccccttccaggagccacacctgcccaggaaactgaagctcagggaattgaaataacttgtccaaggcaacacaggtagtaaatggcagagccaggattcagactgaagattggttgcctcccaaatccatgcctttccattctgcattgctgcctcccataaccgaagacttgaaactctagacctcttgcctgattgggaaactagaataggctggcagcagcaaggacacatttcaagagagttgcattctgctcttcccacagttacttagcttacagctgcaccagctggcacacctgggctcatagaaccatggagctggcagtgcccttagcggtcatccgtgcaaccccctcattttatacaggagaaaaagctgaggcttagagagggggagatgttttggccaaggcgaaacgttttaaactgaactatgccacttacgggaaacaaccagataacagccctgagtattccctctttgtgggggacctgaccccggacgtggatgatggcatgctgtatgaattcttcgtcaaagtctacccctcctgtcggggaggcaaggtggttttggaccagacaggcgtgtctaagggttatggttttgtgaaattcacagatgaactggaacagaagcgagccctgacggagtgccagggagcagtgggactggggtctaagcctgtgcggctgagcgtggcaatccctaaagcgagccgtgtaaagccagtggaatatagtcagatgtacagttatagctacaaccagtattatcagcagtaccagaactactatgctcagtggggctatgaccagaacacaggcagctacagctacagttacccccagtatggctatacccagagcaccatgcagacatatgaagaagttggagatgatgcattggaagaccccatgccacagctggatgtgactgaggccaacaaggagttcatggaacagagtgaggagctgtatgacgctctgatggactgtcactggcagcccctggacacagtgtcttcagagatccctgccatgatgtagccaggccaaaggacaagccaggttgcatgatgtgagggagatgagagactcctttttaaaaattgtgaaacctttttggaaatatgatttgtaagattttaataatgactgtttttggagatcatgaatgtttctacaacactgctgcattcatttgaccatttgagtttgaagaccaagggaacaacttttaaacaaggttcaaattggtttccttcacaggaatcctttgtccaggtagttatccacataggacagtttgggattatccaaaactgggatgagcagcttgggataattcacacactaaagcctgagttcaaggtttctcagttgacaggtaggtatgtaaatcagggttctctggagtatttgtaggacctgccatatttgagtcctaacttggtgcaagtctggcagctaggtagaaaaggcactctagcaggtgtggtaggagcacgccccagaaggtagaatgtggtggggtgtgatggaacaggccagttggcctaagaattagtacttgctctaataatgggtttcatctattttcatgagttgcagcatctgcatatacaaggcctggatcactttaggatcaatattttgacacgggagaaggcagctcagaaaggattaaggaagatagctcaaagccaaagcagaccctccgtgtgaactttatactgctcacttccgtgtttcccaagtaaatggggaaactgtccaaccttgtcatgtgttgggacttactgcttgaggcaaagcattcatcctacatcataaaaaatctccaaagatctctttaagggctgggcatggtggctcactttgggagatggattgcttgagctcgggaagagaccagttcggtctctacaaaaaaatacaaacacaaatatacttttattagtctttttattcttctttattgatca

SEQ ID NO: 285836 - DNA, 2004 bp, Homo sapiens
caacttagctctagtacgaggctgggtgttatttggccaccccggtgcgcgggtatggcggccagcctgtggatgggcgacctggaaccctacatggatgagaacttcatctccagagcctttgccaccatgggggagaccgtaatgagcgtcaaaattatccgaaaccgcctcactgggatcccagctggctactgctttgtagaatttgcagatttggccacagctgagaagtgtttgcataaaattaatgggaaaccccttccaggagccacacctttacttagcttacagctgcaccagctggcacacctgggctcatagaaccatggagctggcagtgcccttagcggtcatccgtgcaaccccctcattttatacaggagaaaaagctgaggcttagagagggggagatgttttggccaaggcgaaacgttttaaactgaactatgccacttacgggaaacaaccagataacagccctgagtattccctctttgtgggggacctgaccccggacgtggatgatggcatgctgtatgaattcttcgtcaaagtctacccctcctgtcggggaggcaaggtggttttggaccagacaggcgtgtctaagggttatggttttgtgaaattcacagatgaactggaacagaagcgagccctgacggagtgccagggagcagtgggactggggtctaagcctgtgcggctgagcgtggcaatccctaaagcgagccgtgtaaagccagtggaatatagtcagatgtacagttatagctacaaccagtattatcagcagtaccagaactactatgctcagtggggctatgaccagaacacaggcagctacagctacagttacccccagtatggctatacccagagcaccatgcagacatatgaagaagttggagatgatgcattggaagaccccatgccacagctggatgtgactgaggccaacaaggagttcatggaacagagtgaggagctgtatgacgctctgatggactgtcactggcagcccctggacacagtgtcttcagagatccctgccatgatgtagccaggccaaaggacaagccaggttgcatgatgtgagggagatgagagactcctttttaaaaattgtgaaacctttttggaaatatgatttgtaagattttaataatgactgtttttggagatcatgaatgtttctacaacactgctgcattcatttgaccatttgagtttgaagaccaagggaacaacttttaaacaaggttcaaattggtttccttcacaggaatcctttgtccaggtagttatccacataggacagtttgggattatccaaaactgggatgagcagcttgggataattcacacactaaagcctgagttcaaggtttctcagttgacaggtaggtatgtaaatcagggttctctggagtatttgtaggacctgccatatttgagtcctaacttggtgcaagtctggcagctaggtagaaaaggcactctagcaggtgtggtaggagcacgccccagaaggtagaatgtggtggggtgtgatggaacaggccagttggcctaagaattagtacttgctctaataatgggtttcatctattttcatgagttgcagcatctgcatatacaaggcctggatcactttaggatcaatattttgacacgggagaaggcagctcagaaaggattaaggaagatagctcaaagccaaagcagaccctccgtgtgaactttatactgctcacttccgtgtttcccaagtaaatggggaaactgtccaaccttgtcatgtgttgggacttactgcttgaggcaaagcattcatcctacatcataaaaaatctccaaagatctctttaagggctgggcatggtggctcactttgggagatggattgcttgagctcgggaagagaccagttcggtctctacaaaaaaatacaaacacaaatatacttttattagtctttttattcttctttattgatca

SEQ ID NO: 285837 - DNA, 2031 bp, Homo sapiens
agcgggtagcggtctccgcagccaggattggcgcccgcgcgggccttcgagccccgcccgcagagccccgcccgcaaagccccaccccggtgcgcgggtatggcggccagcctgtggatgggcgacctggaaccctacatggatgagaacttcatctccagagcctttgccaccatgggggagaccgtaatgagcgtcaaaattatccgaaaccgcctcactgggatcccagctggctactgctttgtagaatttgcagatttggccacagctgagaagtgtttgcataaaattaatgggaaaccccttccaggagccacacctgcgaaacgttttaaactgaactatgccacttacgggaaacaaccagataacagccctgagtattccctctttgtgggggacctgaccccggacgtggatgatggcatgctgtatgaattcttcgtcaaagtctacccctcctgtcggggaggcaaggtggttttggaccagacaggcgtgtctaagggttatggttttgtgaaattcacagatgaactggaacagaagcgagccctgacggagtgccagggagcagtgggactggggtctaagcctgtgcggctgagcgtggcaatccctaaagcgagccgtgtaaagccagtggaatatagtcagatgtacagttatagctacaaccagtattatcagcagtaccagaactactatgctcagtggggctatgaccagaacacaggcagctacagctacagttacccccagtatggctatacccagagcaccatgcagacatatgaagaagttggagatgatgcattggaagaggcagggtttcaccatgttgcccaggctggtcttgaactcctaggttcaagtgatctgcccatctcggccttccaaagtgctggcattataggcatgagccactgctcctggccaaaactttttttgagaccccatgccacagctggatgtgactgaggccaacaaggagttcatggaacagagtgaggagctgtatgacgctctgatggactgtcactggcagcccctggacacagtgtcttcagagatccctgccatgatgtagccaggccaaaggacaagccaggttgcatgatgtgagggagatgagagactcctttttaaaaattgtgaaacctttttggaaatatgatttgtaagattttaataatgactgtttttggagatcatgaatgtttctacaacactgctgcattcatttgaccatttgagtttgaagaccaagggaacaacttttaaacaaggttcaaattggtttccttcacaggaatcctttgtccaggtagttatccacataggacagtttgggattatccaaaactgggatgagcagcttgggataattcacacactaaagcctgagttcaaggtttctcagttgacaggtaggtatgtaaatcagggttctctggagtatttgtaggacctgccatatttgagtcctaacttggtgcaagtctggcagctaggtagaaaaggcactctagcaggtgtggtaggagcacgccccagaaggtagaatgtggtggggtgtgatggaacaggccagttggcctaagaattagtacttgctctaataatgggtttcatctattttcatgagttgcagcatctgcatatacaaggcctggatcactttaggatcaatattttgacacgggagaaggcagctcagaaaggattaaggaagatagctcaaagccaaagcagaccctccgtgtgaactttatactgctcacttccgtgtttcccaagtaaatggggaaactgtccaaccttgtcatgtgttgggacttactgcttgaggcaaagcattcatcctacatcataaaaaatctccaaagatctctttaagggctgggcatggtggctcactttgggagatggattgcttgagctcgggaagagaccagttcggtctctacaaaaaaatacaaacacaaatatacttttattagtctttttattcttctttattgatca

SEQ ID NO: 285838 - DNA, 2071 bp, Homo sapiens
caacttagctctagtacgaggctgggtgttatttggccaccccggtgcgcgggtatggcggccagcctgtggatgggcgacgtgagtgagggcagccgtccggggtctgaagacaaggaagcatctcggtttcgcgagagaggaaggatctgagtgggaggggacttgggatcccagaaaggggagacgtgtgacgggggttctttttggtgacacagaagcgggttccagcatctaagtgaagaggctgagtccgtgaggctaggggtcctggggccccacctgggttcgtgggagggaaaggtggtgctttggggacatagaatgggagcaatccaaggactgaggcgcgctgttctgggaccggaggagtggggtttctaggtccaaggggaggctccctaaagcggggcaagcttgaaccaaaagagctggggtttcaggccgctcagtggaggcgaacctcgcccctcgctcccccagcggcgcgtagccagccctgggctgaacgggaggggctctggaacccggagtgggaagcccggccgccggcctgagccgctgtgctcttgtttttacgcagctggaaccctacatggatgagaacttcatctccagagcctttgccaccatgggggagaccgtaatgagcgtcaaaattatccgaaaccgcctcactgggatcccagctggctactgctttgtagaatttgcagatttggccacagctgagaagtgtttgcataaaattaatgggaaaccccttccaggagccacacctttacttagcttacagctgcaccagctggcacacctgggctcatagaaccatggagctggcagtgcccttagcggtcatccgtgcaaccccctcattttatacaggagaaaaagctgaggcttagagagggggagatgttttggccaaggcgaaacgttttaaactgaactatgccacttacgggaaacaaccagataacagccctgagtattccctctttgtgggggacctgaccccggacgtggatgatggcatgctgtatgaattcttcgtcaaagtctacccctcctgtcggggaggcaaggtggttttggaccagacaggcgtgtctaagtaaggccttacttgttactgatgcttaactgtgttagtttcagcctttctctcctgagtggaggtgttttagaaaggccctgcagcatggcgattaagaccacaagctctggagccaaactgcctggttcaaatcccagctccaatacaggtgagggagaatgccagtattgtagaattgaagctctgtgacccttacagccccatctgtaaaatggagctgattaataatagctgcttgtagggttgatgtaaggattaaaggatataatataagtaagtcacatttgaaatgctttataggtgtttgctgttttgcttgttattgttactgagcctttcagtgtagttagaagtgttccacttcaggctgggcgtggtggctcatgcctgtaatcctaacactttgagaggcccaggtgggtggattgcgtgagcttaggagttggagaccagcccgggcaacacggtgaaatgccgtctctattaaaatacaaaaaattagccggatgtggtggtgtgcacctgtagtcccagctacttgggaggctgaggtaggataattgctttaacctggaaggcggaggttgcaatgagccaagattgtgccactgcactccagcctgggcaacagagccagactctgtctccataaaaaaaaaaaaaaagttggcccggcatggtggctcacacctgtaatcccagcactttgggaagctgaggtggatggatcacctgaggtcaggactttgaaaccagcctggctaacatggcaaaaccccatctctactaaaaaaatacaaaagttagccgggcatggtggcatgcgcctgtagtcccagctactcgggaggctgaggcagaattgcttgaatccgggaggcagaggttgcagtgagctgagatcacacaactgtgctccagcctgggtaacagagcaagattctgtctcaaata

SEQ ID NO: 285839 - DNA, 2536 bp, Homo sapiens
caacttagctctagtacgaggctgggtgttatttggccaccccggtgcgcgggtatggcggccagcctgtggatgggcgacgtgagtgagggcagccgtccggggtctgaagacaaggaagcatctcggtttcgcgagagaggaaggatctgagtgggaggggacttgggatcccagaaaggggagacgtgtgacgggggttctttttggtgacacagaagcgggttccagcatctaagtgaagaggctgagtccgtgaggctaggggtcctggggccccacctgggttcgtgggagggaaaggtggtgctttggggacatagaatgggagcaatccaaggactgaggcgcgctgttctgggaccggaggagtggggtttctaggtccaaggggaggctccctaaagcggggcaagcttgaaccaaaagagctggggtttcaggccgctcagtggaggcgaacctcgcccctcgctcccccagcggcgcgtagccagccctgggctgaacgggaggggctctggaacccggagtgggaagcccggccgccggcctgagccgctgtgctcttgtttttacgcagctggaaccctacatggatgagaacttcatctccagagcctttgccaccatgggggagaccgtaatgagcgtcaaaattatccgaaaccgcctcactgggatcccagctggctactgctttgtagaatttgcagatttggccacagctgagaagtgtttgcataaaattaatgggaaaccccttccaggagccacacctgtaaggacatttagataatgatgatgttgccattattattgtcattgcttactaccatctattgaatccctactgtatacttattttatttaatcctaaaacaaccctttacagtaggcattgttatctttgtaggcccaggaaactgaagctcagggaattgaaataacttgtccaaggcaacacaggtagtaaatggcagagccaggattcagactgaagattggttgcctcccaaatccatgcctttccattctgcattgctgcctcccataaccgaagacttgaaactctagacctcttgcctgattgggaaactagaataggctggcagcagcaaggacacatttcaagagagttgcattctgctcttcccacagttacttagcttacagctgcaccagctggcacacctgggctcatagaaccatggagctggcagtgcccttagcggtcatccgtgcaaccccctcattttatacaggagaaaaagctgaggcttagagagggggagatgttttggccaaggtaatttatttcagttttcttcaaatattgttcaactcttgaaacacctttctctgttttagtttgtttgtttttcaacttccaggcgaaacgttttaaactgaactatgccacttacgggaaacaaccagataacagccctgagtattccctctttgtgggggacctgaccccggacgtggatgatggcatgctgtatgaattcttcgtcaaagtctacccctcctgtcggggaggcaaggtggttttggaccagacaggcgtgtctaagtaaggccttacttgttactgatgcttaactgtgttagtttcagcctttctctcctgagtggaggtgttttagaaaggccctgcagcatggcgattaagaccacaagctctggagccaaactgcctggttcaaatcccagctccaatacaggtgagggagaatgccagtattgtagaattgaagctctgtgacccttacagccccatctgtaaaatggagctgattaataatagctgcttgtagggttgatgtaaggattaaaggatataatataagtaagtcacatttgaaatgctttataggtgtttgctgttttgcttgttattgttactgagcctttcagtgtagttagaagtgttccacttcaggctgggcgtggtggctcatgcctgtaatcctaacactttgagaggcccaggtgggtggattgcgtgagcttaggagttggagaccagcccgggcaacacggtgaaatgccgtctctattaaaatacaaaaaattagccggatgtggtggtgtgcacctgtagtcccagctacttgggaggctgaggtaggataattgctttaacctggaaggcggaggttgcaatgagccaagattgtgccactgcactccagcctgggcaacagagccagactctgtctccataaaaaaaaaaaaaaagttggcccggcatggtggctcacacctgtaatcccagcactttgggaagctgaggtggatggatcacctgaggtcaggactttgaaaccagcctggctaacatggcaaaaccccatctctactaaaaaaatacaaaagttagccgggcatggtggcatgcgcctgtagtcccagctactcgggaggctgaggcagaattgcttgaatccgggaggcagaggttgcagtgagctgagatcacacaactgtgctccagcctgggtaacagagcaagattctgtctcaaata

SEQ ID NO: 285840 - DNA, 1455 bp, Homo sapiens
gagagagagagagagagagagagagagagagagagagagagagagagagaggcgagccgtgtaaagccagtggaatatagtcagatgtacagttatagctacaaccagtattatcagcagtaccagaactactatgctcagtggggctatgaccagaacacaggcagctacagctacagttacccccagtatggctatacccagagcaccatgcagacatatgaagaagttggagatgatgcattggaagaggcagggtttcaccatgttgcccaggctggtcttgaactcctaggttcaagtgatctgcccatctcggccttccaaagtgctggcattataggcatgagccactgctcctggccaaaactttttttgagaccccatgccacagctggatgtgactgaggccaacaaggagttcatggaacagagtgaggagctgtatgacgctctgatggactgtcactggcagcccctggacacagtgtcttcagagatccctgccatgatgtagccaggccaaaggacaagccaggttgcatgatgtgagggagatgagagactcctttttaaaaattgtgaaacctttttggaaatatgatttgtaagattttaataatgactgtttttggagatcatgaatgtttctacaacactgctgcattcatttgaccatttgagtttgaagaccaagggaacaacttttaaacaaggttcaaattggtttccttcacaggaatcctttgtccaggtagttatccacataggacagtttgggattatccaaaactgggatgagcagcttgggataattcacacactaaagcctgagttcaaggtttctcagttgacaggtaggtatgtaaatcagggttctctggagtatttgtaggacctgccatatttgagtcctaacttggtgcaagtctggcagctaggtagaaaaggcactctagcaggtgtggtaggagcacgccccagaaggtagaatgtggtggggtgtgatggaacaggccagttggcctaagaattagtacttgctctaataatgggtttcatctattttcatgagttgcagcatctgcatatacaaggcctggatcactttaggatcaatattttgacacgggagaaggcagctcagaaaggattaaggaagatagctcaaagccaaagcagaccctccgtgtgaactttatactgctcacttccgtgtttcccaagtaaatggggaaactgtccaaccttgtcatgtgttgggacttactgcttgaggcaaagcattcatcctacatcataaaaaatctccaaagatctctttaagggctgggcatggtggctcactttgggagatggattgcttgagctcgggaagagaccagttcggtctctacaaaaaaatacaaacacaaatatacttttattagtctttttattcttctttattgatca

SEQ ID NO: 285841 - DNA, 1856 bp, Homo sapiens
caacttagctctagtacgaggctgggtgttatttggccaccccggtgcgcgggtatggcggccagcctgtggatgggcgacctggaaccctacatggatgagaacttcatctccagagcctttgccaccatgggggagaccgtaatgagcgtcaaaattatccgaaaccgcctcactgggatcccagctggctactgctttgtagaatttgcagatttggccacagctgagaagtgtttgcataaaattaatgggaaaccccttccaggagccacacctgcgaaacgttttaaactgaactatgccacttacgggaaacaaccagataacagccctgagtattccctctttgtgggggacctgaccccggacgtggatgatggcatgctgtatgaattcttcgtcaaagtctacccctcctgtcggggaggcaaggtggttttggaccagacaggcgtgtctaagggttatggttttgtgaaattcacagatgaactggaacagaagcgagccctgacggagtgccagggagcagtgggactggggtctaagcctgtgcggctgagcgtggcaatccctaaagcgagccgtgtaaagccagtggaatatagtcagatgtacagttatagctacaaccagtattatcagcagtaccagaactactatgctcagtggggctatgaccagaacacaggcagctacagctacagttacccccagtatggctatacccagagcaccatgcagacatatgaagaagttggagatgatgcattggaagaccccatgccacagctggatgtgactgaggccaacaaggagttcatggaacagagtgaggagctgtatgacgctctgatggactgtcactggcagcccctggacacagtgtcttcagagatccctgccatgatgtagccaggccaaaggacaagccaggttgcatgatgtgagggagatgagagactcctttttaaaaattgtgaaacctttttggaaatatgatttgtaagattttaataatgactgtttttggagatcatgaatgtttctacaacactgctgcattcatttgaccatttgagtttgaagaccaagggaacaacttttaaacaaggttcaaattggtttccttcacaggaatcctttgtccaggtagttatccacataggacagtttgggattatccaaaactgggatgagcagcttgggataattcacacactaaagcctgagttcaaggtttctcagttgacaggtaggtatgtaaatcagggttctctggagtatttgtaggacctgccatatttgagtcctaacttggtgcaagtctggcagctaggtagaaaaggcactctagcaggtgtggtaggagcacgccccagaaggtagaatgtggtggggtgtgatggaacaggccagttggcctaagaattagtacttgctctaataatgggtttcatctattttcatgagttgcagcatctgcatatacaaggcctggatcactttaggatcaatattttgacacgggagaaggcagctcagaaaggattaaggaagatagctcaaagccaaagcagaccctccgtgtgaactttatactgctcacttccgtgtttcccaagtaaatggggaaactgtccaaccttgtcatgtgttgggacttactgcttgaggcaaagcattcatcctacatcataaaaaatctccaaagatctctttaagggctgggcatggtggctcactttgggagatggattgcttgagctcgggaagagaccagttcggtctctacaaaaaaatacaaacacaaatatacttttattagtctttttattcttctttattgatca

SEQ ID NO: 285842 - DNA, 2886 bp, Homo sapiens
caacttagctctagtacgaggctgggtgttatttggccaccccggtgcgcgggtatggcggccagcctgtggatgggcgacgtgagtgagggcagccgtccggggtctgaagacaaggaagcatctcggtttcgcgagagaggaaggatctgagtgggaggggacttgggatcccagaaaggggagacgtgtgacgggggttctttttggtgacacagaagcgggttccagcatctaagtgaagaggctgagtccgtgaggctaggggtcctggggccccacctgggttcgtgggagggaaaggtggtgctttggggacatagaatgggagcaatccaaggactgaggcgcgctgttctgggaccggaggagtggggtttctaggtccaaggggaggctccctaaagcggggcaagcttgaaccaaaagagctggggtttcaggccgctcagtggaggcgaacctcgcccctcgctcccccagcggcgcgtagccagccctgggctgaacgggaggggctctggaacccggagtgggaagcccggccgccggcctgagccgctgtgctcttgtttttacgcagctggaaccctacatggatgagaacttcatctccagagcctttgccaccatgggggagaccgtaatgagcgtcaaaattatccgaaaccgcctcactgggatcccagctggctactgctttgtagaatttgcagatttggccacagctgagaagtgtttgcataaaattaatgggaaaccccttccaggagccacacctgtaaggacatttagataatgatgatgttgccattattattgtcattgcttactaccatctattgaatccctactgtatacttattttatttaatcctaaaacaaccctttacagtaggcattgttatctttgtaggcccaggaaactgaagctcagggaattgaaataacttgtccaaggcaacacaggtagtaaatggcagagccaggattcagactgaagattggttgcctcccaaatccatgcctttccattctgcattgctgcctcccataaccgaagacttgaaactctagacctcttgcctgattgggaaactagaataggctggcagcagcaaggacacatttcaagagagttgcattctgctcttcccacagttacttagcttacagctgcaccagctggcacacctgggctcatagaaccatggagctggcagtgcccttagcggtcatccgtgcaaccccctcattttatacaggagaaaaagctgaggcttagagagggggagatgttttggccaaggcgaaacgttttaaactgaactatgccacttacgggaaacaaccagataacagccctgagtattccctctttgtgggggacctgaccccggacgtggatgatggcatgctgtatgaattcttcgtcaaagtctacccctcctgtcggggaggcaaggtggttttggaccagacaggcgtgtctaagggttatggttttgtgaaattcacagatgaactggaacagaagcgagccctgacggagtgccagggagcagtgggactggggtctaagcctgtgcggctgagcgtggcaatccctaaagcgagccgtgtaaagccagtggaatatagtcagatgtacagttatagctacaaccagtattatcagcagtaccagaactactatgctcagtggggctatgaccagaacacaggcagctacagctacagttacccccagtatggctatacccagagcaccatgcagacatatgaagaagttggagatgatgcattggaagaccccatgccacagctggatgtgactgaggccaacaaggagttcatggaacagagtgaggagctgtatgacgctctgatggactgtcactggcagcccctggacacagtgtcttcagagatccctgccatgatgtagccaggccaaaggacaagccaggttgcatgatgtgagggagatgagagactcctttttaaaaattgtgaaacctttttggaaatatgatttgtaagattttaataatgactgtttttggagatcatgaatgtttctacaacactgctgcattcatttgaccatttgagtttgaagaccaagggaacaacttttaaacaaggttcaaattggtttccttcacaggaatcctttgtccaggtagttatccacataggacagtttgggattatccaaaactgggatgagcagcttgggataattcacacactaaagcctgagttcaaggtttctcagttgacaggtaggtatgtaaatcagggttctctggagtatttgtaggacctgccatatttgagtcctaacttggtgcaagtctggcagctaggtagaaaaggcactctagcaggtgtggtaggagcacgccccagaaggtagaatgtggtggggtgtgatggaacaggccagttggcctaagaattagtacttgctctaataatgggtttcatctattttcatgagttgcagcatctgcatatacaaggcctggatcactttaggatcaatattttgacacgggagaaggcagctcagaaaggattaaggaagatagctcaaagccaaagcagaccctccgtgtgaactttatactgctcacttccgtgtttcccaagtaaatggggaaactgtccaaccttgtcatgtgttgggacttactgcttgaggcaaagcattcatcctacatcataaaaaatctccaaagatctctttaagggctgggcatggtggctcactttgggagatggattgcttgagctcgggaagagaccagttcggtctctacaaaaaaatacaaacacaaatatacttttattagtctttttattcttctttattgatca

SEQ ID NO: 285843 - DNA, 2249 bp, Homo sapiens
caacttagctctagtacgaggctgggtgttatttggccaccccggtgcgcgggtatggcggccagcctgtggatgggcgacctggaaccctacatggatgagaacttcatctccagagcctttgccaccatgggggagaccgtaatgagcgtcaaaattatccgaaaccgcctcactgggatcccagctggctactgctttgtagaatttgcagatttggccacagctgagaagtgtttgcataaaattaatgggaaaccccttccaggagccacacctgcccaggaaactgaagctcagggaattgaaataacttgtccaaggcaacacaggtagtaaatggcagagccaggattcagactgaagattggttgcctcccaaatccatgcctttccattctgcattgctgcctcccataaccgaagacttgaaactctagacctcttgcctgattgggaaactagaataggctggcagcagcaaggacacatttcaagagagttgcattctgctcttcccacagttacttagcttacagctgcaccagctggcacacctgggctcatagaaccatggagctggcagtgcccttagcggtcatccgtgcaaccccctcattttatacaggagaaaaagctgaggcttagagagggggagatgttttggccaaggcgaaacgttttaaactgaactatgccacttacgggaaacaaccagataacagccctgagtattccctctttgtgggggacctgaccccggacgtggatgatggcatgctgtatgaattcttcgtcaaagtctacccctcctgtcggggaggcaaggtggttttggaccagacaggcgtgtctaagggttatggttttgtgaaattcacagatgaactggaacagaagcgagccctgacggagtgccagggagcagtgggactggggtctaagcctgtgcggctgagcgtggcaatccctaaagcgagccgtgtaaagccagtggaatatagtcagatgtacagttatagctacaaccagtattatcagcagtaccagaactactatgctcagtggggctatgaccagaacacaggcagctacagctacagttacccccagtatggctatacccagagcaccatgcagacatatgaagaagttggagatgatgcattggaagaccccatgccacagctggatgtgactgaggccaacaaggagttcatggaacagagtgaggagctgtatgacgctctgatggactgtcactggcagcccctggacacagtgtcttcagagatccctgccatgatgtagccaggccaaaggacaagccaggttgcatgatgtgagggagatgagagactcctttttaaaaattgtgaaacctttttggaaatatgatttgtaagattttaataatgactgtttttggagatcatgaatgtttctacaacactgctgcattcatttgaccatttgagtttgaagaccaagggaacaacttttaaacaaggttcaaattggtttccttcacaggaatcctttgtccaggtagttatccacataggacagtttgggattatccaaaactgggatgagcagcttgggataattcacacactaaagcctgagttcaaggtttctcagttgacaggtaggtatgtaaatcagggttctctggagtatttgtaggacctgccatatttgagtcctaacttggtgcaagtctggcagctaggtagaaaaggcactctagcaggtgtggtaggagcacgccccagaaggtagaatgtggtggggtgtgatggaacaggccagttggcctaagaattagtacttgctctaataatgggtttcatctattttcatgagttgcagcatctgcatatacaaggcctggatcactttaggatcaatattttgacacgggagaaggcagctcagaaaggattaaggaagatagctcaaagccaaagcagaccctccgtgtgaactttatactgctcacttccgtgtttcccaagtaaatggggaaactgtccaaccttgtcatgtgttgggacttactgcttgaggcaaagcattcatcctacatcataaaaaatctccaaagatctctttaagggctgggcatggtggctcactttgggagatggattgcttgagctcgggaagagaccagttcggtctctacaaaaaaatacaaacacaaatatacttttattagtctttttattcttctttattgatca

SEQ ID NO: 285844 - DNA, 1692 bp, Homo sapiens
cggggaagctcctatttgggaatgttccctaggggtgaaggtgtcgaggaggatggtgaactgaatgtgggaattcctgcagatattagaattgtttgtacttggatcttgacactatgtggacacctgttgatgggactctcctttcttcctctagtttaatggactctctctttctcttctcagcctcttttcctttctacattcctgcccaccttcttatccttacttctttttcatgtgtccattcttagactttaatcacatttgtgatctaaattgtatatttttttcatgcaggggttatggttttgtgaaattcacagatgaactggaacagaagcgagccctgacggagtgccagggagcagtgggactggggtctaagcctgtgcggctgagcgtggcaatccctaaagcgagccgtgtaaagccagtggaatatagtcagatgtacagttatagctacaaccagtattatcagcagtaccagaactactatgctcagtggggctatgaccagaacacaggcagctacagctacagttacccccagtatggctatacccagagcaccatgcagacatatgaagaagttggagatgatgcattggaagaccccatgccacagctggatgtgactgaggccaacaaggagttcatggaacagagtgaggagctgtatgacgctctgatggactgtcactggcagcccctggacacagtgtcttcagagatccctgccatgatgtagccaggccaaaggacaagccaggttgcatgatgtgagggagatgagagactcctttttaaaaattgtgaaacctttttggaaatatgatttgtaagattttaataatgactgtttttggagatcatgaatgtttctacaacactgctgcattcatttgaccatttgagtttgaagaccaagggaacaacttttaaacaaggttcaaattggtttccttcacaggaatcctttgtccaggtagttatccacataggacagtttgggattatccaaaactgggatgagcagcttgggataattcacacactaaagcctgagttcaaggtttctcagttgacaggtaggtatgtaaatcagggttctctggagtatttgtaggacctgccatatttgagtcctaacttggtgcaagtctggcagctaggtagaaaaggcactctagcaggtgtggtaggagcacgccccagaaggtagaatgtggtggggtgtgatggaacaggccagttggcctaagaattagtacttgctctaataatgggtttcatctattttcatgagttgcagcatctgcatatacaaggcctggatcactttaggatcaatattttgacacgggagaaggcagctcagaaaggattaaggaagatagctcaaagccaaagcagaccctccgtgtgaactttatactgctcacttccgtgtttcccaagtaaatggggaaactgtccaaccttgtcatgtgttgggacttactgcttgaggcaaagcattcatcctacatcataaaaaatctccaaagatctctttaagggctgggcatggtggctcactttgggagatggattgcttgagctcgggaagagaccagttcggtctctacaaaaaaatacaaacacaaatatacttttattagtctttttattcttctttattgatca

SEQ ID NO: 285845 - DNA, 1034 bp, Homo sapiens
agcgggtagcggtctccgcagccaggattggcgcccgcgcgggccttcgagccccgcccgcagagccccgcccgcaaagccccaccccggtgcgcgggtatggcggccagcctgtggatgggcgacctggaaccctacatggatgagaacttcatctccagagcctttgccaccatgggggagaccgtaatgagcgtcaaaattatccgaaaccgcctcactgggatcccagctggctactgctttgtagaatttgcagatttggccacagctgagaagtgtttgcataaaattaatgggaaaccccttccaggagccacacctgcgaaacgttttaaactgaactatgccacttacgggaaacaaccagataacagccctgagtattccctctttgtgggggacctgaccccggacgtggatgatggcatgctgtatgaattcttcgtcaaagtctacccctcctgtcggggaggcaaggtggttttggaccagacaggcgtgtctaagggttatggttttgtgaaattcacagatgaactggaacagaagcgagccctgacggagtgccagggagcagtgggactggggtctaagcctgtgcggctgagcgtggcaatccctaaagcgagccgtgtaaagccagtggaatatagtcagatgtacagttatagctacaaccagtattatcagcagtaccagaactactatgctcagtggggctatgaccagaacacaggcagctacagctacagttacccccagtatggctatacccagagcaccatgcagacatatgaagaagttggagatgatgcattggaagaggcagggtttcaccatgttgcccaggctggtcttgaactcctaggttcaagtgatctgcccatctcggccttccaaagtgctggcattataggcatgagccactgctcctggccaaaactttttttgagaccccatgacacagctggccctgactcaggactccaagtagtacatgtttcatagtgtgaagctgcggccagcgaaga

SEQ ID NO: 285846 - DNA, 494 bp, Homo sapiens
tgtctgcccctggatcagacccagacagggaggggctgctgatgctggtagagacagagctgaggccacagtcctaccctctcctccaggccctacccagccccgccctgttggctcatgcccacaactacttaacttcttgagctgcttgaggttgctggagcggatggcagccaatagctggtcacgggagttcttctcctgggcagggaggactttgtctcccatcttcctctgggtagctgatgtgtcgctggttgtggaagcggagctcggtcagcgtgttgttctggaggagggcccggaagatggccaggatgcctttgcctgtgatgtggttggagtccaggttgaggctggtgatggtcttgttggccttgagcatgatggcaatggcaaaggccacgtggtcatcggctcgcgtgttggccaaggcgaacagcttaaccacagtgttgaactccagagcctcagtaaaccggaccaagatctca

SEQ ID NO: 285847 - DNA, 981 bp, Homo sapiens
gaccctgatcagccacataacatacactaaataatacattcaacaattctctaggacacagctgggaagtctaccatctgcaagcccggaagagaggcttcaccagaaacggaatcagccagcactttgatcttggactttccagcctccataactgcaagaaaaatgcatttctattgtttaagccacccagtctatggtatttccttatggcagcccaagctgactaagacacatgatattccatcaaaaacagatgttatttcatcaggggttgtcacagtcacaataattggatgcgaagacatcaaagaatcatcctcttgaacagatgacaggccgagaagacatcaacttctgtgaattctgcttctgcgacttctgtgtgacttttggatatgtgccaaacttttcaagccctatttctatatctgtgcaatgagaatgatgacatcactccacagatttggtctaagaattaagagaggttgcatatcaatttgccaaatattgatgttcaggtttttctaatattaacttgttattggaatttggatacttcataattaatgaaagaaaatattggcagtttatcctttagttctaatcacctctcgtttccctcctaggtcttgtcagcaatacagactggttgacaggcctagcagtactgtcagatttccttggttcaaagctcagtctttttactttctagatatataagtttaagcaagtttcctcacccattaaatagaagtaattatggcctgtactttttggaactgtgcacaggactcagtgataaaattcatggttagtacttggcatagtacctggcacagaatgagaacctaacccattagctgctatagttattttgactcttaagcagtaagattctgaaatctaactctgctaaatcactactaactttaaaaatttcattggctctacttaattaaaaatatttccaaaacagga

SEQ ID NO: 285848 - DNA, 859 bp, Homo sapiens
tttaccgttattcccaacccaaagagaaacctttaggtatcactcattctgggagaagacaaccgtcatatcatgtcatgaagatactcatgcagtcctatggagaatttcattggatattccatcaaaaacagatgttatttcatcaggggttgtcacagtcacaataattggatgcgaagacatcaaagaatcatcctcttgaacagatgacaggccgagaagacatcaacttctgtgaattctgcttctgcgacttctgtgtgacttttggatatgtgccaaacttttcaagccctatttctatatctgtgcaatgagaatgatgacatcactccacagatttggtctaagaattaagagaggttgcatatcaatttgccaaatattgatgttcaggtttttctaatattaacttgttattggaatttggatacttcataattaatgaaagaaaatattggcagtttatcctttagttctaatcacctctcgtttccctcctaggtcttgtcagcaatacagactggttgacaggcctagcagtactgtcagatttccttggttcaaagctcagtctttttactttctagatatataagtttaagcaagtttcctcacccattaaatagaagtaattatggcctgtactttttggaactgtgcacaggactcagtgataaaattcatggttagtacttggcatagtacctggcacagaatgagaacctaacccattagctgctatagttattttgactcttaagcagtaagattctgaaatctaactctgctaaatcactactaactttaaaaatttcattggctctacttaattaaaaatatttccaaaacagga

SEQ ID NO: 285849 - DNA, 793 bp, Homo sapiens
aagcggaaaatcatacttgattctagactccccaatcagtatgtttctagatattccatcaaaaacagatgttatttcatcaggggttgtcacagtcacaataattggatgcgaagacatcaaagaatcatcctcttgaacagatgacaggccgagaagacatcaacttctgtgaattctgcttctgcgacttctgtgtgacttttggatatgtgccaaacttttcaagccctatttctatatctgtgcaatgagaatgatgacatcactccacagatttggtctaagaattaagagaggttgcatatcaatttgccaaatattgatgttcaggtttttctaatattaacttgttattggaatttggatacttcataattaatgaaagaaaatattggcagtttatcctttagttctaatcacctctcgtttccctcctaggtcttgtcagcaatacagactggttgacaggcctagcagtactgtcagatttccttggttcaaagctcagtctttttactttctagatatataagtttaagcaagtttcctcacccattaaatagaagtaattatggcctgtactttttggaactgtgcacaggactcagtgataaaattcatggttagtacttggcatagtacctggcacagaatgagaacctaacccattagctgctatagttattttgactcttaagcagtaagattctgaaatctaactctgctaaatcactactaactttaaaaatttcattggctctacttaattaaaaatatttccaaaacagga

SEQ ID NO: 285850 - DNA, 793 bp, Homo sapiens
  misc_feature (33)..(33): n is a, c, g, or t
  misc_feature (37)..(38): n is a, c, g, or t
aggggggggggggggtgagggggggaggggggngggnnggggggggtcggatattccatcaaaaacagatgttatttcatcaggggttgtcacagtcacaataattggatgcgaagacatcaaagaatcatcctcttgaacagatgacaggccgagaagacatcaacttctgtgaattctgcttctgcgacttctgtgtgacttttggatatgtgccaaacttttcaagccctatttctatatctgtgcaatgagaatgatgacatcactccacagatttggtctaagaattaagagaggttgcatatcaatttgccaaatattgatgttcaggtttttctaatattaacttgttattggaatttggatacttcataattaatgaaagaaaatattggcagtttatcctttagttctaatcacctctcgtttccctcctaggtcttgtcagcaatacagactggttgacaggcctagcagtactgtcagatttccttggttcaaagctcagtctttttactttctagatatataagtttaagcaagtttcctcacccattaaatagaagtaattatggcctgtactttttggaactgtgcacaggactcagtgataaaattcatggttagtacttggcatagtacctggcacagaatgagaacctaacccattagctgctatagttattttgactcttaagcagtaagattctgaaatctaactctgctaaatcactactaactttaaaaatttcattggctctacttaattaaaaatatttccaaaacagga

SEQ ID NO: 285851 - DNA, 422 bp, Homo sapiens
ttttcttttttttctgggtgagatgaaagctatttgagggttctgagtcaaggagtgactttcattttaatggcaggctccccctggcttctgggcagagaatagcatgtatgggtgtattcctctgttttcacactgctgtaaagaactgctcaagactgggtaatttacgaagaaaagaggtttaattgactcacagttcagcttggctggggaggcctcaggaaacttacaatcatggcagaaggcaaaggggaaaaaaggcaccttcttcacaagcaaaggagggaagagccccttataaaaccatcagatctcatgagaactcactcactatcacaaaaacagcctggggaaaccacccccatgattcagttacctccacctggtctctcctttgacacatggggattatgaagatt

SEQ ID NO: 285852 - DNA, 364 bp, Homo sapiens
gctggatgttcctggctcctggggcatgggactgtgtcattcccttcaattgacaactgtgaaaagaaggccattcgaacccattctggcgttgctgggctcttcaccgtgaagtcctcagctatgtctctttctcttcgcactgcggccacagcgtcagcaatggcaaagaacacagatgaccccaggaacatcccagactccccgaggccctgtaagaaggcacattggtgtaagaaacttccatactacactacaagtttctagagggtaggggccaggtctcgttcaccattgtgtccccaacccctgcacagtgttttgtacacaaaatcttctcaataaatgtttgttggctgactta

SEQ ID NO: 285853 - DNA, 939 bp, Homo sapiens
ggttgtttttttaggtttccgtgtgtttctattgagctgctcagtgcccggcttagaagaccaggaaaaggagtcacaggtcgtatgctggaggcttgagccgcggcaccgtggcgcggctcgcctcgctgcggttggtggtggcggtggacattgcagcgcggctggaggggtaggaagaagaagatagttttgggatagatagagggtccttagacaaggtgcaagacaaacagaagagggcatgtggggtcaaactcgctagctgcctgcctgatttttctgcacacaggtgagatattcctgcacatcctctggtgaccccagaatgagggggactcgctggtgaattgcctcgggcttcacgtccagtacaggctgggtccccgtggtcgccaagcctcctgcctgctcaatgatgtaggccacgggattgcattcatacaggagccggagctgtggaggaacagaggcaggacaaattcaccaagagcctagcaacatgaagagagatgccaggaagaagagagaagccaggaaacaagccaaccgcacaatccccacatcagagcaggagaagatgggggcctgctggcagagctggggcttggctgtggtcactctgaacctgctctttggtgttttcatgagtggtgggaagaatagggaccatatggagcccacacaggaagcctagcagtacacagcaagcaggaagacaattctaaggaagcagcccatagtcttctttcttttcctgtgcatcttccactgtcagtgaggctcctcatttatggtgaacccaactgtgtgtatctcccaagttctcacccgcagattaatgttttcaggaagataggccatcaacagtgagaggaagaagttacattgtcgtatgagggatgcattttaaccattaatttgtggtacaggctgggc

SEQ ID NO: 285854 - DNA, 694 bp, Homo sapiens
ggcgccgccgccgctgccgccgctgctcgcctgggccctcctcctggccacccccgcccccgggccgggcagtgacgcgccgcggtggtgccagcccctctccccgggcagccgcggcggcagcagcagcagcagcagctggagctgtggggctgtcaccgccgcccgccccgctcactcgcggatcccgaccgcccatctccgcctcgcttccagcccaggatgagacttctgtgagcagcgaggattttgatatgagcgactccacatggatgtcagctgacccgcacctggcctccagcctgagccccagccaggacgagaggatgcggagcccgcagaacctccacagtcaagaggacgggccccaccgcttgagccacctgtcccaaggcctgaacatcatctgcagcttggacacctctctacgggccaggaaccccagggtctctgcagagagaaatgatttcagttttaggggaagatctaggtgtgtgacgtctaattcattagccaaggacggctactgagccttggaaaaggctagtgcagacaggtgtgcaatacacgctgcgtctcagcggctccgtaggaaagaagaaggtgaaatatctcagctctgataacacggtatcaattatttgttgaaatggtactattttggatatattgggttaaataaagtagattatta

SEQ ID NO: 285855 - DNA, 1045 bp, Homo sapiens
ggcgccgccgccgctgccgccgctgctcgcctgggccctcctcctggccacccccgcccccgggccgggcagtgacgcgccgcggtggtgccagcccctctccccgggcagccgcggcggcagcagcagcagcagcagctggagctgtggggctgtcaccgccgcccgccccgctcactcgcggatcccgaccgcccatctccgcctcgcttccagcccaggatgagacttctgtgagcagcgaggattttgatatgagcgactccacatggatgtcagctgacccgcacctggcctccagcctgagccccagccaggacgagaggatgcggagcccgcagaacctccacagtcaagaggacgatgactcctcctctgagagtggcagcggcaatggctcctccaccctgaacccatccacgtcgagcagcacgcagggcgaccctgccttccccgagatgaatggcaacggcgccgtggcccccatggacttcaccacggccgccgaggatcagcccatcaacctgtgtgacaagctcccgccggccacggcacttggcacagcctcctacccctcggatggctgcggtgccgacgggctgcggagccgcgtcaaatacggggtgaagaccacccccgaggtcctggtgttggcctctgctgaggaaacagctgacaccctcctaagcgctcagcagccccgggaaccagtcccccccctacagctctgggagctacgattccatcaagaccgaggtcagcggctgccctgaggacctgacagtgggccgggccccgacggcagatgatgacgacgatgaccacgatgaccatgaggacaatgacaagatgaacgactctgaaggcatggaccctgagcgtcttaaggccttcaacatgtttgtgcgtctctttgtggacgagaacctggaccgcatggtgcccatctccaagcagcccaaggagaagatccaggccatcatcgagtcctgcagccggcagttccctgagttccaggagcgggcccgcaagcgcatccgcacgt

SEQ ID NO: 285856 - DNA, 753 bp, Homo sapiens
ggcgccgccgccgctgccgccgctgctcgcctgggccctcctcctggccacccccgcccccgggccgggcagtgacgcgccgcggtggtgccagcccctctccccgggcagccgcggcggcagcagcagcagcagcagctggagctgtggggctgtcaccgccgcccgccccgctcactcgcggatcccgaccgcccatctccgcctcgcttccagcccaggatgagacttctgtgagcagcgaggattttgatatgagcgactccacatggatgtcagctgacccgcacctggcctccagcctgagccccagccaggacgagaggatgcggagcccgcagaacctccacagtcaagaggacgggccccaccgcttgagccacctgtcccaaggcctgaacatcatctgcagcttggacacctctctacgggccaggaaccccagggtctctgcagagagaaatgatttcagttttaggggaagatctaggtgtgtgacgtctaattcattagccaaggacggctactgagccttggaaaaggctagtgcagacaggtgtgcaatacacgctgcgtctcagcggctccgtaggaaagaagaaggtgaaatatctcagctctgataacacggtatcaattatttgttgaaatggtactattttggatatattgggttaaataaagtagattattacacacttgaaacaaacacgcagccaaaaaaagaggggggcccgcctataaagtttcccc

SEQ ID NO: 285857 - DNA, 544 bp, Homo sapiens
ttacaacagcctttaaaatacttgcctaagctgagctcctgaagaaacttggacctgtctccttgaccacgcctttacacccgcacctgacatctatggctctgaggcccagaaagagctgaggaggtcatagagatcatcaatgctctgcttgctttgatgtaccattaagaagacgatctttcctctaacagccccatacaactgagcagcgccaccacgtcataccgaaggaaggccctgtgagtctatgaagcggcaaaatgagtaaactgattggctgaagacagaactaatcatcctactggtatctaactccagggcctacgttaatagcatatatttccatctgtgtttaatatgcctcagaggctgagtagaggcagatcttgcttggagaggcaccatctgcctacagggattagatccgagccacattacccatatatgctcagaatggtctgtcaggaacacccttgttaatagtttagctgatactgtttctctaaggtggaagtaaaaattactaaatgaaagagcaaat

SEQ ID NO: 285858 - DNA, 940 bp, Homo sapiens
ttacaacagcctttaaaatacttgcctaagctgagctcctgaagaaacttggacctgtctccttgaccacgcctttagtacgtctgccggcccgagagtcctcttttacagtaatgttgaccatattcctaactaaagcaagacctgaccagctgccaaatagtcctccccctccctccagtggaagaaatggctactgctattcaacactgagaatgccagaacagctctgtggggctccactgaaaacctgcagcagggaggctgatgatgggagctgcttagagagcttccgaatctacttcaggtaaatatggacccgtatgtatctcctgcagcacccgcacctgacatctatggctctgaggcccagaaagagctgaggaggtcatagagatcatcaatgctctgcttgctttgatgtaccattaagaagacgatctttcctctaacagccccatacaactgagcagcgccaccacgtcataccggtacccttttctttaccccttaaagaatacccaggaaagaaagataactaaaggaagtaaaggaccagatcttttaccaccttcctgcgtgggtgatccatcctcttcctctataacatcatttccctaggacagaaggaaggccctgtgagtctatgaagcggcaaaatgagtaaactgattggctgaagacagaactaatcatcctactggtatctaactccagggcctacgttaatagcatatatttccatctgtgtttaatatgcctcagaggctgagtagaggcagatcttgcttggagaggcaccatctgcctacagggattagatccgagccacattacccatatatgctcagaatggtctgtcaggaacacccttgttaatagtttagctgatactgtttctctaaggtggaagtaaaaattactaaatgaaagagcaaat

SEQ ID NO: 285859 - DNA, 2403 bp, Homo sapiens
gatttagattgtcactgccaccctcggtcggtgcttacttcgctgccagctggtcgtcgccatgaacccggacctgcgcagggagcgggattccgccagcttcaacccggagctgcttacacacatcctggacggcagccccgagaaaacccggcgccgccgagagatcgagaacatgatcctgaacgacccagacttccagcatgaggacttgaacttcctcactcgcagccagcgttatgaggtggctgtcaggaaaagtgccatcatggtgaagaagatgagggagtttggcatcgctgaccctgatgaaattatgtggtttaaaaattttgtgcaccgagggcggcctgagcctctggatcttcacttgggcatgttcctgcccaccttgcttcaccaggcaactgcggagcagcaggagcgcttcttcatgcccgcctggaacttggagatcattggcacttatgcccagacagagatgggtcatggaactcaccttcgaggcttggaaaccacagccacgtatgaccctgaaacccaggagttcattctcaacagtcctactgtgacctccattaaatggtggcctggtgggcttggaaagacttcaaatcatgcaatagttcttgcccagctcatcactaaggggaaatgctatggattacatgcctttatcgtacctattcgtgaaatcgggacccataagcctttgccaggaattaccgttggtgacatcggccccaaatttggttatgatgagatagacaatggctacctcaaaatggacaaccatcgtattcccagagaaaacatgctgatgaagtatgcccaggtgaagcctgatggcacatacgtgaaaccgctgagtaacaagctgacttacgggaccatggtgtttgtcaggtccttccttgtgggagaagctgctcgggctctgtctaaggcgtgcaccattgccatccgatacagcgctgtgaggcaccagtctgaaatcaagccaggtgaaccagaaccacagattttggattttcaaacccagcagtataaactctttccactcctggccactgcctatgccttccagtttgtgggcgcatacatgaaggagacctatcaccggattaacgaaggcattggtcaaggggacctgagtgaactgcctgagcttcatgccctcaccgctggactgaaggctttcacctcctggactgcaaacactggcattgaagcatgtcggatggcttgtggtgggcatggctattctcattgcagtggtcttccaaatatttatgtcaatttcaccccaagctgtacctttgagggagaaaacactgtcatgatgctccagacggctaggttcctgatgaaaagttatgatcaggtgcactcaggaaagttggtgtgtggcatggtgtcctatttgaacgacctgcccagtcagcgcatccagccacagcaggtagcagtctggccaaccatggtggatatcaacagccccgaaagcctaaccgaagcatataaactccgtgcagccagattagtagaaattgctgcaaaaaaccttcaaaaagaagtgattcacagaaaaagcaaggaggtagcttggaacctaacttctgttgaccttgttcgagcaagtgaggcacattgccactatgtggtagttaagctcttttcagaaaaactcctcaaaattcaagataaagccattcaagctgtcttaaggagtttatgtctgctgtattctctgtatggaatcagtcagaacgcgggggatttccttcaggggagcatcatgacagagcctcagattacacaagtaaaccagcgtgtaaaggagttactcactctgattcgctcagatgctgttgctttggttgatgcatttgattttcaggatgtgacacttggctctgtgcttggccgctatgatgggaatgtgtatgaaaacttgtttgagtgggctaagaactccccactgaacaaagcagaggtccacgaatcttacaagcacctgaagtcactgcagtccaagctctgaagtgtcacaaggacaagtttaatctgcttcagaaagcgcctgtgtgcaactcaaattttgtggaatctttttcgaattcacgaggaagtaaaccagtggcacccatgtgacataggcagcagctgggcctcgggagaccagcatgcctaggctgctccactcccaaaccagagtgtcccagaggcatgacaggagcctatggtaccttcagaggaaaacctcctgttctgatgcccagagctgctgggataggcagagtacttcttggagggaatggcaccccctgcgagagacgaaagcaagagtctagggcctgagtctctcctggccaagatctctccctatatagcatgggcccg

SEQ ID NO: 285860 - DNA, 2403 bp, Homo sapiens
gatttagattgtcactgccaccctcggtcggtgcttacttcgctgccagctggtcgtcgccatgaacccggacctgcgcagggagcgggattccgccagcttcaacccggagctgcttacacacatcctggacggcagccccgagaaaacccggcgccgccgagagatcgagaacatgatcctgaacgacccagacttccagcatgaggacttgaacttcctcactcgcagccagcgttatgaggtggctgtcaggaaaagtgccatcatggtgaagaagatgagggagtttggcatcgctgaccctgatgaaattatgtggtttaaaaaactacatttggtcaattttgtggaacctgtgggcctcaattactccatgtttattcctaccttgctgaatcagggcaccactgctcagaaagagaaatggctgctttcatccaaaggactccagataattggcacctacgcccagacggaaatgggccacggaactcaccttcgaggcttggaaaccacagccacgtatgaccctgaaacccaggagttcattctcaacagtcctactgtgacctccattaaatggtggcctggtgggcttggaaagacttcaaatcatgcaatagttcttgcccagctcatcactaaggggaaatgctatggattacatgcctttatcgtacctattcgtgaaatcgggacccataagcctttgccaggaattaccgttggtgacatcggccccaaatttggttatgatgagatagacaatggctacctcaaaatggacaaccatcgtattcccagagaaaacatgctgatgaagtatgcccaggtgaagcctgatggcacatacgtgaaaccgctgagtaacaagctgacttacgggaccatggtgtttgtcaggtccttccttgtgggagaagctgctcgggctctgtctaaggcgtgcaccattgccatccgatacagcgctgtgaggcaccagtctgaaatcaagccaggtgaaccagaaccacagattttggattttcaaacccagcagtataaactctttccactcctggccactgcctatgccttccagtttgtgggcgcatacatgaaggagacctatcaccggattaacgaaggcattggtcaaggggacctgagtgaactgcctgagcttcatgccctcaccgctggactgaaggctttcacctcctggactgcaaacactggcattgaagcatgtcggatggcttgtggtgggcatggctattctcattgcagtggtcttccaaatatttatgtcaatttcaccccaagctgtacctttgagggagaaaacactgtcatgatgctccagacggctaggttcctgatgaaaagttatgatcaggtgcactcaggaaagttggtgtgtggcatggtgtcctatttgaacgacctgcccagtcagcgcatccagccacagcaggtagcagtctggccaaccatggtggatatcaacagccccgaaagcctaaccgaagcatataaactccgtgcagccagattagtagaaattgctgcaaaaaaccttcaaaaagaagtgattcacagaaaaagcaaggaggtagcttggaacctaacttctgttgaccttgttcgagcaagtgaggcacattgccactatgtggtagttaagctcttttcagaaaaactcctcaaaattcaagataaagccattcaagctgtcttaaggagtttatgtctgctgtattctctgtatggaatcagtcagaacgcgggggatttccttcaggggagcatcatgacagagcctcagattacacaagtaaaccagcgtgtaaaggagttactcactctgattcgctcagatgctgttgctttggttgatgcatttgattttcaggatgtgacacttggctctgtgcttggccgctatgatgggaatgtgtatgaaaacttgtttgagtgggctaagaactccccactgaacaaagcagaggtccacgaatcttacaagcacctgaagtcactgcagtccaagctctgaagtgtcacaaggacaagtttaatctgcttcagaaagcgcctgtgtgcaactcaaattttgtggaatctttttcgaattcacgaggaagtaaaccagtggcacccatgtgacataggcagcagctgggcctcgggagaccagcatgcctaggctgctccactcccaaaccagagtgtcccagaggcatgacaggagcctatggtaccttcagaggaaaacctcctgttctgatgcccagagctgctgggataggcagagtacttcttggagggaatggcaccccctgcgagagacgaaagcaagagtctagggcctgagtctctcctggccaagatctctccctatatagcatgggcccg

SEQ ID NO: 285861 - DNA, 397 bp, Homo sapiens
gatttagattgtcactgccaccctcggtcggtgcttacttcgctgccagctggtcgtcgccatgaacccggacctgcgcagggagcgggattccgccagcttcaacccggagctgcttacacacatcctggacggcagccccgagaaaacccggcgccgccgagagatcgagaacatgatcctgaacgacccagacttccagcatgaggacttgaacttcctcactcgcagccagcgttatgaggtggctgtcaggaaaagtgccatcatggtgaagaagatgagggagtttggcatcgctgaccctgatgaaattatgtggtttaaaaagtaggtatgccttagaacagagcaagtgttgttaagcctaaactttacagctgcggtctatggtggc

SEQ ID NO: 285862 - DNA, 4146 bp, Homo sapiens
gatttagattgtcactgccaccctcggtcggtgcttacttcgctgccagctggtcgtcgccatgaacccggacctgcgcagggagcgggattccgccagcttcaacccggagctgcttacacacatcctggacggcagccccgagaaaacccggcgccgccgagagatcgagaacatgatcctgaacgacccagacttccagcatgaggacttgaacttcctcactcgcagccagcgttatgaggtggctgtcaggaaaagtgccatcatggtgaagaagatgagggagtttggcatcgctgaccctgatgaaattatgtggtttaaaaattttgtgcaccgagggcggcctgagcctctggatcttcacttgggcatgttcctgcccaccttgcttcaccaggcaactgcggagcagcaggagcgcttcttcatgcccgcctggaacttggagatcattggcacttatgcccagacagagatgggtcatggaactcaccttcgaggcttggaaaccacagccacgtatgaccctgaaacccaggagttcattctcaacagtcctactgtgacctccattaaatggtggcctggtgggcttggaaagacttcaaatcatgcaatagttcttgcccagctcatcactaaggggaaatgctatggattacatgcctttatcgtacctattcgtgaaatcgggacccataagcctttgccaggaattaccgttggtgacatcggccccaaatttggttatgatgagatagacaatggctacctcaaaatggacaaccatcgtattcccagagaaaacatgctgatgaagtatgcccaggtgaagcctgatggcacatacgtgaaaccgctgagtaacaagctgacttacgggaccatggtgtttgtcaggtccttccttgtgggagaagctgctcgggctctgtctaaggcgtgcaccattgccatccgatacagcgctgtgaggcaccagtctgaaatcaagccaggtgaaccagaaccacagattttggattttcaaacccagcagtataaactctttccactcctggccactgcctatgccttccagtttgtgggcgcatacatgaaggagacctatcaccggattaacgaaggcattggtcaaggggacctgagtgaactgcctgagcttcatgccctcaccgctggactgaaggctttcacctcctggactgcaaacactggcattgaagcatgtcggatggcttgtggtgggcatggctattctcattgcagtggtcttccaaatatttatgtcaatttcaccccaagctgtacctttgagggagaaaacactgtcatgatgctccagacggctaggttcctgatgaaaagttatgatcaggtgcactcaggaaagttggtgtgtggcatggtgtcctatttgaacgacctgcccagtcagcgcatccagccacagcaggtagcagtctggccaaccatggtggatatcaacagccccgaaagcctaaccgaagcatataaactccgtgcagccagattagtagaaattgctgcaaaaaaccttcaaaaagaagtgattcacagaaaaagcaaggaggtagcttggaacctaacttctgttgaccttgttcgagcaagtgaggcacattgccactatgtggtagttaagctcttttcagaaaaactcctcaaaattcaagataaagccattcaagctgtcttaaggagtttatgtctgctgtattctctgtatggaatcagtcagaacgcgggggatttccttcaggggagcatcatgacagagcctcagattacacaagtaaaccagcgtgtaaaggagttactcactctgattcgctcagatgctgttgctttggttgatgcatttgattttcaggatgtgacacttggctctgtgcttggccgctatgatgggaatgtgtatgaaaacttgtttgagtgggctaagaactccccactgaacaaagcagaggtccacgaatcttacaagcacctgaagtcactgcagtccaagctctgaagtgtcacaaggacaagtttaatctgcttcagaaagcgcctgtgtgcaactcaaattttgtggaatctttttcgaattcaaatagctatagagcaaatgataaattgacccctttttataaatggagggaaaaaatgaacagatttcagagattaaatgaaaaaaagcagatgttttaagtgcaattaacactgaaagagacctgttaaaccattcagaaaaagcttaagaaatgcgatatgacttccttttgtaatgctgctgatcccagtagactatgacttttgataattagcagaatttaactactgagtagttgattattttcacattttaattgctaatcactggctatataagtgtttttaagcaaaggtatttttgaagtggtgtagaacccttccaagctttcctgctcagtgttctaccagacttaccctggggcctggcttaaaagcaggattgaagaaaagggactgggggaaggaaacttattggaaaacttgatgcgaatgagtttctgcttggcacagtctctgcctgcttgctctcctttgctgatggattgcatttatcaaactattcatgctagcatttttccaacgagggaacttattccgcacgggcctactgtaggaccattgtctcgtgtaattaggaattttccatttgaaggattgctaaattgtcacagtagtaggaagtatagggaaacctctcagctgtggcactgttgtagctttggagtgcagagtgtaactctgggacaatcagatttcacatattctgtcatcttggcataagccattaaaagcttggagattactgtatttggcattaaaaaaaaatgtcacttaggtcagcactcccagacgtagcacagaaaaaccctttgacacaaaccatgtgttctgatttttggttcagaaaatattgaaactgtgagttgttttttttttaacaactgggaaaaaacaaaaacaaaaaactatagttagaaaaatggaagttccataggttctatttcttactctatgtatggctttgttttcagtctatttctaggagctttctctgaatcgctaattgtcctttcagttgaaatctaatttatacaatcattctatacttaaaggttaaatacatcttaattaattttttcttaaagtcaatgtaagtcactttgttttgtttttttttaatctacgccatatgcctcatgaaaccagctgttctagaatcagtcctgagaatatggcttaattccatggaaacataactcctatcttgggacctgacataatatctatctatcctggggaactggtaatatgagacttataggttacagcagaaatgctacatgttgacaaaagccttaatcgttccactgggagaactaattgataattgtgttaagattgaagattaaccctgtgttaatctcacttgagtctatcctgacagtagttcagattctggaaaatgataaactgacctgctagatgtagaattgtttcaaaattagtgttgaaataccttgttcacagatgaatatctgggcaggatctgagggtgtttggaatgacaccccccaatccagttgcatagatgggatgtctttgcaggtttgaggagatcatcgacctgcagagccccctttgacccagtacctcacgttttatttaaaatctaaatctggggccaggcgtggtggctcacgcctgtaatccaagcactttgggaggccgaagcgggtggatcacctgaggtcaggagtttgagaccatcctggccaacatggtgaaaccccgtctctactgaaaaaaatacaaaaattagctgggcatggtggtagcacgcgcctgtagtcccagctactcgggaggctgaggcaggataatcgcttgaacttggcgggtagaggttgcagtgagccaagatggtgccactacactgcagcctgggtggctgagcgagactccgtctcaaaaaaaaaatctaaatctgacatttgatgctatttttattaatattggaatgttctgtcttgaactttattcaatataatcaagaataaagatagagtaaacgtcactgat

SEQ ID NO: 285863 - DNA, 4146 bp, Homo sapiens
gatttagattgtcactgccaccctcggtcggtgcttacttcgctgccagctggtcgtcgccatgaacccggacctgcgcagggagcgggattccgccagcttcaacccggagctgcttacacacatcctggacggcagccccgagaaaacccggcgccgccgagagatcgagaacatgatcctgaacgacccagacttccagcatgaggacttgaacttcctcactcgcagccagcgttatgaggtggctgtcaggaaaagtgccatcatggtgaagaagatgagggagtttggcatcgctgaccctgatgaaattatgtggtttaaaaaactacatttggtcaattttgtggaacctgtgggcctcaattactccatgtttattcctaccttgctgaatcagggcaccactgctcagaaagagaaatggctgctttcatccaaaggactccagataattggcacctacgcccagacggaaatgggccacggaactcaccttcgaggcttggaaaccacagccacgtatgaccctgaaacccaggagttcattctcaacagtcctactgtgacctccattaaatggtggcctggtgggcttggaaagacttcaaatcatgcaatagttcttgcccagctcatcactaaggggaaatgctatggattacatgcctttatcgtacctattcgtgaaatcgggacccataagcctttgccaggaattaccgttggtgacatcggccccaaatttggttatgatgagatagacaatggctacctcaaaatggacaaccatcgtattcccagagaaaacatgctgatgaagtatgcccaggtgaagcctgatggcacatacgtgaaaccgctgagtaacaagctgacttacgggaccatggtgtttgtcaggtccttccttgtgggagaagctgctcgggctctgtctaaggcgtgcaccattgccatccgatacagcgctgtgaggcaccagtctgaaatcaagccaggtgaaccagaaccacagattttggattttcaaacccagcagtataaactctttccactcctggccactgcctatgccttccagtttgtgggcgcatacatgaaggagacctatcaccggattaacgaaggcattggtcaaggggacctgagtgaactgcctgagcttcatgccctcaccgctggactgaaggctttcacctcctggactgcaaacactggcattgaagcatgtcggatggcttgtggtgggcatggctattctcattgcagtggtcttccaaatatttatgtcaatttcaccccaagctgtacctttgagggagaaaacactgtcatgatgctccagacggctaggttcctgatgaaaagttatgatcaggtgcactcaggaaagttggtgtgtggcatggtgtcctatttgaacgacctgcccagtcagcgcatccagccacagcaggtagcagtctggccaaccatggtggatatcaacagccccgaaagcctaaccgaagcatataaactccgtgcagccagattagtagaaattgctgcaaaaaaccttcaaaaagaagtgattcacagaaaaagcaaggaggtagcttggaacctaacttctgttgaccttgttcgagcaagtgaggcacattgccactatgtggtagttaagctcttttcagaaaaactcctcaaaattcaagataaagccattcaagctgtcttaaggagtttatgtctgctgtattctctgtatggaatcagtcagaacgcgggggatttccttcaggggagcatcatgacagagcctcagattacacaagtaaaccagcgtgtaaaggagttactcactctgattcgctcagatgctgttgctttggttgatgcatttgattttcaggatgtgacacttggctctgtgcttggccgctatgatgggaatgtgtatgaaaacttgtttgagtgggctaagaactccccactgaacaaagcagaggtccacgaatcttacaagcacctgaagtcactgcagtccaagctctgaagtgtcacaaggacaagtttaatctgcttcagaaagcgcctgtgtgcaactcaaattttgtggaatctttttcgaattcaaatagctatagagcaaatgataaattgacccctttttataaatggagggaaaaaatgaacagatttcagagattaaatgaaaaaaagcagatgttttaagtgcaattaacactgaaagagacctgttaaaccattcagaaaaagcttaagaaatgcgatatgacttccttttgtaatgctgctgatcccagtagactatgacttttgataattagcagaatttaactactgagtagttgattattttcacattttaattgctaatcactggctatataagtgtttttaagcaaaggtatttttgaagtggtgtagaacccttccaagctttcctgctcagtgttctaccagacttaccctggggcctggcttaaaagcaggattgaagaaaagggactgggggaaggaaacttattggaaaacttgatgcgaatgagtttctgcttggcacagtctctgcctgcttgctctcctttgctgatggattgcatttatcaaactattcatgctagcatttttccaacgagggaacttattccgcacgggcctactgtaggaccattgtctcgtgtaattaggaattttccatttgaaggattgctaaattgtcacagtagtaggaagtatagggaaacctctcagctgtggcactgttgtagctttggagtgcagagtgtaactctgggacaatcagatttcacatattctgtcatcttggcataagccattaaaagcttggagattactgtatttggcattaaaaaaaaatgtcacttaggtcagcactcccagacgtagcacagaaaaaccctttgacacaaaccatgtgttctgatttttggttcagaaaatattgaaactgtgagttgttttttttttaacaactgggaaaaaacaaaaacaaaaaactatagttagaaaaatggaagttccataggttctatttcttactctatgtatggctttgttttcagtctatttctaggagctttctctgaatcgctaattgtcctttcagttgaaatctaatttatacaatcattctatacttaaaggttaaatacatcttaattaattttttcttaaagtcaatgtaagtcactttgttttgtttttttttaatctacgccatatgcctcatgaaaccagctgttctagaatcagtcctgagaatatggcttaattccatggaaacataactcctatcttgggacctgacataatatctatctatcctggggaactggtaatatgagacttataggttacagcagaaatgctacatgttgacaaaagccttaatcgttccactgggagaactaattgataattgtgttaagattgaagattaaccctgtgttaatctcacttgagtctatcctgacagtagttcagattctggaaaatgataaactgacctgctagatgtagaattgtttcaaaattagtgttgaaataccttgttcacagatgaatatctgggcaggatctgagggtgtttggaatgacaccccccaatccagttgcatagatgggatgtctttgcaggtttgaggagatcatcgacctgcagagccccctttgacccagtacctcacgttttatttaaaatctaaatctggggccaggcgtggtggctcacgcctgtaatccaagcactttgggaggccgaagcgggtggatcacctgaggtcaggagtttgagaccatcctggccaacatggtgaaaccccgtctctactgaaaaaaatacaaaaattagctgggcatggtggtagcacgcgcctgtagtcccagctactcgggaggctgaggcaggataatcgcttgaacttggcgggtagaggttgcagtgagccaagatggtgccactacactgcagcctgggtggctgagcgagactccgtctcaaaaaaaaaatctaaatctgacatttgatgctatttttattaatattggaatgttctgtcttgaactttattcaatataatcaagaataaagatagagtaaacgtcactgat

SEQ ID NO: 285864 - DNA, 3215 bp, Homo sapiens
gatttagattgtcactgccaccctcggtcggtgcttacttcgctgccagctggtcgtcgccatgaacccggacctgcgcagggagcgggattccgccagcttcaacccggagctgcttacacacatcctggacggcagccccgagaaaacccggcgccgccgagagatcgagaacatgatcctgaacgacccagacttccagcatgaggacttgaacttcctcactcgcagccagcgttatgaggtggctgtcaggaaaagtgccatcatggtgaagaagatgagggagtttggcatcgctgaccctgatgaaattatgtggtttaaaaattttgtgcaccgagggcggcctgagcctctggatcttcacttgggcatgttcctgcccaccttgcttcaccaggcaactgcggagcagcaggagcgcttcttcatgcccgcctggaacttggagatcattggcacttatgcccagacagagatgggtcatggaactcaccttcgaggcttggaaaccacagccacgtatgaccctgaaacccaggagttcattctcaacagtcctactgtgacctccattaaatggtggcctggtgggcttggaaagacttcaaatcatgcaatagttcttgcccagctcatcactaaggggaaatgctatggattacatgcctttatcgtacctattcgtgaaatcgggacccataagcctttgccaggaattaccgttggtgacatcggccccaaatttggttatgatgagatagacaatggctacctcaaaatggacaaccatcgtattcccagagaaaacatgctgatgaagtatgcccaggtgaagcctgatggcacatacgtgaaaccgctgagtaacaagctgacttacgggaccatggtgtttgtcaggtccttccttgtgggagaagctgctcgggctctgtctaaggcgtgcaccattgccatccgatacagcgctgtgaggcaccagtctgaaatcaagccaggtgaaccagaaccacagattttggattttcaaacccagcagtataaactctttccactcctggccactgcctatgccttccagtttgtgggcgcatacatgaaggagacctatcaccggattaacgaaggcattggtcaaggggacctgagtgaactgcctgagcttcatgccctcaccgctggactgaaggctttcacctcctggactgcaaacactggcattgaagcatgtcggatggcttgtggtgggcatggctattctcattgcagtggtcttccaaatatttatgtcaatttcaccccaagctgtacctttgagggagaaaacactgtcatgatgctccagacggctaggttcctgatgaaaagttatgatcaggtgcactcaggaaagttggtgtgtggcatggtgtcctatttgaacgacctgcccagtcagcgcatccagccacagcaggtagcagtctggccaaccatggtggatatcaacagccccgaaagcctaaccgaagcatataaactccgtgcagccagattagtagaaattgctgcaaaaaaccttcaaaaagaagtgattcacagaaaaagcaaggaggtagcttggaacctaacttctgttgaccttgttcgagcaagtgaggcacattgccactatgtggtagttaagctcttttcagaaaaactcctcaaaattcaagataaagccattcaagctgtcttaaggagtttatgtctgctgtattctctgtatggaatcagtcagaacgcgggggatttccttcaggggagcatcatgacagagcctcagattacacaagtaaaccagcgtgtaaaggagttactcactctgattcgctcagatgctgttgctttggttgatgcatttgattttcaggatgtgacacttggctctgtgcttggccgctatgatgggaatgtgtatgaaaacttgtttgagtgggctaagaactccccactgaacaaagcagaggtccacgaatcttacaagcacctgaagtcactgcagtccaagctctgaagtgtcacaaggacaagtttaatctgcttcagaaagcgcctgtgtgcaactcaaattttgtggaatctttttcgaattcaaatagctatagagcaaatgataaattgacccctttttataaatggagggaaaaaatgaacagatttcagagattaaatgaaaaaaagcagatgttttaagtgcaattaacactgaaagagacctgttaaaccattcagaaaaagcttaagaaatgcgatatgacttccttttgtaatgctgctgatcccagtagactatgacttttgataattagcagaatttaactactgagtagttgattattttcacattttaattgctaatcactggctatataagtgtttttaagcaaaggtatttttgaagtggtgtagaacccttccaagctttcctgctcagtgttctaccagacttaccctggggcctggcttaaaagcaggattgaagaaaagggactgggggaaggaaacttattggaaaacttgatgcgaatgagtttctgcttggcacagtctctgcctgcttgctctcctttgctgatggattgcatttatcaaactattcatgctagcatttttccaacgagggaacttattccgcacgggcctactgtaggaccattgtctcgtgtaattaggaattttccatttgaaggattgctaaattgtcacagtagtaggaagtatagggaaacctctcagctgtggcactgttgtagctttggagtgcagagtgtaactctgggacaatcagatttcacatattctgtcatcttggcataagccattaaaagcttggagattactgtatttggcattaaaaaaaaatgtcacttaggtcagcactcccagacgtagcacagaaaaaccctttgacacaaaccatgtgttctgatttttggttcagaaaatattgaaactgtgagttgttttttttttaacaactgggaaaaaacaaaaacaaaaaactatagttagaaaaatggaagttccataggttctatttcttactctatgtatggctttgttttcagtctatttctaggagctttctctgaatcgctaattgtcctttcagttgaaatctaatttatacaatcattctatacttaaaggttaaatacatcttaattaattttttcttaaagtca

SEQ ID NO: 285865 - DNA, 4266 bp, Homo sapiens
gatttagattgtcactgccaccctcggtcggtgcttacttcgctgccagctggtcgtcgccatgaacccggacctgcgcagggagcgggattccgccagcttcaacccggagctgcttacacacatcctggacggcagccccgagaaaacccggcgccgccgagagatcgagaacatgatcctgaacgacccagacttccagcatgaggacttgaacttcctcactcgcagccagcgttatgaggtggctgtcaggaaaagtgccatcatggtgaagaagatgagggagtttggcatcgctgaccctgatgaaattatgtggtttaaaaaactacatttggtcaattttgtggaacctgtgggcctcaattactccatgtttattcctaccttgctgaatcagggcaccactgctcagaaagagaaatggctgctttcatccaaaggactccagataattggcacctacgcccagacggaaatgggccacggaactcaccttcgaggcttggaaaccacagccacgtatgaccctgaaacccaggagttcattctcaacagtcctactgtgacctccattaaatggtggcctggtgggcttggaaagacttcaaatcatgcaatagttcttgcccagctcatcactaaggggaaatgctatggattacatgcctttatcgtacctattcgtgaaatcgggacccataagcctttgccaggaattaccgttggtgacatcggccccaaatttggttatgatgagatagacaatggctacctcaaaatggacaaccatcgtattcccagagaaaacatgctgatgaagtatgcccaggtgaagcctgatggcacatacgtgaaaccgctgagtaacaagctgacttacgggaccatggtgtttgtcaggtccttccttgtgggagaagctgctcgggctctgtctaaggcgtgcaccattgccatccgatacagcgctgtgaggcaccagtctgaaatcaagccaggtgaaccagaaccacagattttggattttcaaacccagcagtataaactctttccactcctggccactgcctatgccttccagtttgtgggcgcatacatgaaggagacctatcaccggattaacgaaggcattggtcaaggggacctgagtgaactgcctgagcttcatgccctcaccgctggactgaaggctttcacctcctggactgcaaacactggcattgaagcatgtcggatggcttgtggtgggcatggctattctcattgcagtggtcttccaaatatttatgtcaatttcaccccaagctgtacctttgagggagaaaacactgtcatgatgctccagacggctaggttcctgatgaaaagttatgatcaggtgcactcaggaaagttggtgtgtggcatggtgtcctatttgaacgacctgcccagtcagcgcatccagccacagcaggtagcagtctggccaaccatggtggatatcaacagccccgaaagcctaaccgaagcatataaactccgtgcagccagattagtagaaattgctgcaaaaaaccttcaaaaagaagtgattcacagaaaaagcaaggaggtagcttggaacctaacttctgttgaccttgttcgagcaagtgaggcacattgccactatgtggtagttaagctcttttcagaaaaactcctcaaaattcaagataaagccattcaagctgtcttaaggagtttatgtctgctgtattctctgtatggaatcagtcagaacgcgggggatttccttcaggggagcatcatgacagagcctcagattacacaagtaaaccagcgtgtaaaggagttactcactctgattcgctcagatgctgttgctttggttgatgcatttgattttcaggatgtgacacttggctctgtgcttggccgctatgatgggaatgtgtatgaaaacttgtttgagtgggctaagaactccccactgaacaaagcagaggtccacgaatcttacaagcacctgaagtcactgcagtccaagctctgaagtgtcacaaggacaagtttaatctgcttcagaaagcgcctgtgtgcaactcaaattttgtggaatctttttcgaattcaaatagctatagagcaaatgataaattgacccctttttataaatggagggaaaaaatgaacagatttcagagattaaatgaaaaaaagcagatgttttaagtgcaattaacactgaaagagacctgttaaaccattcagaaaaagcttaagaaatgcgatatgacttccttttgtaatgctgctgatcccagtagactatgacttttgataattagcagaatttaactactgagtagttgattattttcacattttaattgctaatcactggctatataagtgtttttaagcaaaggtatttttgaagtggtgtagaacccttccaagctttcctgctcagtgttctaccagagaagaaaagggactgggggaaggaaacttattggaaaacttgatgcgaatgagtttctgcttggcacagtctctgcctgcttgctctcctttgctgatggattgcatttatcaaactattcatgctagcatttttccaacgagggaacttattccgcacgggcctactgtaggaccattgtctcgtgtaattaggaattttccatttgaaggattgctaaattgtcacagtagtagggaacctctcagctgtggcactgttgtagctttggagtcagagtgtactctgggcaatcagatttccacatattctgcatcttggataagcattaaaagttgggatactaatttggataaaaaaatgcactaggcaaactccagcgagacagaaagtatagggaaacctctcagctgtggcactgttgtagctttggagtgcagagtgtaactctgggacaatcagatttcacatattctgtcatcttggcataagccattaaaagcttggagattactgtatttggcattaaaaaaaaatgtcacttaggtcagcactcccagacgtagcacagaaaaaccctttgacacaaaccatgtgttctgatttttggttcagaaaatattgaaactgtgagttgttttttttttaacaactgggaaaaaacaaaaacaaaaaactatagttagaaaaatggaagttccataggttctatttcttactctatgtatggctttgttttcagtctatttctaggagctttctctgaatcgctaattgtcctttcagttgaaatctaatttatacaatcattctatacttaaaggttaaatacatcttaattaattttttcttaaagtcaatgtaagtcactttgttttgtttttttttaatctacgccatatgcctcatgaaaccagctgttctagaatcagtcctgagaatatggcttaattccatggaaacataactcctatcttgggacctgacataatatctatctatcctggggaactggtaatatgagacttataggttacagcagaaatgctacatgttgacaaaagccttaatcgttccactgggagaactaattgataattgtgttaagattgaagattaaccctgtgttaatctcacttgagtctatcctgacagtagttcagattctggaaaatgataaactgacctgctagatgtagaattgtttcaaaattagtgttgaaataccttgttcacagatgaatatctgggcaggatctgagggtgtttggaatgacaccccccaatccagttgcatagatgggatgtctttgcaggtttgaggagatcatcgacctgcagagccccctttgacccagtacctcacgttttatttaaaatctaaatctggggccaggcgtggtggctcacgcctgtaatccaagcactttgggaggccgaagcgggtggatcacctgaggtcaggagtttgagaccatcctggccaacatggtgaaaccccgtctctactgaaaaaaatacaaaaattagctgggcatggtggtagcacgcgcctgtagtcccagctactcgggaggctgaggcaggataatcgcttgaacttggcgggtagaggttgcagtgagccaagatggtgccactacactgcagcctgggtggctgagcgagactccgtctcaaaaaaaaaatctaaatctgacatttgatgctatttttattaatattggaatgttctgtcttgaactttattcaatataatcaagaataaagatagagtaaacgtcactgat

SEQ ID NO: 285866 - DNA, 4704 bp, Homo sapiens
ttagttcatgctctgctcattgcacaggttaggataaactggtagtaacattgcttcctaatcatgtgttgagaagtcgtgaagatcagttagatgagatgtattttgtactttaaactttttagatacgagctttgtcaaagtacaaaattgatccctataaaatctatgacacagcacagccaaggccaactactgtggattctgttttgtaagaagagagttgaggactaaatttcaatgtgatgtagagttaatccgtagtaatgttcattgaccattggggataaatttttacatgcccacattacttattgtaaaccctgaagacctttagcgatgtatgattctgccctggaatatgtatttactcttttggatatttgcttatattatctagggaaacatagttgaaattatttcttccttggagctcttgttaacagcgctataaataagtgttctatggagttatttttgctctttgaaacaaacaggtaaaacctaaataaagcaaaaaaaaaaaaccacacacattctaaaaaattcaaccaatcaaaccagcaaataacaccaacaacctccccttccaaaaattagagaagtttttatgctaaaacttaggtagaatttgcttagtggattaaatgtaaatacgaaatgaactgtgggaactgtggccttgaaataattagaagaagagagatcatcaggttctgctgctggctttttaggtagtaaaatggtaaatcttatatttaatttcataagaagggggtttacattttcctgaccttctccttgaaggccaaagctgtttggcaagaaggggttgtaggatgcagtttctaaaggaaggctgagatccttttctcttctctcctgtagactacatttggtcaattttgtggaacctgtgggcctcaattactccatgtttattcctaccttgctgaatcagggcaccactgctcagaaagagaaatggctgctttcatccaaaggactccagataattggcacctacgcccagacggaaatgggccacggaactcaccttcgaggcttggaaaccacagccacgtatgaccctgaaacccaggagttcattctcaacagtcctactgtgacctccattaaatggtggcctggtgggcttggaaagacttcaaatcatgcaatagttcttgcccagctcatcactaaggggaaatgctatggattacatgcctttatcgtacctattcgtgaaatcgggacccataagcctttgccaggaattaccgttggtgacatcggccccaaatttggttatgatgagatagacaatggctacctcaaaatggacaaccatcgtattcccagagaaaacatgctgatgaagtatgcccaggtgaagcctgatggcacatacgtgaaaccgctgagtaacaagctgacttacgggaccatggtgtttgtcaggtccttccttgtgggagaagctgctcgggctctgtctaaggcgtgcaccattgccatccgatacagcgctgtgaggcaccagtctgaaatcaagccaggtgaaccagaaccacagattttggattttcaaacccagcagtataaactctttccactcctggccactgcctatgccttccagtttgtgggcgcatacatgaaggagacctatcaccggattaacgaaggcattggtcaaggggacctgagtgaactgcctgagcttcatgccctcaccgctggactgaaggctttcacctcctggactgcaaacactggcattgaagcatgtcggatggcttgtggtgggcatggctattctcattgcagtggtcttccaaatatttatgtcaatttcaccccaagctgtacctttgagggagaaaacactgtcatgatgctccagacggctaggttcctgatgaaaagttatgatcaggtgcactcaggaaagttggtgtgtggcatggtgtcctatttgaacgacctgcccagtcagcgcatccagccacagcaggtagcagtctggccaaccatggtggatatcaacagccccgaaagcctaaccgaagcatataaactccgtgcagccagattagtagaaattgctgcaaaaaaccttcaaaaagaagtgattcacagaaaaagcaaggaggtagcttggaacctaacttctgttgaccttgttcgagcaagtgaggcacattgccactatgtggtagttaagctcttttcagaaaaactcctcaaaattcaagataaagccattcaagctgtcttaaggagtttatgtctgctgtattctctgtatggaatcagtcagaacgcgggggatttccttcaggggagcatcatgacagagcctcagattacacaagtaaaccagcgtgtaaaggagttactcactctgattcgctcagatgctgttgctttggttgatgcatttgattttcaggatgtgacacttggctctgtgcttggccgctatgatgggaatgtgtatgaaaacttgtttgagtgggctaagaactccccactgaacaaagcagaggtccacgaatcttacaagcacctgaagtcactgcagtccaagctctgaagtgtcacaaggacaagtttaatctgcttcagaaagcgcctgtgtgcaactcaaattttgtggaatctttttcgaattcaaatagctatagagcaaatgataaattgacccctttttataaatggagggaaaaaatgaacagatttcagagattaaatgaaaaaaagcagatgttttaagtgcaattaacactgaaagagacctgttaaaccattcagaaaaagcttaagaaatgcgatatgacttccttttgtaatgctgctgatcccagtagactatgacttttgataattagcagaatttaactactgagtagttgattattttcacattttaattgctaatcactggctatataagtgtttttaagcaaaggtatttttgaagtggtgtagaacccttccaagctttcctgctcagtgttctaccagacttaccctggggcctggcttaaaagcaggattgaagaaaagggactgggggaaggaaacttattggaaaacttgatgcgaatgagtttctgcttggcacagtctctgcctgcttgctctcctttgctgatggattgcatttatcaaactattcatgctagcatttttccaacgagggaacttattccgcacgggcctactgtaggaccattgtctcgtgtaattaggaattttccatttgaaggattgctaaattgtcacagtagtaggaagtatagggaaacctctcagctgtggcactgttgtagctttggagtgcagagtgtaactctgggacaatcagatttcacatattctgtcatcttggcataagccattaaaagcttggagattactgtatttggcattaaaaaaaaatgtcacttaggtcagcactcccagacgtagcacagaaaaaccctttgacacaaaccatgtgttctgatttttggttcagaaaatattgaaactgtgagttgttttttttttaacaactgggaaaaaacaaaaacaaaaaactatagttagaaaaatggaagttccataggttctatttcttactctatgtatggctttgttttcagtctatttctaggagctttctctgaatcgctaattgtcctttcagttgaaatctaatttatacaatcattctatacttaaaggttaaatacatcttaattaattttttcttaaagtcaatgtaagtcactttgttttgtttttttttaatctacgccatatgcctcatgaaaccagctgttctagaatcagtcctgagaatatggcttaattccatggaaacataactcctatcttgggacctgacataatatctatctatcctggggaactggtaatatgagacttataggttacagcagaaatgctacatgttgacaaaagccttaatcgttccactgggagaactaattgataattgtgttaagattgaagattaaccctgtgttaatctcacttgagtctatcctgacagtagttcagattctggaaaatgataaactgacctgctagatgtagaattgtttcaaaattagtgttgaaataccttgttcacagatgaatatctgggcaggatctgagggtgtttggaatgacaccccccaatccagttgcatagatgggatgtctttgcaggtttgaggagatcatcgacctgcagagccccctttgacccagtacctcacgttttatttaaaatctaaatctggggccaggcgtggtggctcacgcctgtaatccaagcactttgggaggccgaagcgggtggatcacctgaggtcaggagtttgagaccatcctggccaacatggtgaaaccccgtctctactgaaaaaaatacaaaaattagctgggcatggtggtagcacgcgcctgtagtcccagctactcgggaggctgaggcaggataatcgcttgaacttggcgggtagaggttgcagtgagccaagatggtgccactacactgcagcctgggtggctgagcgagactccgtctcaaaaaaaaaatctaaatctgacatttgatgctatttttattaatattggaatgttctgtcttgaactttattcaatataatcaagaataaagatagagtaaacgtcactgat

SEQ ID NO: 285867 - DNA, 4184 bp, Homo sapiens
gatttagattgtcactgccaccctcggtcggtgcttacttcgctgccagctggtcgtcgccatgaacccggacctgcgcagggagcgggattccgccagcttcaacccggagctgcttacacacatcctggacggcagccccgagaaaacccggcgccgccgagagatcgagaacatgatcctgaacgacccagacttccagcatgaggacttgaacttcctcactcgcagccagcgttatgaggtggctgtcaggaaaagtgccatcatggtgaagaagatgagggagtttggcatcgctgaccctgatgaaattatgtggtttaaaaattttgtgcaccgagggcggcctgagcctctggatcttcacttgggcatgttcctgcccaccttgcttcaccaggcaactgcggagcagcaggagcgcttcttcatgcccgcctggaacttggagatcattggcacttatgcccagacagagatgggtcatggaactcaccttcgaggcttggaaaccacagccacgtatgaccctgaaacccaggagttcattctcaacagtcctactgtgacctccattaaatggtggcctggtgggcgtaagtgaatttttcagcatttattggatgttttgaagttggaaagacttcaaatcatgcaatagttcttgcccagctcatcactaaggggaaatgctatggattacatgcctttatcgtacctattcgtgaaatcgggacccataagcctttgccaggaattaccgttggtgacatcggccccaaatttggttatgatgagatagacaatggctacctcaaaatggacaaccatcgtattcccagagaaaacatgctgatgaagtatgcccaggtgaagcctgatggcacatacgtgaaaccgctgagtaacaagctgacttacgggaccatggtgtttgtcaggtccttccttgtgggagaagctgctcgggctctgtctaaggcgtgcaccattgccatccgatacagcgctgtgaggcaccagtctgaaatcaagccaggtgaaccagaaccacagattttggattttcaaacccagcagtataaactctttccactcctggccactgcctatgccttccagtttgtgggcgcatacatgaaggagacctatcaccggattaacgaaggcattggtcaaggggacctgagtgaactgcctgagcttcatgccctcaccgctggactgaaggctttcacctcctggactgcaaacactggcattgaagcatgtcggatggcttgtggtgggcatggctattctcattgcagtggtcttccaaatatttatgtcaatttcaccccaagctgtacctttgagggagaaaacactgtcatgatgctccagacggctaggttcctgatgaaaagttatgatcaggtgcactcaggaaagttggtgtgtggcatggtgtcctatttgaacgacctgcccagtcagcgcatccagccacagcaggtagcagtctggccaaccatggtggatatcaacagccccgaaagcctaaccgaagcatataaactccgtgcagccagattagtagaaattgctgcaaaaaaccttcaaaaagaagtgattcacagaaaaagcaaggaggtagcttggaacctaacttctgttgaccttgttcgagcaagtgaggcacattgccactatgtggtagttaagctcttttcagaaaaactcctcaaaattcaagataaagccattcaagctgtcttaaggagtttatgtctgctgtattctctgtatggaatcagtcagaacgcgggggatttccttcaggggagcatcatgacagagcctcagattacacaagtaaaccagcgtgtaaaggagttactcactctgattcgctcagatgctgttgctttggttgatgcatttgattttcaggatgtgacacttggctctgtgcttggccgctatgatgggaatgtgtatgaaaacttgtttgagtgggctaagaactccccactgaacaaagcagaggtccacgaatcttacaagcacctgaagtcactgcagtccaagctctgaagtgtcacaaggacaagtttaatctgcttcagaaagcgcctgtgtgcaactcaaattttgtggaatctttttcgaattcaaatagctatagagcaaatgataaattgacccctttttataaatggagggaaaaaatgaacagatttcagagattaaatgaaaaaaagcagatgttttaagtgcaattaacactgaaagagacctgttaaaccattcagaaaaagcttaagaaatgcgatatgacttccttttgtaatgctgctgatcccagtagactatgacttttgataattagcagaatttaactactgagtagttgattattttcacattttaattgctaatcactggctatataagtgtttttaagcaaaggtatttttgaagtggtgtagaacccttccaagctttcctgctcagtgttctaccagacttaccctggggcctggcttaaaagcaggattgaagaaaagggactgggggaaggaaacttattggaaaacttgatgcgaatgagtttctgcttggcacagtctctgcctgcttgctctcctttgctgatggattgcatttatcaaactattcatgctagcatttttccaacgagggaacttattccgcacgggcctactgtaggaccattgtctcgtgtaattaggaattttccatttgaaggattgctaaattgtcacagtagtaggaagtatagggaaacctctcagctgtggcactgttgtagctttggagtgcagagtgtaactctgggacaatcagatttcacatattctgtcatcttggcataagccattaaaagcttggagattactgtatttggcattaaaaaaaaatgtcacttaggtcagcactcccagacgtagcacagaaaaaccctttgacacaaaccatgtgttctgatttttggttcagaaaatattgaaactgtgagttgttttttttttaacaactgggaaaaaacaaaaacaaaaaactatagttagaaaaatggaagttccataggttctatttcttactctatgtatggctttgttttcagtctatttctaggagctttctctgaatcgctaattgtcctttcagttgaaatctaatttatacaatcattctatacttaaaggttaaatacatcttaattaattttttcttaaagtcaatgtaagtcactttgttttgtttttttttaatctacgccatatgcctcatgaaaccagctgttctagaatcagtcctgagaatatggcttaattccatggaaacataactcctatcttgggacctgacataatatctatctatcctggggaactggtaatatgagacttataggttacagcagaaatgctacatgttgacaaaagccttaatcgttccactgggagaactaattgataattgtgttaagattgaagattaaccctgtgttaatctcacttgagtctatcctgacagtagttcagattctggaaaatgataaactgacctgctagatgtagaattgtttcaaaattagtgttgaaataccttgttcacagatgaatatctgggcaggatctgagggtgtttggaatgacaccccccaatccagttgcatagatgggatgtctttgcaggtttgaggagatcatcgacctgcagagccccctttgacccagtacctcacgttttatttaaaatctaaatctggggccaggcgtggtggctcacgcctgtaatccaagcactttgggaggccgaagcgggtggatcacctgaggtcaggagtttgagaccatcctggccaacatggtgaaaccccgtctctactgaaaaaaatacaaaaattagctgggcatggtggtagcacgcgcctgtagtcccagctactcgggaggctgaggcaggataatcgcttgaacttggcgggtagaggttgcagtgagccaagatggtgccactacactgcagcctgggtggctgagcgagactccgtctcaaaaaaaaaatctaaatctgacatttgatgctatttttattaatattggaatgttctgtcttgaactttattcaatataatcaagaataaagatagagtaaacgtcactgat

SEQ ID NO: 285868 - DNA, 3759 bp, Homo sapiens
ggctaaggaggagacgggtatcggcgaggctcaacagaaatggctgctttcatccaaaggactccagataattggcacctacgcccagacggaaatgggccacggaactcaccttcgaggcttggaaaccacagccacgtatgaccctgaaacccaggagttcattctcaacagtcctactgtgacctccattaaatggtggcctggtgggcttggaaagacttcaaatcatgcaatagttcttgcccagctcatcactaaggggaaatgctatggattacatgcctttatcgtacctattcgtgaaatcgggacccataagcctttgccaggaattaccgttggtgacatcggccccaaatttggttatgatgagatagacaatggctacctcaaaatggacaaccatcgtattcccagagaaaacatgctgatgaagtatgcccaggtgaagcctgatggcacatacgtgaaaccgctgagtaacaagctgacttacgggaccatggtgtttgtcaggtccttccttgtgggagaagctgctcgggctctgtctaaggcgtgcaccattgccatccgatacagcgctgtgaggcaccagtctgaaatcaagccaggtgaaccagaaccacagattttggattttcaaacccagcagtataaactctttccactcctggccactgcctatgccttccagtttgtgggcgcatacatgaaggagacctatcaccggattaacgaaggcattggtcaaggggacctgagtgaactgcctgagcttcatgccctcaccgctggactgaaggctttcacctcctggactgcaaacactggcattgaagcatgtcggatggcttgtggtgggcatggctattctcattgcagtggtcttccaaatatttatgtcaatttcaccccaagctgtacctttgagggagaaaacactgtcatgatgctccagacggctaggttcctgatgaaaagttatgatcaggtgcactcaggaaagttggtgtgtggcatggtgtcctatttgaacgacctgcccagtcagcgcatccagccacagcaggtagcagtctggccaaccatggtggatatcaacagccccgaaagcctaaccgaagcatataaactccgtgcagccagattagtagaaattgctgcaaaaaaccttcaaaaagaagtgattcacagaaaaagcaaggaggtagcttggaacctaacttctgttgaccttgttcgagcaagtgaggcacattgccactatgtggtagttaagctcttttcagaaaaactcctcaaaattcaagataaagccattcaagctgtcttaaggagtttatgtctgctgtattctctgtatggaatcagtcagaacgcgggggatttccttcaggggagcatcatgacagagcctcagattacacaagtaaaccagcgtgtaaaggagttactcactctgattcgctcagatgctgttgctttggttgatgcatttgattttcaggatgtgacacttggctctgtgcttggccgctatgatgggaatgtgtatgaaaacttgtttgagtgggctaagaactccccactgaacaaagcagaggtccacgaatcttacaagcacctgaagtcactgcagtccaagctctgaagtgtcacaaggacaagtttaatctgcttcagaaagcgcctgtgtgcaactcaaattttgtggaatctttttcgaattcaaatagctatagagcaaatgataaattgacccctttttataaatggagggaaaaaatgaacagatttcagagattaaatgaaaaaaagcagatgttttaagtgcaattaacactgaaagagacctgttaaaccattcagaaaaagcttaagaaatgcgatatgacttccttttgtaatgctgctgatcccagtagactatgacttttgataattagcagaatttaactactgagtagttgattattttcacattttaattgctaatcactggctatataagtgtttttaagcaaaggtatttttgaagtggtgtagaacccttccaagctttcctgctcagtgttctaccagacttaccctggggcctggcttaaaagcaggattgaagaaaagggactgggggaaggaaacttattggaaaacttgatgcgaatgagtttctgcttggcacagtctctgcctgcttgctctcctttgctgatggattgcatttatcaaactattcatgctagcatttttccaacgagggaacttattccgcacgggcctactgtaggaccattgtctcgtgtaattaggaattttccatttgaaggattgctaaattgtcacagtagtaggaagtatagggaaacctctcagctgtggcactgttgtagctttggagtgcagagtgtaactctgggacaatcagatttcacatattctgtcatcttggcataagccattaaaagcttggagattactgtatttggcattaaaaaaaaatgtcacttaggtcagcactcccagacgtagcacagaaaaaccctttgacacaaaccatgtgttctgatttttggttcagaaaatattgaaactgtgagttgttttttttttaacaactgggaaaaaacaaaaacaaaaaactatagttagaaaaatggaagttccataggttctatttcttactctatgtatggctttgttttcagtctatttctaggagctttctctgaatcgctaattgtcctttcagttgaaatctaatttatacaatcattctatacttaaaggttaaatacatcttaattaattttttcttaaagtcaatgtaagtcactttgttttgtttttttttaatctacgccatatgcctcatgaaaccagctgttctagaatcagtcctgagaatatggcttaattccatggaaacataactcctatcttgggacctgacataatatctatctatcctggggaactggtaatatgagacttataggttacagcagaaatgctacatgttgacaaaagccttaatcgttccactgggagaactaattgataattgtgttaagattgaagattaaccctgtgttaatctcacttgagtctatcctgacagtagttcagattctggaaaatgataaactgacctgctagatgtagaattgtttcaaaattagtgttgaaataccttgttcacagatgaatatctgggcaggatctgagggtgtttggaatgacaccccccaatccagttgcatagatgggatgtctttgcaggtttgaggagatcatcgacctgcagagccccctttgacccagtacctcacgttttatttaaaatctaaatctggggccaggcgtggtggctcacgcctgtaatccaagcactttgggaggccgaagcgggtggatcacctgaggtcaggagtttgagaccatcctggccaacatggtgaaaccccgtctctactgaaaaaaatacaaaaattagctgggcatggtggtagcacgcgcctgtagtcccagctactcgggaggctgaggcaggataatcgcttgaacttggcgggtagaggttgcagtgagccaagatggtgccactacactgcagcctgggtggctgagcgagactccgtctcaaaaaaaaaatctaaatctgacatttgatgctatttttattaatattggaatgttctgtcttgaactttattcaatataatcaagaataaagatagagtaaacgtcactgat

SEQ ID NO: 285869 - DNA, 3119 bp, Homo sapiens
tagctcggtaccccggaaactgctgcggatgcactcctggccactgcctatgccttccagtttgtgggcgcatacatgaaggagacctatcaccggattaacgaaggcattggtcaaggggacctgagtgaactgcctgagcttcatgccctcaccgctggactgaaggctttcacctcctggactgcaaacactggcattgaagcatgtcggatggcttgtggtgggcatggctattctcattgcagtggtcttccaaatatttatgtcaatttcaccccaagctgtacctttgagggagaaaacactgtcatgatgctccagacggctaggttcctgatgaaaagttatgatcaggtgcactcaggaaagttggtgtgtggcatggtgtcctatttgaacgacctgcccagtcagcgcatccagccacagcaggtagcagtctggccaaccatggtggatatcaacagccccgaaagcctaaccgaagcatataaactccgtgcagccagattagtagaaattgctgcaaaaaaccttcaaaaagaagtgattcacagaaaaagcaaggaggtagcttggaacctaacttctgttgaccttgttcgagcaagtgaggcacattgccactatgtggtagttaagctcttttcagaaaaactcctcaaaattcaagataaagccattcaagctgtcttaaggagtttatgtctgctgtattctctgtatggaatcagtcagaacgcgggggatttccttcaggggagcatcatgacagagcctcagattacacaagtaaaccagcgtgtaaaggagttactcactctgattcgctcagatgctgttgctttggttgatgcatttgattttcaggatgtgacacttggctctgtgcttggccgctatgatgggaatgtgtatgaaaacttgtttgagtgggctaagaactccccactgaacaaagcagaggtccacgaatcttacaagcacctgaagtcactgcagtccaagctctgaagtgtcacaaggacaagtttaatctgcttcagaaagcgcctgtgtgcaactcaaattttgtggaatctttttcgaattcaaatagctatagagcaaatgataaattgacccctttttataaatggagggaaaaaatgaacagatttcagagattaaatgaaaaaaagcagatgttttaagtgcaattaacactgaaagagacctgttaaaccattcagaaaaagcttaagaaatgcgatatgacttccttttgtaatgctgctgatcccagtagactatgacttttgataattagcagaatttaactactgagtagttgattattttcacattttaattgctaatcactggctatataagtgtttttaagcaaaggtatttttgaagtggtgtagaacccttccaagctttcctgctcagtgttctaccagacttaccctggggcctggcttaaaagcaggattgaagaaaagggactgggggaaggaaacttattggaaaacttgatgcgaatgagtttctgcttggcacagtctctgcctgcttgctctcctttgctgatggattgcatttatcaaactattcatgctagcatttttccaacgagggaacttattccgcacgggcctactgtaggaccattgtctcgtgtaattaggaattttccatttgaaggattgctaaattgtcacagtagtaggaagtatagggaaacctctcagctgtggcactgttgtagctttggagtgcagagtgtaactctgggacaatcagatttcacatattctgtcatcttggcataagccattaaaagcttggagattactgtatttggcattaaaaaaaaatgtcacttaggtcagcactcccagacgtagcacagaaaaaccctttgacacaaaccatgtgttctgatttttggttcagaaaatattgaaactgtgagttgttttttttttaacaactgggaaaaaacaaaaacaaaaaactatagttagaaaaatggaagttccataggttctatttcttactctatgtatggctttgttttcagtctatttctaggagctttctctgaatcgctaattgtcctttcagttgaaatctaatttatacaatcattctatacttaaaggttaaatacatcttaattaattttttcttaaagtcaatgtaagtcactttgttttgtttttttttaatctacgccatatgcctcatgaaaccagctgttctagaatcagtcctgagaatatggcttaattccatggaaacataactcctatcttgggacctgacataatatctatctatcctggggaactggtaatatgagacttataggttacagcagaaatgctacatgttgacaaaagccttaatcgttccactgggagaactaattgataattgtgttaagattgaagattaaccctgtgttaatctcacttgagtctatcctgacagtagttcagattctggaaaatgataaactgacctgctagatgtagaattgtttcaaaattagtgttgaaataccttgttcacagatgaatatctgggcaggatctgagggtgtttggaatgacaccccccaatccagttgcatagatgggatgtctttgcaggtttgaggagatcatcgacctgcagagccccctttgacccagtacctcacgttttatttaaaatctaaatctggggccaggcgtggtggctcacgcctgtaatccaagcactttgggaggccgaagcgggtggatcacctgaggtcaggagtttgagaccatcctggccaacatggtgaaaccccgtctctactgaaaaaaatacaaaaattagctgggcatggtggtagcacgcgcctgtagtcccagctactcgggaggctgaggcaggataatcgcttgaacttggcgggtagaggttgcagtgagccaagatggtgccactacactgcagcctgggtggctgagcgagactccgtctcaaaaaaaaaatctaaatctgacatttgatgctatttttattaatattggaatgttctgtcttgaactttattcaatataatcaagaataaagatagagtaaacgtcactgat

SEQ ID NO: 285870 - DNA, 3161 bp, Homo sapiens
gatttagattgtcactgccaccctcggtcggtgcttacttcgctgccagctggtcgtcgccatgaacccggacctgcgcagggagcgggattccgccagcttcaacccggagctgcttacacacatcctggacggcagccccgagaaaacccggcgccgccgagagatcgagaacatgatcctgaacgacccagacttccagcatgaggacttgaacttcctcactcgcagccagcgttatgaggtggctgtcaggaaaagtgccatcatggtgaagaagatgagggagtttggcatcgctgaccctgatgaaattatgtggtttaaaaattttgtgcaccgagggcggcctgagcctctggatcttcacttgggcatgttcctgcccaccttgcttcaccaggcaactgcggagcagcaggagcgcttcttcatgcccgcctggaacttggagatcattggcacttatgcccagacagagatgggtcatggaactcaccttcgaggcttggaaaccacagccacgtatgaccctgaaacccaggagttcattctcaacagtcctactgtgacctccattaaatggtggcctggtgggcttggaaagacttcaaatcatgcaatagttcttgcccagctcatcactaaggggaaatgctatggattacatgcctttatcgtacctattcgtgaaatcgggacccataagcctttgccaggaattaccgttggtgacatcggccccaaatttggttatgatgagatagacaatggctacctcaaaatggacaaccatcgtattcccagagaaaacatgctgatgaagtatgcccaggtgaagcctgatggcacatacgtgaaaccgctgagtaacaagctgacttacgggaccatggtgtttgtcaggtccttccttgtgggagaagctgctcgggctctgtctaaggcgtgcaccattgccatccgatacagcgctgtgaggcaccagtctgaaatcaagccaggtgaaccagaaccacagattttggattttcaaacccagcagtataaactctttccactcctggccactgcctatgccttccagtttgtgggcgcatacatgaaggagacctatcaccggattaacgaaggcattggtcaaggggacctgagtgaactgcctgagcttcatgccctcaccgctggactgaaggctttcacctcctggactgcaaacactggcattgaagcatgtcggatggcttgtggtgggcatggctattctcattgcagtggtcttccaaatatttatgtcaatttcaccccaagctgtacctttgagggagaaaacactgtcatgatgctccagacggctaggttcctgatgaaaagttatgatcaggtgcactcaggaaagttggtgtgtggcatggtgtcctatttgaacgacctgcccagtcagcgcatccagccacagcaggtagcagtctggccaaccatggtggatatcaacagccccgaaagcctaaccgaagcatataaactccgtgcagccagattagtagaaattgctgcaaaaaaccttcaaaaagaagtgattcacagaaaaagcaaggaggtagcttggaacctaacttctgttgaccttgttcgagcaagtgaggcacattgccactatgtggtagttaagctcttttcagaaaaactcctcaaaattcaagataaagccattcaagctgtcttaaggagtttatgtctgctgtattctctgtatggaatcagtcagaacgcgggggatttccttcaggggagcatcatgacagagcctcagattacacaagtaaaccagcgtgtaaaggagttactcactctgattcgctcagatgctgttgctttggttgatgcatttgattttcaggatgtgacacttggctctgtgcttggccgctatgatgggaatgtgtatgaaaacttgtttgagtgggctaagaactccccactgaacaaagcagaggtccacgaatcttacaagcacctgaagtcactgcagtccaagctctgaagtgtcacaaggacaagtttaatctgcttcagaaagcgcctgtgtgcaactcaaattttgtggaatctttttcgaattcaaatagctatagagcaaatgataaattgacccctttttataaatggagggaaaaaatgaacagatttcagagattaaatgaaaaaaagcagatgttttaagtgcaattaacactgaaagagacctgttaaaccattcagaaaaagcttaagaaatgcgatatgacttccttttgtaatgctgctgatcccagtagactatgacttttgataattagcagaatttaactactgagtagttgattattttcacattttaattgctaatcactggctatataagtgtttttaagcaaaggtatttttgaagtggtgtagaacccttccaagctttcctgctcagtgttctaccagacttaccctggggcctggcttaaaagcaggattgaagaaaagggactgggggaaggaaacttattggaaaacttgatgcgaatgagtttctgcttggcacagtctctgcctgttccaacgagggaacttattccgcacgggcctactgtaggaccattgtctcgtgtaattaggaattttccatttgaaggattgctaaattgtcacagtagtaggaagtatagggaaacctctcagctgtggcactgttgtagctttggagtgcagagtgtaactctgggacaatcagatttcacatattctgtcatcttggcataagccattaaaagcttggagattactgtatttggcattaaaaaaaaatgtcacttaggtcagcactcccagacgtagcacagaaaaaccctttgacacaaaccatgtgttctgatttttggttcagaaaatattgaaactgtgagttgttttttttttaacaactgggaaaaaacaaaaacaaaaaactatagttagaaaaatggaagttccataggttctatttcttactctatgtatggctttgttttcagtctatttctaggagctttctctgaatcgctaattgtcctttcagttgaaatctaatttatacaatcattctatacttaaaggttaaatacatcttaattaattttttcttaaagtca

SEQ ID NO: 285871 - DNA, 2336 bp, Homo sapiens
gatttagattgtcactgccaccctcggtcggtgcttacttcgctgccagctggtcgtcgccatgaacccggacctgcgcagggagcgggattccgccagcttcaacccggagctgcttacacacatcctggacggcagccccgagaaaacccggcgccgccgagagatcgagaacatgatcctgaacgacccagacttccagcatgaggacttgaacttcctcactcgcagccagcgttatgaggtggctgtcaggaaaagtgccatcatggtgaagaagatgagggagtttggcatcgctgaccctgatgaaattatgtggtttaaaaattttgtgcaccgagggcggcctgagcctctggatcttcacttgggcatgttcctgcccaccttgcttcaccaggcaactgcggagcagcaggagcgcttcttcatgcccgcctggaacttggagatcattggcacttatgcccagacagagatgggtcatggaactcaccttcgaggcttggaaaccacagccacgtatgaccctgaaacccaggagttcattctcaacagtcctactgtgacctccattaaatggtggcctggtgggcttggaaagacttcaaatcatgcaatagttcttgcccagctcatcactaaggggaaatgctatggattacatgcctttatcgtacctattcgtgaaatcgggacccataagcctttgccaggaattaccgttggtgacatcggccccaaatttggttatgatgagatagacaatggctacctcaaaatggacaaccatcgtattcccagagaaaacatgctgatgaagtatgcccaggtgaagcctgatggcacatacgtgaaaccgctgagtaacaagctgacttacgggaccatggtgtttgtcaggtccttccttgtgggagaagctgctcgggctctgtctaaggcgtgcaccattgccatccgatacagcgctgtgaggcaccagtctgaaatcaagccaggtgaaccagaaccacagattttggattttcaaacccagcagtataaactctttccactcctggccactgcctatgccttccagtttgtgggcgcatacatgaaggagacctatcaccggattaacgaaggcattggtcaaggggacctgagtgaactgcctgagcttcatgccctcaccgctggactgaaggctttcacctcctggactgcaaacactggcattgaagcatgtcggatggcttgtggtgggcatggctattctcattgcagtggtcttccaaatatttatgtcaatttcaccccaagctgtacctttgagggagaaaacactgtcatgatgctccagacggctaggttcctgatgaaaagttatgatcaggtgcactcaggaaagttggtgtgtggcatggtgtcctatttgaacgacctgcccagtcagcgcatccagccacagcaggtagcagtctggccaaccatggtggatatcaacagccccgaaagcctaaccgaagcatataaactccgtgcagccagattagtagaaattgctgcaaaaaaccttcaaaaagaagtgattcacagaaaaagcaaggaggtagcttggaacctaacttctgttgaccttgttcgagcaagtgaggcacattgccactatgtggtagttaagctcttttcagaaaaactcctcaaaattcaagataaagccattcaagctgtcttaaggagtttatgtctgctgtattctctgtatggaatcagtcagaacgcgggggatttccttcaggggagcatcatgacagagcctcagattacacaagtaaaccagcgtgtaaaggagttactcactctgattcgctcagatgctgttgctttggttgatgcatttgattttcaggatgtgacacttggctctgtgcttggccgctatgatgggaatgtgtatgaaaacttgtttgagtgggctaagaactccccactgaacaaagcagaggtccacgaatcttacaagcacctgaagtcactgcagtccaagctctgaagtgtcacaaggacaagtttaatctgcttcagaaagcgcctgtgtgcaactcaaattttgtggaatctttttcgaattcaaatagctatagagcaaatgataaattgacccctttttataaatggagggaaaaaatgaacagatttcagagattaaatgaaaaaaagcagatgttttaagtgcaattaacactgaaagagaccttaattgtcctttcagttgaaatctaatttatacaatcattctatacttaaaggttaaatacatcttaattaattttttcttaaagtca

SEQ ID NO: 285872 - DNA, 1772 bp, Homo sapiens
ttagttcatgctctgctcattgcacaggttaggataaactggtagtaacattgcttcctaatcatgtgttgagaagtcgtgaagatcagttagatgagatgtattttgtactttaaactttttagatacgagctttgtcaaagtacaaaattgatccctataaaatctatgacacagcacagccaaggccaactactgtggattctgttttgtaagaagagagttgaggactaaatttcaatgtgatgtagagttaatccgtagtaatgttcattgaccattggggataaatttttacatgcccacattacttattgtaaaccctgaagacctttagcgatgtatgattctgccctggaatatgtatttactcttttggatatttgcttatattatctagggaaacatagttgaaattatttcttccttggagctcttgttaacagcgctataaataagtgttctatggagttatttttgctctttgaaacaaacaggtaaaacctaaataaagcaaaaaaaaaaaaccacacacattctaaaaaattcaaccaatcaaaccagcaaataacaccaacaacctccccttccaaaaattagagaagtttttatgctaaaacttaggtagaatttgcttagtggattaaatgtaaatacgaaatgaactgtgggaactgtggccttgaaataattagaagaagagagatcatcaggttctgctgctggctttttaggtagtaaaatggtaaatcttatatttaatttcataagaagggggtttacattttcctgaccttctccttgaaggccaaagctgtttggcaagaaggggttgtaggatgcagtttctaaaggaaggctgagatccttttctcttctctcctgtagactacatttggtcaattttgtggaacctgtgggcctcaattactccatgtttattcctaccttgctgaatcagggcaccactgctcagaaagagaaatggctgctttcatccaaaggactccagataattggcacctacgcccagacggaaatgggccacggaactcaccttcgaggcttggaaaccacagccacgtatgaccctgaaacccaggagttcattctcaacagtcctactgtgacctccattaaatggtggcctggtgggcttggaaagacttcaaatcatgcaatagttcttgcccagctcatcactaaggggaaatgctatggattacatgcctttatcgtacctattcgtgaaatcgggacccataagcctttgccaggaattaccgttggtgacatcggccccaaatttggttatgatgagatagacaatggctacctcaaaatggacaaccatcgtattcccagagaaaacatgctgatgaagtatgcccaggtgaagcctgatggcacatacgtgaaaccgctgagtaacaagctgacttacgggaccatggtgtttgtcaggtccttccttgtgggagaagctgctcgggctctgtctaaggcgtgcaccattgccatccgatacagcgctgtgaggcaccagtctgaaatcaagccagggtaaggatagggtcctagatgggctcagtaccaaaggcctagtttttaccccattcagatcccagaattcccaaatgtcaatacagaagatgcattagcactgcaaaattggctagggtgataactgggcctgtaatttcatatctaggcttccttttcttaagaggaaagacagaaataaccacccttgctataatcagtgactgcca

SEQ ID NO: 285873 - DNA, 1366 bp, Homo sapiens
ttagttcatgctctgctcattgcacaggttaggataaactggtagtaacattgcttcctaatcatgtgttgagaagtcgtgaagatcagttagatgagatgtattttgtactttaaactttttagatacgagctttgtcaaagtacaaaattgatccctataaaatctatgacacagcacagccaaggccaactactgtggattctgttttgtaagaagagagttgaggactaaatttcaatgtgatgtagagttaatccgtagtaatgttcattgaccattggggataaatttttacatgcccacattacttattgtaaaccctgaagacctttagcgatgtatgattctgccctggaatatgtatttactcttttggatatttgcttatattatctagggaaacatagttgaaattatttcttccttggagctcttgttaacagcgctataaataagtgttctatggagttatttttgctctttgaaacaaacaggtaaaacctaaataaagcaaaaaaaaaaaaccacacacattctaaaaaattcaaccaatcaaaccagcaaataacaccaacaacctccccttccaaaaattagagaagtttttatgctaaaacttaggtagaatttgcttagtggattaaatgtaaatacgaaatgaactgtgggaactgtggccttgaaataattagaagaagagagatcatcaggttctgctgctggctttttaggtagtaaaatggtaaatcttatatttaatttcataagaagggggtttacattttcctgaccttctccttgaaggccaaagctgtttggcaagaaggggttgtaggatgcagtttctaaaggaaggctgagatccttttctcttctctcctgtagactacatttggtcaattttgtggaacctgtgggcctcaattactccatgtttattcctaccttgctgaatcagggcaccactgctcagaaagagaaatggctgctttcatccaaaggactccagataattggcacctacgcccagacggaaatgggccacggttagtccacattgagggtctgtgggtaacccacctcaggacatcagttaacagtgattgctggcatttgacttttttctgctgctacctgtttgggattctatttttaagttgttaagtcaaaattcaacttcttgttttctcctagacattttccctggaaactggtccagggctctggcctataaacgtcattcactgttatttcctaaagccttttattattgaacagcttgaaaagatggggtttacagtgcagcggggaaccccattatgttactctgggtctaatgagtaaagactttgttggaaattct

SEQ ID NO: 285874 - DNA, 201 bp, Homo sapiens
gatctggccattgcactccatccagcctaggcaacaagaatgaaactccatctcaaaagaaacaaaagaaagtagagttactaaaagcatgtttactggtgacttttaggttcctgatgaaaagttatgatcaggtgcactcaggaaagttggtgtgtggcatggtgtcctatttgaacgacctgcccagtcagcgcatcc

SEQ ID NO: 285875 - DNA, 1962 bp, Homo sapiens
aggtctcacagcagacggtgccgacgcagcggtgttgcacctccctctccggctctgctgcccgggatttccccagaacctgcgccgcgcgagaaggagcctgggagcatccgcccacactgcccggacagtcggctcgactcggtgctctcggccccagccgggctccgctcctcgggcgcgcgaggggccgtggtggcggcggcgcccggcatgtttcatagtccgcggcggctctgctcggccctgctgcagagggacgcgcccggcctgcgccgcctgcccgccccagggctgcgccgcccgttgtccccgccggctgctgttcccaggcccgcatccccccggctgctggcggcggcctcggcggcctcgggcgccgcgaggtcgtgttcccgaacagtgtgttccatgggaaccggtacaagcagactctatagtgctctcgccaagacactgaacagcagcgctgcctcccagcacccagagtatttggtgtcacctgacccagagcatctggagcccattgatcctaaagagcttcttgaggaatgcagggccgtcctgcacacccgacctccccggttccagagggattttgtggatctgaggacagattgccctagtacccacccacctatcagggttatgcaatggaacatcctcgcccaagctcttggagaaggcaaagacaactttgtacagtgccctgttgaagcactcaaatgggaagaaaggaaatgtctcatcctggaagaaatcctggcctaccagcctgatatattgtgcctccaagaggtggaccactattttgacaccttccagccactcctcagtagactaggctatcaaggcacgtttttccccaaaccctggtcaccttgtctagatgtagaacacaacaatggaccagatggttgtgccttattttttcttcaaaaccgattcaagctagtcaacagtgccaatattaggctgacagccatgacattgaaaaccaaccaggtggccattgcacagaccctggagtgcaaggagtcaggccgacagttctgcatcgctgttacccatctaaaagcacgcactggctgggagcggtttcgatcagctcaaggctgtgacctccttcagaacctgcaaaacatcacccaaggagccaagattccccttattgtgtgtggggacttcaatgcagagccaacagaagaggtctacaaacactttgcttcctccagcctcaacctgaacagcgcctacaagctgctgagtgctgatgggcagtcagaacccccatacactacctggaagatccggacctcaggggagtgcaggcacaccctggattacatctggtattctaaacatgctctaaatgtaaggtcagctctcgatctgctcactgaagaacagattggacccaacaggttaccttccttcaattatccttcagaccacctgtctctagtgtgtgacttcagctttactgaggaatctgatggactttcataaatacttgcttttgtctttttaatcacaggagtctatttttttttttttttttttttgagacagagtctcgctctgttgcctaggcggagtacagtggcctgatctcggctcactgcaagatccgcctcccgggttcatggcattctcctgcctcagcctccagggcaactgggacaacaggcgcccgtcaccacgcccagctaattttttgtatttttagtagagacggggtttcaccgtgttagccaggatggtctcgatctcctgacctgaatcacaagagtcttaacagggaatgtttcaggaaacaaataggataagacaatgccagaggaaggatagaaacatgggaagtttctatcatttcattttctgcgtttccagcatgctccttggaaaagactccctttagtccctttttcaattaaaacctatggtgaaaaaggcgtttgc

SEQ ID NO: 285876 - DNA, 1393 bp, Homo sapiens
  misc_feature (103)..(103): n is a, c, g, or t
tttttttttttcctggaaaataaggggagattccgtgacttaccaatctttgattctttttccctaagtaggaaaagctgcctatttaaaataagttccattnattctgagtagtgtccataatagtcagggttaaaactaatacttggtgttaaatatttggtgtttaaaaaaaccaaaaaaattttaaaagaaaattggcatttatttcattttatatagcttagatccctggcactgcaaagcagtttccttaagtaagatcttaatatcctggaatatagttaacatgaaatcatttcgaaacaaaagatctgttgtttgcttcatccacatagtgagaggtgatttagtttggatggggtaatacagtttggacagagagccactccaagcatttaaagcagaggaagcattctgagggtcttgagtgatgccaaacctcctgggtactttgaagtcacggttttgtaagagctgacaactgactagctttttcttttcagctcttggagaaggcaaagacaactttgtacagtgccctgttgaagcactcaaatgggaagaaaggaaatgtctcatcctggaagaaatcctggcctaccagcctgatatattgtgcctccaagaggtggaccactattttgacaccttccagccactcctcagtagactaggctatcaaggcacgtttttccccaaaccctggtcaccttgtctagatgtagaacacaacaatggaccagatggttgtgccttattttttcttcaaaaccgattcaagctagtcaacagtgccaatattaggctgacagccatgacattgaaaaccaaccaggtggccattgcacagaccctggagtgcaaggagtcaggccgacagttctgcatcgctgttacccatctaaaagcacgcactggctgggagcggtttcgatcagctcaaggctgtgacctccttcagaacctgcaaaacatcacccaaggagccaagattccccttattgtgtgtggggacttcaatgcagagccaacagaagaggtctacaaacactttgcttcctccagcctcaacctgaacagcgcctacaagctgctgagtgctgatgggcagtcagaacccccatacactacctggaagatccggacctcaggggagtgcaggcacaccctggattacatctggtattctaaacatgctctaaatgtaaggtcagctctcgatctgctcactgaagaacagattggacccaacaggttaccttccttcaattatccttcagaccacctgtctctagtgtgtgacttcagctttactgaggaatctgatggactttcataaatacttgcttttgtctttttctcgtgccgaattcttgcctcgagggggccc

SEQ ID NO: 285877 - DNA, 815 bp, Homo sapiens
ccgtctagtcgaggcctgggtttgaatcggccgaggagcggtgttgcacctccctctccggctctgctgcccgggatttccccagaacctgcgccgcgcgagaaggagcctgggagcatccgcccacactgcccggacagtcggctcgactcggtgctctcggccccagccgggctccgctcctcgggcgcgcgaggggccgtggtggcggcggcgcccggcatgtttcatagtccgcggcggctctgctcggccctgctgcagagggacgcgcccggcctgcgccgcctgcccgccccagggctgcgccgcccgttgtccccgccggctgctgttcccaggcccgcatccccccggctgctggcggcggcctcggcggcctcgggcgccgcgaggtcgtgttcccgaacagtgtgttccatgggaaccggtacaagcagactctatagtgctctcgccaagacactgaacagcagcgctgcctcccagcacccagagtatttggtgtcacctgacccagagcatctggagcccattgatcctaaagagcttcttgaggaatgcagggccgtcctgcacacccgacctccccggttccagagggattttgtggatctgaggacagattgccctagtacccacccacctatcagggttatgcaatggaacatcctcgcccaaggtatgctggatgcttttgtgcctctgcagtcaagtttgctgtgactgcctttctgcttctgcacatccacagtgcactgttttatgtggaaggaagaggtgtgggcagatggaggtgactgcagcagcatgga

SEQ ID NO: 285878 - DNA, 648 bp, Homo sapiens
  misc_feature (117)..(117): n is a, c, g, or t
gatctcaaactccttggctcaagtgatctgcccacctcagcctcccagagtgctgggattacaggcgtgagccactgtgcccggctcatgttctcctatttaaaataagttccattnattctgagtagtgtccataatagtcagggttaaaactaatacttggtgttaaatatttggtgtttaaaaaaaccaaaaaaattttaaaagaaaattggcatttatttcattttatatagcttagatccctggcactgcaaagcagtttccttaagtaagatcttaatatcctggaatatagttaacatgaaatcatttcgaaacaaaagatctgttgtttgcttcatccacatagtgagaggtgatttagtttggatggggtaatacagtttggacagagagccactccaagcatttaaagcagaggaagcattctgagggtcttgagtgatgccaaacctcctgggtactttgaagtcacggttttgtaagagctgacaactgactagctttttcttttcagctcttggagaaggcaaagacaactttgtacagtgccctgttgaagcactcaaatgggaagaaaggaaatccctctcctacattatatcccgctgccactacgctagctcgatgctccgtcactattca

SEQ ID NO: 285879 - DNA, 358 bp, Homo sapiens
tcaaacgtcactgtttatttcacatttaaaatataaaatataccatggtgtccctgtgagtttgctgtggttccctgggacacgttagctcacaatttggggatcacaatcccaggtgatgctgatattgctgatcaggagaccacacttggatgtttggctgttttttgtttgttttccccaaaaaacctatcagggttatgcaatggaacatcctcgcccaaggtatgctggatgcttttgtgcctctgcagtcaagtttgctgtgactgcctttctgcttctgcacatccacagtgcactgttttatgtggaaggaagaggtgtgggcagatggaggtgactgcagcagcatgga

SEQ ID NO: 285880 - DNA, 570 bp, Homo sapiens
tggcatccgcattcccgtggtcataatatttgccatgatcttcagtatgatcttgtcctgtgctatccccaggaaccccgagatggtctaaaatcactttacatccctgagcaggaaagtttacccatgaaaattggtcggaatttttttttcatttttaggttttgctttttcacatttttatttcagaggattgtgctagaaaagcccagcttgtggaaatgatttgtcagccaatagacaattgagcaccagtcgaacatgttaaactaagcatttatcatggaggggattcccttctctttagagagcttttccatatgagtctgtcctggctgaaggtatggttcagtcttgtctggatgacgcttcagctttcttgtctggtctgtgactgccacctatcagggttatgcaatggaacatcctcgcccaaggtatgctggatgcttttgtgcctctgcagtcaagtttgctgtgactgcctttctgcttctgcacatccacagtgcactgttttatgtggaaggaagaggtgtgggcagatggaggtgactgcagcagcatgga

SEQ ID NO: 285881 - DNA, 578 bp, Homo sapiens
tggcatccgcattcccgtggtcataatatttgccatgatcttcagtatgatcttgtcctgtgctatccccaggaaccccgagatggtctaaaatcactttacatccctgagcaggaaagtttacccatgaaaattggtcggaatttttttttcatttttaggttttgctttttcacatttttatttcagaggattgtgctagaaaagcccagcttgtggaaatgatttgtcagccaatagacaattgagcaccagtcgaacatgttaaactaagcatttatcatggaggggattcccttctctttagagagcttttccatatgagtctgtcctggctgaaggtatggttcagtcttgtctggatgacgcttcagctttcttgtctggtctgtgactgccacctggcaaagagaggttgtttggattgtcacactcagtctaggtgcttgtatttttagacacgttaggttgagagttctgaccttcacttgatatctctggtaatgccaagcgggtcgtggcactgctttgtacactctgtgctgtggcagtgtgtgtgtgctgtgacgacagtgacg

SEQ ID NO: 285882 - DNA, 1587 bp, Homo sapiens
aggggaagccgcgtggtgtgcgaccctgggcgttgagctccaggcttcctggcaaagaggactgtggattcctggccctgtgaccttgggcaaaaaaatgaggaagattcataagtaagttaacacagaattaccaaaaacctcatgagaaagaaatgaagggatgtttcagggtagcttttcgagtcccaagtgatcattgatttggcccttctgtttctgattgtgaaaaagcattctgaaagaatgggcgccggttcaagaggaggtctctgagggtcagcctttggctgtttatagagaaatcagataaaaactacttggtgaaatgacttcttgtcacattgctgaagaacatatacaaaaggttgctatctttggaggaacccatgggaatgagctaaccggagtatttctggttaagcattggctagagaatggcgctgagattcagagaacagggctggaggtaaaaccatttattactaaccccagagcagtgaagaagtgtaccagatatattgactgtgacctgaatcgcatttttgaccttgaaaatcttggcaaaaaaatgtcagaagatttgccatatgaagtgagaagggctcaagaaataaatcatttatttggtccaaaagacagtgaagattcctatgacattatttttgaccttcacaacaccacctctaacatggggtgcactcttattcttgaggattccaggaataactttttaattcagatgtttcattacattaagacttctctggctccactaccctgctacgtttatctgattgagcatccttccctcaaatatgcgaccactcgttccatagccaagtatcctgtgggtatagaagttggtcctcagcctcaaggggttctgagagctgatatcttggatcaaatgagaaaaatgattaaacatgctcttgattttatacatcatttcaatgaaggaaaagaatttcctccctgcgccattgaggtctataaaattatagagaaagttgattacccccgggatgaaaatggagaaattgctgctatcatccatcctaatctgcaggatcaagactggaaaccactgcatcctggggatcccatgtttttaactcttgatgggaagacgatcccactgggcggagactgtaccgtgtaccccgtgtttgtgaatgaggccgcatattacgaaaagaaagaagcttttgcaaagacaactaaactaacgctcaatgcaaaaagtattcgctgctgtttacattagaaatcacttccagcttacatcttacacggtgtcttacaaattctgctagtctgtaagctccttaagagtagggttgtgccttattcaactgcatacatagctcctagcacagtgccttattcggtaggcatctaagcaaatttcttaaattaattaatatatctttaaagatatcatattttatgtatgtagcttattcaaagaagtgtttcctatttctatatagtttattatacatgatacttgggtagctcaacattcttaataaacagcctttgtattcagaatataaaattgaaatagatatatataaagtt

SEQ ID NO: 285883 - DNA, 1437 bp, Homo sapiens
  misc_feature (1384)..(1384): n is a, c, g, or t
ttgtaacagaaaattaaaatatactccactcaagggaattctgtactttgccctttgggtaaagtctcatttacatttctaaacctttcttaagaaaatcgaatttcctttgatctctcttctgaattgcagaaatcagataaaaactacttggtgaaatgacttcttgtcacattgctgaagaacatatacaaaaggttgctatctttggaggaacccatgggaatgagctaaccggagtatttctggttaagcattggctagagaatggcgctgagattcagagaacagggctggaggtaaaaccatttattactaaccccagagcagtgaagaagtgtaccagatatattgactgtgacctgaatcgcatttttgaccttgaaaatcttggcaaaaaaatgtcagaagatttgccatatgaagtgagaagggctcaagaaataaatcatttatttggtccaaaagacagtgaagattcctatgacattatttttgaccttcacaacaccacctctaacatggggtgcactcttattcttgaggattccaggaataactttttaattcagatgtttcattacattaagacttctctggctccactaccctgctacgtttatctgattgagcatccttccctcaaatatgcgaccactcgttccatagccaagtatcctgtgggtatagaagttggtcctcagcctcaaggggttctgagagctgatatcttggatcaaatgagaaaaatgattaaacatgctcttgattttatacatcatttcaatgaaggaaaagaatttcctccctgcgccattgaggtctataaaattatagagaaagttgattacccccgggatgaaaatggagaaattgctgctatcatccatcctaatctgcaggatcaagactggaaaccactgcatcctggggatcccatgtttttaactcttgatgggaagacgatcccactgggcggagactgtaccgtgtaccccgtgtttgtgaatgaggccgcatattacgaaaagaaagaagcttttgcaaagacaactaaactaacgctcaatgcaaaaagtattcgctgctgtttacattagaaatcacttccagcttacatcttacacggtgtcttacaaattctgctagtctgtaagctccttaagagtagggttgtgccttattcaactgcatacatagctcctagcacagtgccttattcggtaggcatctaagcaaatttcttaaattaattaatatatctttaaagatatcatattttatgtatgtagcttattcaaagaagtgtttcctatttctatatagtttattatacatgatacttgggtagctcaacattcttaataaacagcctttgtattcnaaaaaaaacccccccttaaccctcccttccttttcctcctcccacatcgccct

SEQ ID NO: 285884 - DNA, 345 bp, Homo sapiens
gctggggacagagctgaagcccaggttcagatggcggccatggaaggcggagagccgtcagcgaggcagcgccggggctgcgggagcttgcgggagggaagcgcccgtgagccgcagagacgctctgcaggggaagccgcgtggtgtgcgaccctgggcgttgagctccaggcttcctggcaaagaggactgtggattcctggccctgtgaccttgggcaagttacttactgaacaccctctggacctaccagtaaaagaacaataacaacaatcgccctaaaaatactagaagatgaaatagacaatcctggcacacagtaaatgcccagtaactgttagccct

SEQ ID NO: 285885 - DNA, 435 bp, Homo sapiens
aacagaatactgtaatttgttagttgtctagagtctgacataaatttttagaggagaaaaaccaaatataatatatttattttgattgtttcctgagaggatcaagactggaaaccactgcatcctggggatcccatgtttttaactcttgatgggaagacgatcccactgggcggagactgtaccgtgtaccccgtgtttgtgaatgaggccgcatattacgaaaagaaagaagcttttgcaaagacaactaaactaacgctcaatgcaaaaagtattcgctgctgtttacattagaaatcacttccagcttacatcttacacggtgtcttacaaattctgctagtctgtaagctccttaagagtagggttgtgccttattcaactgcatacatagctcctagcacagtgccttattcggtaggcatctaagca

SEQ ID NO: 285886 - DNA, 1417 bp, Homo sapiens
ttgtaacagaaaattaaaatatactccactcaagggaattctgtactttgccctttgggtaaagtctcatttacatttctaaacctttcttaagaaaatcgaatttcctttgatctctcttctgaattgcagaaatcagataaaaactacttggtgaaatgacttcttgtcacattgctgaagaacatatacaaaaggttgctatctttggaggaacccatgggaatgagctaaccggagtatttctggttaagcattggctagagaatggcgctgagattcagagaacagggctggaggtaaaaccatttattactaaccccagagcagtgaagaagtgtaccagatatattgactgtgacctgaatcgcatttttgaccttgaaaatcttggcaaaaaaatgtcagaagatttgccatatgaagtgagaagggctcaagaaataaatcatttatttggtccaaaagacagtgaagattcctatgacattatttttgaccttcacaacaccacctctaacatggggtgcactcttattcttgaggattccaggaataactttttaattcagatgtttcattacattaagacttctctggctccactaccctgctacgtttatctgattgagcatccttccctcaaatatgcgaccactcgttccatagccaagtatcctgtgggtatagaagttggtcctcagcctcaaggggttctgagagctgatatcttggatcaaatgagaaaaatgattaaacatgctcttgattttatacatcatttcaatgaaggaaaagaatttcctccctgcgccattgaggtctataaaattatagagaaagttgattacccccgggatgaaaatggagaaattgctgctatcatccatcctaatctgcaggatcaagactggaaaccactgcatcctggggatcccatgtttttaactcttgatgggaagacgatcccactgggcggagactgtaccgtgtaccccgtgtttgtgaatgaggccgcatattacgaaaagaaagaagcttttgcaaagacaactaaactaacgctcaatgcaaaaagtattcgctgctgtttacattagaaatcacttccagcttacatcttacacggtgtcttacaaattctgctagtctgtaagctccttaagagtagggttgtgccttattcaactgcatacatagctcctagcacagtgccttattcggtaggcatctaagcaaatttcttaaattaattaatatatctttaaagatatcatattttatgtatgtagcttattcaaagaagtgtttcctatttctatatagtttattatacatgatacttgggtagctcaacattcttaataaacagcctttgtattcagaatataaaattgaaatagatatatataaagtt

SEQ ID NO: 285887 - DNA, 1735 bp, Homo sapiens
  misc_feature (1735)..(1735): n is a, c, g, or t
ttgtaacagaaaattaaaatatactccactcaagggaattctgtactttgccctttgggtaaagtctcatttacatttctaaacctttcttaagaaaatcgaatttcctttgatctctcttctgaattgcagaaatcagataaaaactacttggtgaaatgacttcttgtcacattgctgaagaacatatacaaaaggttgctatctttggaggaacccatgggaatgagctaaccggagtatttctggttaagcattggctagagaatggcgctgagattcagagaacagggctggaggtaaaaccatttattactaaccccagagcagtgaagaagtgtaccagatatattgactgtgacctgaatcgcatttttgaccttgaaaatcttggcaaaaaaatgtcagaagatttgccatatgaagtgagaagggctcaagaaataaatcatttatttggtccaaaagacagtgaagattcctatgacattatttttgaccttcacaacaccacctctaacatggggtgcactcttattcttgaggattccaggaataactttttaattcagatgtttcattacattaagacttctctggctccactaccctgctacgtttatctgattgagcatccttccctcaaatatgcgaccactcgttccatagccaagtatcctgtgggtatagaagttggtcctcagcctcaaggggttctgagagctgatatcttggatcaaatgagaaaaatgattaaacatgctcttgattttatacatcatttcaatgaaggaaaagaatttcctccctgcgccattgaggtctataaaattatagagaaagttgattacccccgggatgaaaatggagaaattgctgctatcatccatcctaatctgcaggatcaagactggaaaccactgcatcctggggatcccatgtttttaactcttgatgggaagacgatcccactgggcggagactgtaccgtgtaccccgtgtttgtgaatgaggccgcatattacgaaaagaaagaagcttttgcaaagacaactaaactaacgctcaatgcaaaaagtattcgctgctgtttacattagaaatcacttccagcttacatcttacacggtgtcttacaaattctgctagtctgtaagctccttaagagtagggttgtgccttattcaactgcatacatagctcctagcacagtgccttattcggtaggcatctaagcaaatttcttaaattaattaatatatctttaaagatatcatattttatgtatgtagcttattcaaagaagtgtttcctatttctatatagtttattatacatgatacttgggtagctcaacattcttaataaacagcctttgtattcagaatataaaattgaaatagatatatataaagttatttgttttattgtgctttgccttactacacttcacggatactgtacttgtactttttttccaaattgaaggtttttggcaaccctgtgtctagaaagtctaacagtgccatgtttccaacagcatgtgctcactccttgtctctgtgtcaccctttgataatatttcaagcttttttatgatttatttattatatctgctatggtgaaaaaaaaaaaccataaaaaaatcactggccgcggtttacaacgtcgtgaatgggaatttggcgtacccaactttcgccttgcggacattccccttttgcaggttggggcn

SEQ ID NO: 285888 - DNA, 1690 bp, Homo sapiens
acgcagcgcggttgctgggcacctcgactatcacctgaccgtagtaatatctcccgctacgcgcgttgtgaccaatgctgcatacaggagatgagggaggacggccagacacctggaagccggaaaatggtgaaaggcaggattgggaaccccacagaccgcagctcctcccaggagaaccccacacatgagtctggatcctcgccatgatcctcccgtggcccccacacaatctggggagacgcggggccgcgggcactgcgctgccgagagggctccggactgaggctgcagttgctgcgcagggacggctcaggatgcccggggtcccggctgctggcccagccccaccctgtggccgaggggacccagggacgagctgcgccagggagactcgggtccgcagaccccggaatcgctgctgacaggcccgggtcccaccacagcaggtcccaaccagcccctcctcccacccggccttgcacactcaccatttcccggctcccaggtgtcccgggtcctcccttggctccggagatcagtgctggtcaccaccggacagaagctgtggtggagccacctcggcctctggaaggctgaattcagtgggttaggggaacaggagccccttagacttgcggagcttggccccaccctcctggcggagcgcctgattggataatttacacgaccccgcccagtacccctaggataggaatcaagccccaccccctaggcccgggtttcaggagaagccacggaaaactcggaagtgtggagcaggattgacaggttctagcaacagccctcccacccccccgcccaggccaggcttccttctggagcttggacgtgaccccacactggggacatttgcatttaagaaaaacttggctccaggctttccacagtgggccctggcatcttcctatactcactgggccctttctgtttcttccttctggacgggggttcacaagtgtgagcaggcagttccacactccgtgtccaattgagccagtacctttgctggaagctactgggctggaacaggagggagagcccagatgtcttccagggatcaggaatttgggataagcggctggtggcatggccaaggcttcctcataccttatctcagtctacccattttcagggaagaaaatgaaatatgccaacaagggaacaaaaattaagtgcatggaaaaaagttatactacagcaatattctgtaaagaaatcaaaaggggccgggcgcgatggctcaccctataatcccagcactttgggaggccaaggtagggcagatcacatgaggtcaggagttcaaggaccatcctggctaacacagtgaaaccctgtctctactaaaaatacaaaaaattagccgggcgtggtggtgggcacctgtagtcctagctactcgggaggctgaggcaggagaatagcgtgaacctgggaggcggagcttgcagtgagccgagattgcactactgcactccagcctgggtgacagagcgagactccggctcaaaaaaaaaaaaaaattaaaaactggccaggcacattggcacacggctcacacctgtaatcccagcacttcgagaggccaaggcaggaagatcccttgagcccaggaaacctgtctgggcaatatagtaagacctatatagtaagaccttgtctctcc

SEQ ID NO: 285889 - DNA, 710 bp, Homo sapiens
catgcttctacttacatgacgcacctagaatcagcaaattcatagagcaagaaaggaaaatagagattaccaagggatggggatgggaggaatagggaatggttgtttaatgggtaccaatttttttttggactaatgaaaaaattctggaactagctagctagctgtgatggttctaaagcactgttaatgtatttaatgctactgaatggcatacttacaatggtaaattctatgttactatatttgaccttaaaaaaaattaaaggccgggtgcggtggctcacgcctgtaatcccagcactttgggaggccgaggtagggcagatcacatgaggtcaggagttcaaggaccatcctggctaacacagtgaaaccctgtctctactaaaaatacaaaaaattagccgggcgtggtggtgggcacctgtagtcctagctactcgggaggctgaggcaggagaatagcgtgaacctgggaggcggagcttgcagtgagccgagattgcactactgcactccagcctgggtgacagagcgagactccggctcaaaaaaaaaaaaaaattaaaaactggccaggcacattggcacacggctcacacctgtaatcccagcacttcgagaggccaaggcaggaagatcccttgagcccaggaaacctgtctgggcaatatagtaagacctatatagtaagaccttgtctctcc

SEQ ID NO: 285890 - DNA, 1757 bp, Homo sapiens
acgcagcgcggttgctgggcacctcgactatcacctgaccgtagtaatatctcccgctacgcgcgttgtgaccaatgctgcatacaggagatgagggaggacggccagacacctggaagccggaaaatgattcttcacggaaaaatccagcaaagcctactccttctggatgaagttcagagtcacatcttcaaagaccaccaagccgtgacatatcccagatatgtgtagaggaggacaggtgaaaggcaggattgggaaccccacagaccgcagctcctcccaggagaaccccacacatgagtctggatcctcgccatgatcctcccgtggcccccacacaatctggggagacgcggggccgcgggcactgcgctgccgagagggctccggactgaggctgcagttgctgcgcagggacggctcaggatgcccggggtcccggctgctggcccagccccaccctgtggccgaggggacccagggacgagctgcgccagggagactcgggtccgcagaccccggaatcgctgctgacaggcccgggtcccaccacagcaggtcccaaccagcccctcctcccacccggccttgcacactcaccatttcccggctcccaggtgtcccgggtcctcccttggctccggagatcagtgctggtcaccaccggacagaagctgtggtggagccacctcggcctctggaaggctgaattcagtgggttaggggaacaggagccccttagacttgcggagcttggccccaccctcctggcggagcgcctgattggataatttacacgaccccgcccagtacccctaggataggaatcaagccccaccccctaggcccgggtttcaggagaagccacggaaaactcggaagtgtggagcaggattgacaggttctagcaacagccctcccacccccccgcccaggccaggcttccttctggagcttggacgtgaccccacactggggacatttgcatttaagaaaaacttggctccaggctttccacagtgggccctggcatcttcctatactcactgggccctttctgtttcttccttctggacgggggttcacaagtgtgagcaggcagttccacactccgtgtccaattgagccagtacctttgctggaagctactgggctggaacaggagggagagcccagatgtcttccagggatcaggaatttgggataagcggctggtggcatggccaaggcttcctcataccttatctcagtctacccattttcagggaagaaaatgaaatatgccaacaagggaacaaaaattaagtgcatggaaaaaagttatactacagcaatattctgtaaagaaatcaaaaggggccgggcgcgatggctcaccctataatcccagcactttgggaggccaaggtaggaggatcacctgaggtcaggagtttgagaccgctctggccaacatggtgaaaccccattctctactaaaaatacaaaaactaggccaggcgcggtagctcacgcctgtaatcctagcactttgggaggccaaggcgggcggaccacaaggtcaagagatcaagactatcctggccaacatggtgaaaccctgtctctactaaaaataccaaaaaaatcagctgggcgtggtggcacgtgcctgtagtcagagcagctcgggaggttgaggcagtagaattgcctgaacccgggagacagaggttgcagtgagccaagatcacaccactgcactccagcctggc

SEQ ID NO: 285891 - DNA, 954 bp, Homo sapiens
gacgtcattgagctgcgacccttgttcaacgccgttggcgaagccagctgctggaggtgccgagaatctgagtttcggcaagcagccaggtctggaaactgtaacaggacattcagttagtaatgatggttgcaggttgaatagtctcgccctagatctcacctaacttgcagaatattttaaaaatgactacaccaaacaagacacctcctggtgctgaccccaagcagttggaaaggactggaacagtacgggaaattgggtcacaagctgtttggtcactctcatcttgcaaaccaggatttggagtggatcagttacgagatgacaatctagaaacttattggcaatcagatggttcccagcctcatttagtgaacatccaattcagaagaaaaacaacagtgaagacattatgtatttatgcagactacaaatctgatgaaagctatactccaagcaagatctcagtcagagtaggaaataattttcacaaccttcaagaaattcggcaacttgagttggtggaaccaagtggctggattcatgttcccttaactgacaatcataagaagccaactcgtacattcatgatacagattgctgttctagccaatcaccagaatggaagagacacccatatgagacaaattaaaatatacacaccagtagaagagagctccattggtaaatttcctagatgtacaactatagatttcatgatgtatcgttcaataaggtgactttaaaatgagacgaaaatcattaaacgtatctttgttttatcctgtatttaaataatatatcatgtacctttattgaacaaggcatccgttatatctaattttgtatatgtttaaaaatattttattgtaactttgacaaataaatttggggtcatattatctttattttctttaacatgtaataaagctcacatattttacattacta

SEQ ID NO: 285892 - DNA, 1428 bp, Homo sapiens
gacgtcattgagctgcgacccttgttcaacgccgttggcgaagccagctgctggaggtgccgagaatctgagtttcggcaagcagccaggtctggaaactgatttggagtggatcagttacgagatgacaatctagaaacttattggcaatcagatggttcccagcctcatttagtgaacatccaattcagcaacttgagttggtggaaccaagtggctggattcatgttcccttaactgacaatcataagaagccaactcgtacattcatgatacagattgctgttctagccaatcaccagaatggaagagacacccatatgagacaaattaaaatatacacaccagtagaagagagctccattggtaaatttcctagatgtacaactatagatttcatgatgtatcgttcaataaggtgactttaaaatgagacgaaaatcattaaacgtatctttgttttatcctgtatttaaataatatatcatgtacctttattgaacaaggcatccgttatatctaattttgtatatgtttaaaaatattttattgtaactttgacaaataaatttggggtcatattatctttattttctttaacatgtaataaagctcacatattttacattactataaaaatggatttgaagccaatcattttattttcccttgtatcaaaagaaaagagttccttgtatcaaaagaaaagagttgaactgaaaatttcagtatatacacaattataatagctaggtgattatttcattagtgttcatacattagagtaatggtttattgcatatttgagaacaagactgtgttttatcaatatatatcatctttaataggtcaaaattactattttttctacccagaggaaggttattcttttaatactggatcttttaaaaaacagtgtcaaataagcttagtgttaggttgtctgatgagaaccaatctaatatggggagtataattaattgtctcatattcaccttcacggaatacttacagccctagggttgtctgtatcctaatgatattatgtaaagattgcctgtataatctagcagtacttatggaagagttctagcagtacttatggaagagttattttcaaatttgtgtctgacattgtagcattccctgggcagtcatatatcccataaaatcgtaaaagtatgtgaaattttttatatatattaaaagattttaaagaaatacatggaaatgtggttttttccatggtttaaaatgagtagatttgattttgtatgctgttttctctagatgtattactttttttcgggggatggttatttagccacagaatttacctagattcactcttgtttggaaaagattgctctctgtggttcatgcattgctgggtacactaaagtattaaatagtgaatattatttaaaa

SEQ ID NO: 285893 - DNA, 491 bp, Homo sapiens
cggcgaattgcgcacagggaggagggtgtcgagttgcagccctcccttgcaacttgagttggtggaaccaagtggctggattcatgttcccttaactgacaatcataagaagccaactcgtacattcatgatacagattgctgttctagccaatcaccagaatggaagagacacccatatgagacaaattaaaatatacacaccagtagaagagagctccattggtaaatttcctagatgtacaactatagatttcatgatgtatcgttcaataaggtgactttaaaatgagacgaaaatcattaaacgtatctttgttttatcctgtatttaaataatatatcatgtacctttattgaacaaggcatccgttatatctaattttgtatatgtttaaaaatattttattgtaactttgacaaataaatttggggtcatattatctttattttctttaacatgtaataaagctcacatattttacattacta

SEQ ID NO: 285894 - DNA, 495 bp, Homo sapiens
  misc_feature (38)..(39): n is a, c, g, or t
  misc_feature (42)..(43): n is a, c, g, or t
ccggagcgcccgccctgcccgcccggctccgtttttgnnggnngtttcgggaccaacttgagttggtggaaccaagtggctggattcatgttcccttaactgacaatcataagaagccaactcgtacattcatgatacagattgctgttctagccaatcaccagaatggaagagacacccatatgagacaaattaaaatatacacaccagtagaagagagctccattggtaaatttcctagatgtacaactatagatttcatgatgtatcgttcaataaggtgactttaaaatgagacgaaaatcattaaacgtatctttgttttatcctgtatttaaataatatatcatgtacctttattgaacaaggcatccgttatatctaattttgtatatgtttaaaaatattttattgtaactttgacaaataaatttggggtcatattatctttattttctttaacatgtaataaagctcacatattttacattacta

SEQ ID NO: 285895 - DNA, 486 bp, Homo sapiens
ttgtaaagagaaacatttattgtggtgttattaacaaacattcacaacttgagttggtggaaccaagtggctggattcatgttcccttaactgacaatcataagaagccaactcgtacattcatgatacagattgctgttctagccaatcaccagaatggaagagacacccatatgagacaaattaaaatatacacaccagtagaagagagctccattggtaaatttcctagatgtacaactatagatttcatgatgtatcgttcaataaggtgactttaaaatgagacgaaaatcattaaacgtatctttgttttatcctgtatttaaataatatatcatgtacctttattgaacaaggcatccgttatatctaattttgtatatgtttaaaaatattttattgtaactttgacaaataaatttggggtcatattatctttattttctttaacatgtaataaagctcacatattttacattacta

SEQ ID NO: 285896 - DNA, 758 bp, Homo sapiens
  misc_feature (129)..(129): n is a, c, g, or t
  misc_feature (154)..(154): n is a, c, g, or t
atacttatctatacacttcaacttactttttcttcctcgaaaaactgcccggttccggctctaggtgaggtagatgctggcctcatcaaatgagcaacttgagttggtggaaccaagtggctggattcntgttcccttaactgacaatcataanaagccaactcgtacattcatgatacagattgctgttctagccaatcaccagaatggaagagacacccatatgagacaaattagaatatacacaccagtagaagagagctccattgcaacttgagttggtggaaccaagtggctggattcatgttcccttaactgacaatcataagaagccaactcgtacattcatgatacagattgctgttctagccaatcaccagaatggaagagacacccatatgagacaaattaaaatatacacaccagtagaagagagctccattggtaaatttcctagatgtacaactatagatttcatgatgtatcgttcaataaggtgactttaaaatgagacgaaaatcattaaacgtatctttgttttatcctgtatttaaataatatatcatgtacctttattgaacaaggcatccgttatatctaattttgtatatgtttaaaaatattttattgtaactttgacaaataaatttggggtcatattatctttattttctttaacatgtaataaagctcacatattttacattactattctcacatcaaaaaaaaaaaacaatggtctcgctggcctcagcgtg

SEQ ID NO: 285897 - DNA, 516 bp, Homo sapiens
  misc_feature (52)..(52): n is a, c, g, or t
  misc_feature (89)..(90): n is a, c, g, or t
  misc_feature (93)..(93): n is a, c, g, or t
gagggagggccagttcctggaccggaggcctttcggtcctttcccccagaangatttctgtttactatgagtccgcccgtcgaggcaannggnatgaaaaccggattcatgttcccttaactgacaatcataagaagccaactcgtacattcatgatacagattgctgttctagccaatcaccagaatggaagagacacccatatgagacaaattaaaatatacacaccagtagaagagagctccattggtaaatttcctagatgtacaactatagatttcatgatgtatcgttcaataaggtgactttaaaatgagacgaaaatcattaaacgtatctttgttttatcctgtatttaaataatatatcatgtacctttattgaacaaggcatccgttatatctaattttgtatatgtttaaaaatattttattgtaactttgacaaataaatttggggtcatattatctttattttctttaacatgtaataaagctcacatattttacattacta

SEQ ID NO: 285898 - DNA, 502 bp, Homo sapiens
  misc_feature (25)..(25): n is a, c, g, or t
  misc_feature (47)..(47): n is a, c, g, or t
  misc_feature (51)..(52): n is a, c, g, or t
  misc_feature (70)..(70): n is a, c, g, or t
gggtgggcccggcttttggatgggnggggtttgggtattttaaaaanaatnngtgctgtgtactatgagntgtgctttttaaccgagaggattcatgttcccttaactgacaatcataagaagccaactcgtacattcatgatacagattgctgttctagccaatcaccagaatggaagagacacccatatgagacaaattaaaatatacacaccagtagaagagagctccattggtaaatttcctagatgtacaactatagatttcatgatgtatcgttcaataaggtgactttaaaatgagacgaaaatcattaaacgtatctttgttttatcctgtatttaaataatatatcatgtacctttattgaacaaggcatccgttatatctaattttgtatatgtttaaaaatattttattgtaactttgacaaataaatttggggtcatattatctttattttctttaacatgtaataaagctcacatattttacattacta

SEQ ID NO: 285899 - DNA, 936 bp, Homo sapiens
gacgtcattgagctgcgacccttgttcaacgccgttggcgaagccagctgctggaggtgccgagaatctgagtttcggcaagcagccaggtctggaaactaatattttaaaaatgactacaccaaacaagacacctcctggtgctgaccccaagcagttggaaaggactggaacagtacgggaaattgggtcacaagctgtttggtcactctcatcttgcaaaccaggatttggagtggatcagttacgagatgacaatctagaaacttattggcaatcagatggttcccagcctcatttagtgaacatccaattcagaagaaaaacaacagtgaagacattatgtatttatgcagactacaaatctgatgaaagctatactccaagcaagatctcagtcagagtaggaaataattttcacaaccttcaagaaattcggcaacttgagttggtggaaccaagtggctggattcatgttcccttaactgacaatcataagaagccaactcgtacattcatgatacagattgctgttctagccaatcaccagaatggaagagacacccatatgagacaaattaaaatatacacaccagtagaagagagctccattggtaaatttcctagatgtacaactatagatttcatgatgtatcgttcaataaggtgactttaaaatgagacgaaaatcattaaacgtatctttgttttatcctgtatttaaataatatatcatgtacctttattgaacaaggcatccgttatatctaattttgtatatgtttaaaaatattttattgtaactttgacaaataaatttggggtcatattatctttattttctttaacatgtaataaagctcacatattttacattactaaaccaacaaaccttacatgctgattaaaaactacccaatggccttgttggcctca

SEQ ID NO: 285900 - DNA, 1257 bp, Homo sapiens
gacgtcattgagctgcgacccttgttcaacgccgttggcgaagccagctgctggaggtgccgagaatctgagtttcggcaagcagccaggtctggaaactctgtgagtgtgtgggcttttctccgacgtcgagcgtggtcctagcgtaaacagatgcattcgcctctccggtttcaatctttttttacgtttgcgctttcctcaaggccggtgggtcaggagtggagccttagtcattctaacgctggaggtgtcagtaggaccaacagagtctggtgccgacacggcttactgttgcgcgctcttctaggcctcaacttcctctcaactgtgtggtaacaggacattcagttagtaatgatggttgcaggttgaatagtctcgccctagatctcacctaacttgcagtaagtatcaagtgcttgtgtgccgattaaagaacaacttcggatacaatgggaggtgtcaaggaaacgaatattttaaaaatgactacaccaaacaagacacctcctggtgctgaccccaagcagttggaaaggactggaacagtacgggaaattgggtcacaagctgtttggtcactctcatcttgcaaaccaggatttggagtggatcagttacgagatgacaatctagaaacttattggcaatcagatggttcccagcctcatttagtgaacatccaattcagaagaaaaacaacagtgaagacattatgtatttatgcagactacaaatctgatgaaagctatactccaagcaagatctcagtcagagtaggaaataattttcacaaccttcaagaaattcggcaacttgagttggtggaaccaagtggctggattcatgttcccttaactgacaatcataagaagccaactcgtacattcatgatacagattgctgttctagccaatcaccagaatggaagagacacccatatgagacaaattaaaatatacacaccagtagaagagagctccattggtaaatttcctagatgtacaactatagatttcatgatgtatcgttcaataaggtgactttaaaatgagacgaaaatcattaaacgtatctttgttttatcctgtatttaaataatatatcatgtacctttattgaacaaggcatccgttatatctaattttgtatatgtttaaaaatattttattgtaactttgacaaataaatttggggtcatattatctttattttctttaacatgtaataaagctcacatattttacattacta

SEQ ID NO: 285901 - DNA, 921 bp, Homo sapiens
gttttttcacatatgaatagacttagtaaaattaacaaaagatgtgaaagatgaggtcaacctttttagaatgggccagttattcacttcaaaatcttgaagccattttcctgaccttatcttctatggtaagagcatataatattttaaaaatgactacaccaaacaagacacctcctggtgctgaccccaagcagttggaaaggactggaacagtacgggaaattgggtcacaagctgtttggtcactctcatcttgcaaaccaggatttggagtggatcagttacgagatgacaatctagaaacttattggcaatcagatggttcccagcctcatttagtgaacatccaattcagaagaaaaacaacagtgaagacattatgtatttatgcagactacaaatctgatgaaagctatactccaagcaagatctcagtcagagtaggaaataattttcacaaccttcaagaaattcggcaacttgagttggtggaaccaagtggctggattcatgttcccttaactgacaatcataagaagccaactcgtacattcatgatacagattgctgttctagccaatcaccagaatggaagagacacccatatgagacaaattaaaatatacacaccagtagaagagagctccattggtaaatttcctagatgtacaactatagatttcatgatgtatcgttcaataaggtgactttaaaatgagacgaaaatcattaaacgtatctttgttttatcctgtatttaaataatatatcatgtacctttattgaacaaggcatccgttatatctaattttgtatatgtttaaaaatattttattgtaactttgacaaataaatttggggtcatattatctttattttctttaacatgtaataaagctcacatattttacattacta

SEQ ID NO: 285902 - DNA, 833 bp, Homo sapiens
ccaagaatgtcggcacgaggctgagttttgtaatcagccaggtctggaaactaatattttaaaaatgactacaccaaacaagacacctcctggtgctgaccccaagcagttggaaaggactggaacagtacgggaaattgggtcacaagctgtttggtcactctcatcttgcaaaccaggatttggagtggatcagttacgagatgacaatctagaaacttattggcaatcagatggttcccagcctcatttagtgaacatccaattcagaagaaaaacaacagtgaagacattatgtatttatgcagactacaaatctgatgaaagctatactccaagcaagatctcagtcagagtaggaaataattttcacaaccttcaagaaattcggcaacttgagttggtggaaccaagtggctggattcatgttcccttaactgacaatcataagaagccaactcgtacattcatgatacagattgctgttctagccaatcaccagaatggaagagacacccatatgagacaaattaaaatatacacaccagtagaagagagctccattggtaaatttcctagatgtacaactatagatttcatgatgtatcgttcaataaggtgactttaaaatgagacgaaaatcattaaacgtatctttgttttatcctgtatttaaataatatatcatgtacctttattgaacaaggcatccgttatatctaattttgtatatgtttaaaaatattttattgtaactttgacaaataaatttggggtcatattatctttattttctttaacatgtaataaagctcacatattttacattacta

SEQ ID NO: 285903 - DNA, 1315 bp, Homo sapiens
gacgtcattgagctgcgacccttgttcaacgccgttggcgaagccagctgctggaggtgccgagaatctgagtttcggcaagcagccaggtctggaaactctgtgagtgtgtgggcttttctccgacgtcgagcgtggtcctagcgtaaacagatgcattcgcctctccggtttcaatctttttttacgtttgcgctttcctcaaggccggtgggtcaggagtggagccttagtcattctaacgctggaggtgtcagtaggaccaacagagtctggtgccgacacggcttactgttgcgcgctcttctaggcctcaacttcctctcaactgtgtggtcagttcagggccgggaatccaatcttttccgagctccatattttatccacttggtggcgtccagtcccaagtccggcagttgaattctgccctaaagatgggctttatttctatctttttttaggtaacaggacattcagttagtaatgatggttgcaggttgaatagtctcgccctagatctcacctaacttgcagaatattttaaaaatgactacaccaaacaagacacctcctggtgctgaccccaagcagttggaaaggactggaacagtacgggaaattgggtcacaagctgtttggtcactctcatcttgcaaaccaggatttggagtggatcagttacgagatgacaatctagaaacttattggcaatcagatggttcccagcctcatttagtgaacatccaattcagaagaaaaacaacagtgaagacattatgtatttatgcagactacaaatctgatgaaagctatactccaagcaagatctcagtcagagtaggaaataattttcacaaccttcaagaaattcggcaacttgagttggtggaaccaagtggctggattcatgttcccttaactgacaatcataagaagccaactcgtacattcatgatacagattgctgttctagccaatcaccagaatggaagagacacccatatgagacaaattaaaatatacacaccagtagaagagagctccattggtaaatttcctagatgtacaactatagatttcatgatgtatcgttcaataaggtgactttaaaatgagacgaaaatcattaaacgtatctttgttttatcctgtatttaaataatatatcatgtacctttattgaacaaggcatccgttatatctaattttgtatatgtttaaaaatattttattgtaactttgacaaataaatttggggtcatattatctttattttctttaacatgtaataaagctcacatattttacattacta

SEQ ID NO: 285904 - DNA, 1211 bp, Homo sapiens
gacgtcattgagctgcgacccttgttcaacgccgttggcgaagccagctgctggaggtgccgagaatctgagtttcggcaagcagccaggtctggaaactaatattttaaaaatgactacaccaaacaagacacctcctggtgctgaccccaagcagttggaaaggactggaacagtacgggaaattgggtcacaagctgtttggtcactctcatcttgcaaaccaggatttggagtggatcagttacgagatgacaatctagaaacttattggcaatcagatggttcccagcctcatttagtgaacatccaattcagaagaaaaacaacagtgaagacattatgtatttatgcagactacaaatctgatgaaagctatactccaagcaagatctcagtcagagtaggaaataattttcacaaccttcaagaaattcgggtggcagcgttcctccctctgaaactaagacgtctaggccagcagaacgtaatgtcgtgggaacaggaagcaaaaatgttgccagtggatcaccaggggtgatggtggtaccattttcacttccaccccttgattcctggaactgtgaatcctggctatgggagaaactgtaccatatattggaccctgattcagagcatacacagccttctggagaactttgccccagtcctgcaaagtattgtcatctagttggcattgtgattgtgacttcaaaaggctattccaccattctgtctatccagctgcttcaggatgatggggaacatgcaacttgagttggtggaaccaagtggctggattcatgttcccttaactgacaatcataagaagccaactcgtacattcatgatacagattgctgttctagccaatcaccagaatggaagagacacccatatgagacaaattaaaatatacacaccagtagaagagagctccattggtaaatttcctagatgtacaactatagatttcatgatgtatcgttcaataaggtgactttaaaatgagacgaaaatcattaaacgtatctttgttttatcctgtatttaaataatatatcatgtacctttattgaacaaggcatccgttatatctaattttgtatatgtttaaaaatattttattgtaactttgacaaataaatttggggtcatattatctttattttctttaacatgtaataaagctcacatattttacattacta

SEQ ID NO: 285905 - DNA, 1506 bp, Homo sapiens
  misc_feature (129)..(129): n is a, c, g, or t
  misc_feature (154)..(154): n is a, c, g, or t
atacttatctatacacttcaacttactttttcttcctcgaaaaactgcccggttccggctctaggtgaggtagatgctggcctcatcaaatgagcaacttgagttggtggaaccaagtggctggattcntgttcccttaactgacaatcataanaagccaactcgtacattcatgatacagattgctgttctagccaatcaccagaatggaagagacacccatatgagacaaattagaatatacacaccagtagaagagagctccattgcaacttgagttggtggaaccaagtggctggattcatgttcccttaactgacaatcataagaagccaactcgtacattcatgatacagattgctgttctagccaatcaccagaatggaagagacacccatatgagacaaattaaaatatacacaccagtagaagagagctccattggtaaatttcctagatgtacaactatagatttcatgatgtatcgttcaataaggtgactttaaaatgagacgaaaatcattaaacgtatctttgttttatcctgtatttaaataatatatcatgtacctttattgaacaaggcatccgttatatctaattttgtatatgtttaaaaatattttattgtaactttgacaaataaatttggggtcatattatctttattttctttaacatgtaataaagctcacatattttacattactataaaaatggatttgaagccaatcattttattttcccttgtatcaaaagaaaagagttccttgtatcaaaagaaaagagttgaactgaaaatttcagtatatacacaattataatagctaggtgattatttcattagtgttcatacattagagtaatggtttattgcatatttgagaacaagactgtgttttatcaatatatatcatctttaataggtcaaaattactattttttctacccagaggaaggttattcttttaatactggatcttttaaaaaacagtgtcaaataagcttagtgttaggttgtctgatgagaaccaatctaatatggggagtataattaattgtctcatattcaccttcacggaatacttacagccctagggttgtctgtatcctaatgatattatgtaaagattgcctgtataatctagcagtacttatggaagagttctagcagtacttatggaagagttattttcaaatttgtgtctgacattgtagcattccctgggcagtcatatatcccataaaatcgtaaaagtatgtgaaattttttatatatattaaaagattttaaagaaatacatggaaatgtggttttttccatggtttaaaatgagtagatttgattttgtatgctgttttctctagatgtattactttttttcgggggatggttatttagccacagaatttacctagattcactcttgtttggaaaagattgctctctgtggttcatgcattgctgggtacactaaagtattaaatagtgaatattatttaaaa

SEQ ID NO: 285906 - DNA, 1516 bp, Homo sapiens
ccatggcagtaggaagacatgtaaacagttttgtacttaatatttgacatgttttttattgatgaattacttcctttttttaatgtaagctttgtttatgctgcagttaatactgtaaatcagtgcatgcctagcgggttacatctgctcttaagtaagtcacagccagagtagatagtgacttaaaggttgctaataggaagcagaagatccagaagccagactgagagatgtcgatgtcttcatagagaaactctaatggatcctgtttacaccactcaacttgagttggtggaaccaagtggctggattcatgttcccttaactgacaatcataagaagccaactcgtacattcatgatacagattgctgttctagccaatcaccagaatggaagagacacccatatgagacaaattaaaatatacacaccagtagaagagagctccattggtaaatttcctagatgtacaactatagatttcatgatgtatcgttcaataaggtgactttaaaatgagacgaaaatcattaaacgtatctttgttttatcctgtatttaaataatatatcatgtacctttattgaacaaggcatccgttatatctaattttgtatatgtttaaaaatattttattgtaactttgacaaataaatttggggtcatattatctttattttctttaacatgtaataaagctcacatattttacattactataaaaatggatttgaagccaatcattttattttcccttgtatcaaaagaaaagagttccttgtatcaaaagaaaagagttgaactgaaaatttcagtatatacacaattataatagctaggtgattatttcattagtgttcatacattagagtaatggtttattgcatatttgagaacaagactgtgttttatcaatatatatcatctttaataggtcaaaattactattttttctacccagaggaaggttattcttttaatactggatcttttaaaaaacagtgtcaaataagcttagtgttaggttgtctgatgagaaccaatctaatatggggagtataattaattgtctcatattcaccttcacggaatacttacagccctagggttgtctgtatcctaatgatattatgtaaagattgcctgtataatctagcagtacttatggaagagttctagcagtacttatggaagagttattttcaaatttgtgtctgacattgtagcattccctgggcagtcatatatcccataaaatcgtaaaagtatgtgaaattttttatatatattaaaagattttaaagaaatacatggaaatgtggttttttccatggtttaaaatgagtagatttgattttgtatgctgttttctctagatgtattactttttttcgggggatggttatttagccacagaatttacctagattcactcttgtttggaaaagattgctctctgtggttcatgcattgctgggtacactaaagtattaaatagtgaatattatttaaaa

SEQ ID NO: 285907 - DNA, 1622 bp, Homo sapiens
gacgtcattgagctgcgacccttgttcaacgccgttggcgaagccagctgctggaggtgccgagaatctgagtttcggcaagcagccaggtctggaaactaatattttaaaaatgactacaccaaacaagacacctcctggtgctgaccccaagcagttggaaaggactggaacagtacgggaaattgggtcacaagctgtttggtcactctcatcttgcaaaccaggatttggagtggatcagttacgagatgacaatctagaaacttattggcaatcagatggttcccagcctcatttagtgaacatccaattcagaagaaaaacaacagtgaagacattatgtatttatgcagactacaaatctgatgaaagctatactccaagcaagatctcagtcagagtaggaaataattttcacaaccttcaagaaattcggcaacttgagttggtggaaccaagtggctggattcatgttcccttaactgacaatcataagaagccaactcgtacattcatgatacagattgctgttctagccaatcaccagaatggaagagacacccatatgagacaaattactatagatttcatgatgtatcgttcaataaggtgactttaaaatgagacgaaaatcattaaacgtatctttgttttatcctgtatttaaataatatatcatgtacctttattgaacaaggcatccgttatatctaattttgtatatgtttaaaaatattttattgtaactttgacaaataaatttggggtcatattatctttattttctttaacatgtaataaagctcacatattttacattactataaaaatggatttgaagccaatcattttattttcccttgtatcaaaagaaaagagttccttgtatcaaaagaaaagagttgaactgaaaatttcagtatatacacaattataatagctaggtgattatttcattagtgttcatacattagagtaatggtttattgcatatttgagaacaagactgtgttttatcaatatatatcatctttaataggtcaaaattactattttttctacccagaggaaggttattcttttaatactggatcttttaaaaaacagtgtcaaataagcttagtgttaggttgtctgatgagaaccaatctaatatggggagtataattaattgtctcatattcaccttcacggaatacttacagccctagggttgtctgtatcctaatgatattatgtaaagattgcctgtataatctagcagtacttatggaagagttctagcagtacttatggaagagttattttcaaatttgtgtctgacattgtagcattccctgggcagtcatatatcccataaaatcgtaaaagtatgtgaaattttttatatatattaaaagattttaaagaaatacatggaaatgtggttttttccatggtttaaaatgagtagatttgattttgtatgctgttttctctagatgtattactttttttcgggggatggttatttagccacagaatttacctagattcactcttgtttggaaaagattgctctctgtggttcatgcattgctgggtacactaaagtattaaatagtgaatattatttaaaa

SEQ ID NO: 285908 - DNA, 1087 bp, Homo sapiens
gacgtcattgagctgcgacccttgttcaacgccgttggcgaagccagctgctggaggtgccgagaatctgagtttcggcaagcagccaggtctggaaactctgtgagtgtgtgggcttttctccgacgtcgagcgtggtcctagcgtaaacagatgcattcgcctctccggtttcaatctttttttacgtttgcgctttcctcaaggccggtgggtcaggagtggagccttagtcattctaacgctggaggtgtcagtaggaccaacagagtctggtgccgacacggcttactgttgcgcgctcttctaggcctcaacttcctctcaactgtgtggtcagttcagggccgggaatccaatcttttccgagctccatattttatccacttggtggcgtccagtcccaagtccggcagttgaattctgccctaaagatgggctttatttctatctttttttaggtaacaggacattcagttagtaatgatggttgcaggttgaatagtctcgccctagatctcacctaacttgcagaatattttaaaaatgactacaccaaacaagacacctcctggtgctgaccccaagcagttggaaaggactggaacagtacgggaaattgggtcacaagctgtttggtcactctcatcttgcaaaccaggatttggagtggatcagttacgagatgacaatctagaaacttattggcaatcagatggttcccagcctcatttagtgaacatccaattcagaagaaaaacaacagtgaagacattatgtatttatgcagactacaaatctgatgaaagctatactccaagcaagatctcagtcagagtaggaaataattttcacaaccttcaagaaattcggcctcatgttttacatgtgaatgaagaatcaatgaatcttcaagtctcaggataaaggaatgagaatattgaagcagaaactgcaaataaaagacaatgcatacttttctgtgtccatttctccttcataaaggaattaagagaattcttcctacaaggatttgtagatatttgggaatctttcctcttgtatttgaaattatagttgatggtac

SEQ ID NO: 285909 - DNA, 414 bp, Homo sapiens
gttccttttcatggaggaggcacatactacttgtgtctagtcagccatctgtgtttcacatatttttaaaagttgtgagacatgtactttctagtgtatttgttttattctggcagagagtacaagttgtataaattgtacgagttcagtaaacatgaagcacatctatttttattttgtctactaagatggtacatctaaagtgcttagcaactataagtagaccatggtaaaagtgtccaataactggtagtgattattatcatattgtcattctttcgttgagcaaaatgttaattataagttattttattatagaatgcattcattgttataaattatatttgttgaataaaagcataatctgattttttttcccttggcagcaacttgagttggtggaaccaagtggct

SEQ ID NO: 285910 - DNA, 598 bp, Homo sapiens
gagaatctgagtttcggcaagcagccaggtctggaaactctgtgagtgtgtgggcttttctccgacgtcgagcgtggtcctagcgtaaacagatgcattcgcctctccggtttcaatctttttttacgtttgcgctttcctcaaggccggtgggtcaggagtggagccttagtcattctaacgctggaggtgtcagtaggaccaacagagtctggtgccgacacggcttactgttgcgcgctcttctaggcctcaacttcctctcaactgtgtggtcagttcagggccgggaatccaatcttttccgagctccatattttatccacttggtggcgtccagtcccaagtccggcagttgaattctgccctaaagatgggctttatttctatctttttttaggtaacaggacattcagttagtaatgatggttgcaggttgaatagtctcgccctagatctcacctaacttgcaggcaagtgacaactagttcataactgaacctattcatctgtttattcattcagtaaattacttattgagcgtttaagcctcaggccttgccaaagtttacagtccgttgtgtctgccgttatttag

SEQ ID NO: 285911 - DNA, 881 bp, Homo sapiens
gacgtcattgagctgcgacccttgttcaacgccgttggcgaagccagctgctggaggtgccgagaatctgagtttcggcaagcagccaggtctggaaactaatattttaaaaatgactacaccaaacaagacacctcctggtgctgaccccaagcagttggaaaggactggaacagtacgggaaattgggtcacaagctgtttggtcactctcatcttgcaaaccaggatttggagtggatcagttacgagatgacaatctagaaacttattggcaatcagatggttcccagcctcatttagtgaacatccaattcagaagaaaaacaacagtgaagacattatgtatttatgcagactacaaatctgatgaaagctatactccaagcaagatctcagtcagagtaggaaataattttcacaaccttcaagaaattcggcaacttgagttggtggaaccaagtggctggattcatgttcccttaactgacaatcataagaagccaactcgtacattcatgatacagattgctgttctagccaatcaccagaatggaagagacacccatatgagacaaattaaaatatacacaccagtagaagagagctccattggtaaatttcctagatgtacaactatagatttcatgatgtatcgttcaataaggtgactttaaaatgagacgaaaatcattaaacgtatctttgttttatcctgtatttaaataatatatcatgtacctttattgaacaaggcatccgttatatctaattttgtatatgtttaaaaatattttattgtaactttgacaaataaatttggggtcatattatctttattttctttaacatgtaataaagctcacatattttacattacta

SEQ ID NO: 285912 - DNA, 1676 bp, Homo sapiens
gacgtcattgagctgcgacccttgttcaacgccgttggcgaagccagctgctggaggtgccgagaatctgagtttcggcaagcagccaggtctggaaactaatattttaaaaatgactacaccaaacaagacacctcctggtgctgaccccaagcagttggaaaggactggaacagtacgggaaattgggtcacaagctgtttggtcactctcatcttgcaaaccaggatttggagtggatcagttacgagatgacaatctagaaacttattggcaatcagatggttcccagcctcatttagtgaacatccaattcagaagaaaaacaacagtgaagacattatgtatttatgcagactacaaatctgatgaaagctatactccaagcaagatctcagtcagagtaggaaataattttcacaaccttcaagaaattcggcaacttgagttggtggaaccaagtggctggattcatgttcccttaactgacaatcataagaagccaactcgtacattcatgatacagattgctgttctagccaatcaccagaatggaagagacacccatatgagacaaattaaaatatacacaccagtagaagagagctccattggtaaatttcctagatgtacaactatagatttcatgatgtatcgttcaataaggtgactttaaaatgagacgaaaatcattaaacgtatctttgttttatcctgtatttaaataatatatcatgtacctttattgaacaaggcatccgttatatctaattttgtatatgtttaaaaatattttattgtaactttgacaaataaatttggggtcatattatctttattttctttaacatgtaataaagctcacatattttacattactataaaaatggatttgaagccaatcattttattttcccttgtatcaaaagaaaagagttccttgtatcaaaagaaaagagttgaactgaaaatttcagtatatacacaattataatagctaggtgattatttcattagtgttcatacattagagtaatggtttattgcatatttgagaacaagactgtgttttatcaatatatatcatctttaataggtcaaaattactattttttctacccagaggaaggttattcttttaatactggatcttttaaaaaacagtgtcaaataagcttagtgttaggttgtctgatgagaaccaatctaatatggggagtataattaattgtctcatattcaccttcacggaatacttacagccctagggttgtctgtatcctaatgatattatgtaaagattgcctgtataatctagcagtacttatggaagagttctagcagtacttatggaagagttattttcaaatttgtgtctgacattgtagcattccctgggcagtcatatatcccataaaatcgtaaaagtatgtgaaattttttatatatattaaaagattttaaagaaatacatggaaatgtggttttttccatggtttaaaatgagtagatttgattttgtatgctgttttctctagatgtattactttttttcgggggatggttatttagccacagaatttacctagattcactcttgtttggaaaagattgctctctgtggttcatgcattgctgggtacactaaagtattaaatagtgaatattatttaaaa

SEQ ID NO: 285913 - DNA, 751 bp, Homo sapiens
  misc_feature (747)..(747): n is a, c, g, or t
gacgtcattgagctgcgacccttgttcaacgccgttggcgaagccagctgctggaggtgccgagaatctgagtttcggcaagcagccaggtctggaaactaatattttaaaaatgactacaccaaacaagacacctcctggtgctgaccccaagcagttggaaaggactggaacagtacgggaaattgggtcacaagctgtttggtcactctcatcttgcaaaccaggatttggagtggatcagttacgagatgacaatctagaaacttattggcaatcagatggttcccagcctcatttagtgaacatccaattcagcaacttgagttggtggaaccaagtggctggattcatgttcccttaactgacaatcataagaagccaactcgtacattcatgatacagattgctgttctagccaatcaccagaatggaagagacacccatatgagacaaattaaaatatacacaccagtagaagagagctccattggtaaatttcctagatgtacaactatagatttcatgatgtatcgttcaataaggtgactttaaaatgagacgaaaatcattaaacgtatctttgttttatcctgtatttaaataatatatcatgtacctttattgaacaaggcatccgttatatctaattttgtatatgtttaaaaatattttattgtaactttgacaaataaatttggggtcatattatctttattttctttaaacagggccacattttttctncccc

SEQ ID NO: 285914 - DNA, 919 bp, Homo sapiens
gacgtcattgagctgcgacccttgttcaacgccgttggcgaagccagctgctggaggtgccgagaatctgagtttcggcaagcagccaggtctggaaactaatattttaaaaatgactacaccaaacaagacacctcctggtgctgaccccaagcagttggaaaggactggaacagtacgggaaattgggtcacaagctgtttggtcactctcatcttgcaaaccaggatttggagtggatcagttacgagatgacaatctagaaacttattggcaatcagatggttcccagcctcatttagtgaacatccaattcagaagaaaaacaacagtgaagacattatgtatttatgcagactacaaatctgatgaaagctatactccaagcaagatctcagtcagagtaggaaataattttcacaaccttcaagaaattcgggctttggtatcaggatgatgctggcctcatcaaatgagcaacttgagttggtggaaccaagtggctggattcatgttcccttaactgacaatcataagaagccaactcgtacattcatgatacagattgctgttctagccaatcaccagaatggaagagacacccatatgagacaaattaaaatatacacaccagtagaagagagctccattggtaaatttcctagatgtacaactatagatttcatgatgtatcgttcaataaggtgactttaaaatgagacgaaaatcattaaacgtatctttgttttatcctgtatttaaataatatatcatgtacctttattgaacaaggcatccgttatatctaattttgtatatgtttaaaaatattttattgtaactttgacaaataaatttggggtcatattatctttattttctttaacatgtaataaagctcacatattttacattacta

SEQ ID NO: 285915 - DNA, 1383 bp, Homo sapiens
gacgtcattgagctgcgacccttgttcaacgccgttggcgaagccagctgctggaggtgccgagaatctgagtttcggcaagcagccaggtctggaaactctgtgagtgtgtgggcttttctccgacgtcgagcgtggtcctagcgtaaacagatgcattcgcctctccggtttcaatctttttttacgtttgcgctttcctcaaggccggtgggtcaggagtggagccttagtcattctaacgctggaggtgtcagtaggaccaacagagtctggtgccgacacggcttactgttgcgcgctcttctaggcctcaacttcctctcaactgtgtggtcagttcagggccgggaatccaatcttttccgagctccatattttatccacttggtggcgtccagtcccaagtccggcagttgaattctgccctaaagatgggctttatttctatctttttttaggtaacaggacattcagttagtaatgatggttgcaggttgaatagtctcgccctagatctcacctaacttgcagtaagtatcaagtgcttgtgtgccgattaaagaacaacttcggatacaatgggaggtgtcaaggaaacgaatattttaaaaatgactacaccaaacaagacacctcctggtgctgaccccaagcagttggaaaggactggaacagtacgggaaattgggtcacaagctgtttggtcactctcatcttgcaaaccaggatttggagtggatcagttacgagatgacaatctagaaacttattggcaatcagatggttcccagcctcatttagtgaacatccaattcagaagaaaaacaacagtgaagacattatgtatttatgcagactacaaatctgatgaaagctatactccaagcaagatctcagtcagagtaggaaataattttcacaaccttcaagaaattcggcaacttgagttggtggaaccaagtggctggattcatgttcccttaactgacaatcataagaagccaactcgtacattcatgatacagattgctgttctagccaatcaccagaatggaagagacacccatatgagacaaattaaaatatacacaccagtagaagagagctccattggtaaatttcctagatgtacaactatagatttcatgatgtatcgttcaataaggtgactttaaaatgagacgaaaatcattaaacgtatctttgttttatcctgtatttaaataatatatcatgtacctttattgaacaaggcatccgttatatctaattttgtatatgtttaaaaatattttattgtaactttgacaaataaatttggggtcatattatctttattttctttaacatgtaataaagctcacatattttacattacta

SEQ ID NO: 285916 - DNA, 1022 bp, Homo sapiens
gacgtcattgagctgcgacccttgttcaacgccgttggcgaagccagctgctggaggtgccgagaatctgagtttcggcaagcagccaggtctggaaactgtaacaggacattcagttagtaatgatggttgcaggttgaatagtctcgccctagatctcacctaacttgcagtaagtatcaagtgcttgtgtgccgattaaagaacaacttcggatacaatgggaggtgtcaaggaaacgaatattttaaaaatgactacaccaaacaagacacctcctggtgctgaccccaagcagttggaaaggactggaacagtacgggaaattgggtcacaagctgtttggtcactctcatcttgcaaaccaggatttggagtggatcagttacgagatgacaatctagaaacttattggcaatcagatggttcccagcctcatttagtgaacatccaattcagaagaaaaacaacagtgaagacattatgtatttatgcagactacaaatctgatgaaagctatactccaagcaagatctcagtcagagtaggaaataattttcacaaccttcaagaaattcggcaacttgagttggtggaaccaagtggctggattcatgttcccttaactgacaatcataagaagccaactcgtacattcatgatacagattgctgttctagccaatcaccagaatggaagagacacccatatgagacaaattaaaatatacacaccagtagaagagagctccattggtaaatttcctagatgtacaactatagatttcatgatgtatcgttcaataaggtgactttaaaatgagacgaaaatcattaaacgtatctttgttttatcctgtatttaaataatatatcatgtacctttattgaacaaggcatccgttatatctaattttgtatatgtttaaaaatattttattgtaactttgacaaataaatttggggtcatattatctttattttctttaacatgtaataaagctcacatattttacattacta

SEQ ID NO: 285917 - DNA, 992 bp, Homo sapiens
gacgtcattgagctgcgacccttgttcaacgccgttggcgaagccagctgctggaggtgccgagaatctgagtttcggcaagcagccaggtctggaaactgtaacaggacattcagttagtaatgatggttgcaggttgaatagtctcgccctagatctcacctaacttgcagaatattttaaaaatgactacaccaaacaagacacctcctggtgctgaccccaagcagttggaaaggactggaacagtacgggaaattgggtcacaagctgtttggtcactctcatcttgcaaaccaggatttggagtggatcagttacgagatgacaatctagaaacttattggcaatcagatggttcccagcctcatttagtgaacatccaattcagaagaaaaacaacagtgaagacattatgtatttatgcagactacaaatctgatgaaagctatactccaagcaagatctcagtcagagtaggaaataattttcacaaccttcaagaaattcgggctttggtatcaggatgatgctggcctcatcaaatgagcaacttgagttggtggaaccaagtggctggattcatgttcccttaactgacaatcataagaagccaactcgtacattcatgatacagattgctgttctagccaatcaccagaatggaagagacacccatatgagacaaattaaaatatacacaccagtagaagagagctccattggtaaatttcctagatgtacaactatagatttcatgatgtatcgttcaataaggtgactttaaaatgagacgaaaatcattaaacgtatctttgttttatcctgtatttaaataatatatcatgtacctttattgaacaaggcatccgttatatctaattttgtatatgtttaaaaatattttattgtaactttgacaaataaatttggggtcatattatctttattttctttaacatgtaataaagctcacatattttacattacta

SEQ ID NO: 285918 - DNA, 1555 bp, Homo sapiens
gacgtcattgagctgcgacccttgttcaacgccgttggcgaagccagctgctggaggtgccgagaatctgagtttcggcaagcagccaggtctggaaactaatattttaaaaatgactacaccaaacaagacacctcctggtgctgaccccaagcagttggaaaggactggaacagtacgggaaattgggtcacaagctgtttggtcactctcatcttgcaaaccaggatttggagtggatcagttacgagatgacaatctagaaacttattggcaatcagatggttcccagcctcatttagtgaacatccaattcagcaacttgagttggtggaaccaagtggctggattcatgttcccttaactgacaatcataagaagccaactcgtacattcatgatacagattgctgttctagccaatcaccagaatggaagagacacccatatgagacaaattaaaatatacacaccagtagaagagagctccattggtaaatttcctagatgtacaactatagatttcatgatgtatcgttcaataaggtgactttaaaatgagacgaaaatcattaaacgtatctttgttttatcctgtatttaaataatatatcatgtacctttattgaacaaggcatccgttatatctaattttgtatatgtttaaaaatattttattgtaactttgacaaataaatttggggtcatattatctttattttctttaacatgtaataaagctcacatattttacattactataaaaatggatttgaagccaatcattttattttcccttgtatcaaaagaaaagagttccttgtatcaaaagaaaagagttgaactgaaaatttcagtatatacacaattataatagctaggtgattatttcattagtgttcatacattagagtaatggtttattgcatatttgagaacaagactgtgttttatcaatatatatcatctttaataggtcaaaattactattttttctacccagaggaaggttattcttttaatactggatcttttaaaaaacagtgtcaaataagcttagtgttaggttgtctgatgagaaccaatctaatatggggagtataattaattgtctcatattcaccttcacggaatacttacagccctagggttgtctgtatcctaatgatattatgtaaagattgcctgtataatctagcagtacttatggaagagttctagcagtacttatggaagagttattttcaaatttgtgtctgacattgtagcattccctgggcagtcatatatcccataaaatcgtaaaagtatgtgaaattttttatatatattaaaagattttaaagaaatacatggaaatgtggttttttccatggtttaaaatgagtagatttgattttgtatgctgttttctctagatgtattactttttttcgggggatggttatttagccacagaatttacctagattcactcttgtttggaaaagattgctctctgtggttcatgcattgctgggtacactaaagtattaaatagtgaatattatttaaaa

SEQ ID NO: 285919 - DNA, 975 bp, Homo sapiens
gacgtcattgagctgcgacccttgttcaacgccgttggcgaagccagctgctggaggtgccgagaatctgagtttcggcaagcagccaggtctggaaactctgtgagtgtgtgggcttttctccgacgtcgagcgtggtcctagcgtaaacagatgcattcgcctctccggtttcaatctttttttacgtttgcgctttcctcaaggccggtgggtcaggagtggagccttagtcattctaacgctggaggtgtcagtaggaccaacagagtctggtgccgacacggcttactgttgcgcgctcttctaggcctcaacttcctctcaactgtgtggtcagttcagggccgggaatccaatcttttccgagctccatattttatccacttggtggcgtccagtcccaagtccggcagttgaattctgccctaaagatgggctttatttctatctttttttaggtaacaggacattcagttagtaatgatggttgcaggttgaatagtctcgccctagatctcacctaacttgcagaatattttaaaaatgactacaccaaacaagacacctcctggtgctgaccccaagcagttggaaaggactggaacagtacgggaaattgggtcacaagctgtttggtcactctcatcttgcaaaccaggatttggagtggatcagttacgagatgacaatctagaaacttattggcaatcagatggttcccagcctcatttagtgaacatccaattcagaagaaaaacaacagtgaagacattatgtatttatgcagactacaaatctgatgaaagctatactccaagcaagatctcagtcagagtaggaaataattttcacaaccttcaagaaattcggcctcatgttttacatgtgaatgaagaatcaatgaatcttcaagtctcaggataaaggaatgagaatattgaagcagaaactgcaaataaaagacaatgcata

SEQ ID NO: 285920 - DNA, 292 bp, Homo sapiens
cagtgttgttctaagctgttttattgacccaactgctgagatgtagtctccaggtcaggataaggtgaccttatgatgggccataactagaggaaggcagaatgggaaaaggaacaaggtcaacatattccccgacacaaaaccccctaggtgatccgtcaatgtctgggtgagtgacatctactgtctgagcagttgtgggggacagagtgggctgggcccaggtgtcactcattagctttgatgtggcctctaatcatctcccaggcctacctgacacattgttaaatgc

SEQ ID NO: 285921 - DNA, 539 bp, Homo sapiens
gagccgcttcatcctctactcggtgtaactatctctgagattccacatcctttgagattaaaaacactttacatcttctgggtctgttgacgggtccttccaccaatcacatcgctgtgcttctgtgacaactgaacacaactggaagtgaaaaacaactcctcattcaaaggggtttaacaacttgaacagatctcttcagaaccgggaaaacatctccttttgttgacatcacatgaaggttgaagtccgctgtcaggaccatgtttaaggatctcaattgccatgtggataagtcaacgacgggcagccaacaggaacaagtatccattagattatcatggagctgaaaagttcctaccacctagtgacatcatgccatcgtaacatcacaatgcaaagcatcacccatgtgtttgtggtggtaatggtgtaaacaaactcaccttgctgccagctgtgtaaaagtctagcatgtacaattatgtacagtatataatacttgaaaatgataataaatgactatgttactatgttta

SEQ ID NO: 285922 - DNA, 411 bp, Homo sapiens
cctccattccaaactctcctgtataaagtctgcatttgtatgggcaaaataaatgaaatgggacacaggaaatatgtacttcgctgttttaacaccaatggagactgctagtttgcctaagagactaccgaaaacacaattctattatagtcacaaaagaaaatgaagttagaaaaactgaaagttacctataaaagtctgttgggcctgtgaatttccccctaccctcggggaacatgaatgaggataattagatgcattagcacccattttcttcagtcactcaggcattccgtctgcgggttcttcagagtataatcccagaggcctttatgaaccttcaaccctggatccagcagcctcttttcatccatttcttgatatgaaataaaaataatttaattcaaaaaa

SEQ ID NO: 285923 - DNA, 498 bp, Homo sapiens
ggatgactctgctggatctagagctaaatagaaacttctttgccatagaaacttctctgttgaaggactgcgtccccattcaaagaggtcagatttgtgggcaggcaagagctcaggaatgaagaaccaaaaaggaggctctcaacccctctccaaggccagacgctctctgtactcccattaacttcacaaccaagtgcagacgctcgaccaactcttcagccagtgcatgcagggctctggaggtgatgccagcaggatctggaggatctcgctctgtaacccaggctctggaatgcagtggcacaaccacggctcactgcagtctcaacctcctgggctcaactgatccccccacttcagcctcctgagtagctgggactacagaggacactggaggtgaagaaggaagctcttgactctcctaaagctgatcccaaagtgaaggctttgaaggccaagaaggcagtgctgaaaggcatccacacagccaccaag

SEQ ID NO: 285924 - DNA, 407 bp, Homo sapiens
tgggtcactgtaggtcctgcatgaacttgtccaccaactgtgttttgctgtttgggttgtaaattaaccgtgaatacaagtaaccaagaaaatcctctccacagaccaactcttcagccagtgcatgcagggctctggaggtgatgccagcaggatctggaggtgaggcactgggtggtttctcagacacccggagatggcttcagcctgggccgccccagctgcctagtgcactggtgtccctccaacacaggctactcccccaacacccatgtgccaccaagtttctcaactgcacacgccagatgcgcgttttacgagaatcaaatgagtatttatactgtatatgtgtgtgtgtatatatatatatataaattaatctgcacgtatataaacactaaaaggag

SEQ ID NO: 285925 - DNA, 462 bp, Homo sapiens
agtctgttgtacctggaataaaaaagcagaggaagtgacaccctcacttgaaatggtcacttcccttcaatgtgctgcagagaacaggactgatgtggggaatgctgctgctgctgcttgtcaaacatctacggctgatggccacacattacttcttcaaatgaccttggacctcagagccttcactataagtaggtacatggtacctctcccagggatgttgtgggacccatgaagagtccgctgtctgtgatgtgcaaggtgctctgagtcaggtgcagcttgtactgctataggagcctaagaatctgcctcacctacactccctctgggcaattaggtatgctgaaaatgcccaacagacattcaggactacattggtatctgtttaaggaaaatcctcagctgctcacacagtaatgaaagagacaagctagaaaattactacttgataagactctg

SEQ ID NO: 285926 - DNA, 2908 bp, Homo sapiens
ggctggaagcaacagatggggactgcagaggaggtggtggtattgggatagtgctgcagccaagaacttaacgactgaaagtaactgggatatcttcataattatctgaaggtcacagtgggagaacaaaattaaaagaactgagaagacttacaagagaacctcctaagagtcacccaaacaatcggctgagaatgagaagaggttcaagtgattcttgtgcctcaggctcccaagtagctgggactacagtagctgggccagcacacccagaaagcctcacattgtgcagtggagaagctgagagaagaggaaaagaggagtggccagactcccaccactacccaggaccaactcctgctcctgaatcttctgatgggccccacaaggtgacagtgctggctacaatgctatccagccggtggtggccaagttcctgggggatcctagggctgggcccccgaagccctcctcggggatcccagctctgtgccctctatgcctttacttatactggggcagatggccagcaggtgtctctggctgaaggggataggttcctactgcttcgaaagaccaactccgactggtggttggcaagacgcctagaagctccctccacctctcgacccatcttcgtcccagcagcctatatgatagaggaatccatcccttcccagagtccaactaccgtcatccccggccaattgctctggactcctgggccgaagttgtttcatggttccctggaggagttgtctcaggccctcccaagcagggctcaggctagctcggagcagcctcctccacttccccgcaaaatgtgtaggagcgtcagcactgacaatctgagccccagccttctgaagcctttccaggaaggaccaagcggaagatccctctcccaggaagacttgccgtcagaagccagtgccagcacagcaggcccccagcccctcatgtcagagccccctgtgtactgtaacctggtggaccttcgccgctgtcctcggtccccacccccaggccctgcatgccccctgctgcagaggctggatgcctgggagcagcacctggaccccaactctggacgctgcttctacataaattcactgactggctgcaagtcctggaagcccccgcgccgcagtcgcagcgagacgaaccctggctccatggaggggacacagaccctgaagaggaacaatgatgtcctgcaacctcaggcaaagggcttcagatctgacacagggaccccagaaccgcttgacccacagggttcactcagcctcagccaacgcacctcgcagcttgaccctccagccttgcaggcccctcgacctctgccgcagctcctggacgacccccatgaggtggaaaagtcgggtctgctcaacatgaccaagattgcccaaggggggcgcaagctcaggaagaactggggcccgtcttgggtggtgttaacgggtaacagcctggtgttctaccgagagccaccgccgacagcgccctccgcaggctggggaccagcgggtagccggcccgaaagtagcgtggacctgcgcggggcggccctggcgcacggccgccacctgtccagccgccgcaacgtcctgcacatccgcacgatccctggccacgagttcctgctgcagtcggaccacgagacagagctgcgagcctggcaccgcgcgctgcggactgtcatcgagcggctggttagatgggtggaggcccggagggaggctccgaccggccgggaccaagggagtggggatcgggagaaccccctggagctgcgtctgtcgggctctggacccgcggagctgagcgccggggaggacgaagaagaggagtcggagctggtgtccaagccgctgctgcgcctcagcagccgccggagctccattcgggggcccgaaggcaccgagcagaaccgcgtgcgcaacaaactaaagcggctcatcgcgaagagaccgcccttacaaagcctgcaggagcggggtctgctccgagaccaggtgttcggctgccagttggaatcactctgccagcgggaaggagacacggtgcccagctttttgcggctctgcattgctgctgtggataaaagaggtctagatgtggatggcatttatcgggtgagcgggaacttggcagtggtccagaagcttcgctttctggtggacagagagcgtgcggtcacctccgatgggaggtatgtgttcccagaacagccaggacaagaaggtcggttagatttggacagtactgagtgggatgacattcatgtggtcaccggagccctgaagctttttctccgggagctgccccagcctctggtgccaccactgctgctgccccatttccgtgctgcccttgcactctccgaatcagagcagtgcctctctcagatacaagaattaataggctcaatgccaaagcccaaccatgacactctacggtacctcctggagcatttatgcagggtgatagcacactcagataagaatcgcatgacaccccacaacctgggaattgtgtttggaccaaccctgtttcggccagagcaggagacatctgacccagcagcccatgctctctacccagggcagctggtccagctgatgctcaccaacttcaccagcctcttcccctgatgcagggaaggaagaagagaaaacatatttccggtcatctctggtggtgagaggctggtgttctgttttgaggatatccctttaaatctcccaaatgactgtctctatcttcatgagtgtgacttgaggtgttgggatgggtgagggagcttctctaaagaggaaagtgagtggattaacccctgcttctcttcttgttccctgttatcattcctccccaacataataatacataaagtggcatggta

SEQ ID NO: 285927 - DNA, 2583 bp, Homo sapiens
ctccctgtttctgtcttgaacctgattctttcttcttatctccttcctgtgtccacctcaagactcccaccactacccaggaccaactcctgctcctgaatcttctgatgggccccacaaggtgacagtgctggctacaatgctatccagccggtggtggccaagttcctgggggatcctagggctgggcccccgaagccctcctcggggatcccagctctgtgccctctatgcctttacttatactggggcagatggccagcaggtgtctctggctgaaggggataggttcctactgcttcgaaagaccaactccgactggtggttggcaagacgcctagaagctccctccacctctcgacccatcttcgtcccagcagcctatatgatagaggaatccatcccttcccagagtccaactaccgtcatccccggccaattgctctggactcctgggccgaagttgtttcatggttccctggaggagttgtctcaggccctcccaagcagggctcaggctagctcggagcagcctcctccacttccccgcaaaatgtgtaggagcgtcagcactgacaatctgagccccagccttctgaagcctttccaggaaggaccaagcggaagatccctctcccaggaagacttgccgtcagaagccagtgccagcacagcaggcccccagcccctcatgtcagagccccctgtgtactgtaacctggtggaccttcgccgctgtcctcggtccccacccccaggccctgcatgccccctgctgcagaggctggatgcctgggagcagcacctggaccccaactctggacgctgcttctacataaattcactgactggctgcaagtcctggaagcccccgcgccgcagtcgcagcgagacgaaccctggctccatggaggggacacagaccctgaagaggaacaatgatgtcctgcaacctcaggcaaagggcttcagatctgacacagggaccccagaaccgcttgacccacagggttcactcagcctcagccaacgcacctcgcagcttgaccctccagccttgcaggcccctcgacctctgccgcagctcctggacgacccccatgaggtggaaaagtcgggtctgctcaacatgaccaagattgcccaaggggggcgcaagctcaggaagaactggggcccgtcttgggtggtgttaacgggtaacagcctggtgttctaccgagagccaccgccgacagcgccctccgcaggctggggaccagcgggtagccggcccgaaagtagcgtggacctgcgcggggcggccctggcgcacggccgccacctgtccagccgccgcaacgtcctgcacatccgcacgatccctggccacgagttcctgctgcagtcggaccacgagacagagctgcgagcctggcaccgcgcgctgcggactgtcatcgagcggctggatcgggagaaccccctggagctgcgtctgtcgggctctggacccgcggagctgagcgccggggaggacgaagaagaggagtcggagctggtgtccaagccgctgctgcgcctcagcagccgccggagctccattcgggggcccgaaggcaccgagcagaaccgcgtgcgcaacaaactaaagcggctcatcgcgaagagaccgcccttacaaagcctgcaggagcggggtctgctccgagaccaggtgttcggctgccagttggaatcactctgccagcgggaaggagacacggtgcccagctttttgcggctctgcattgctgctgtggataaaagaggtctagatgtggatggcatttatcgggtgagcgggaacttggcagtggtccagaagcttcgctttctggtggacagagagcgtgcggtcacctccgatgggaggtatgtgttcccagaacagccaggacaagaaggtcggttagatttggacagtactgagtgggatgacattcatgtggtcaccggagccctgaagctttttctccgggagctgccccagcctctggtgccaccactgctgctgccccatttccgtgctgcccttgcactctccgaatcagagcagtgcctctctcagatacaagaattaataggctcaatgccaaagcccaaccatgacactctacggtacctcctggagcatttatgcagggtgatagcacactcagataagaatcgcatgacaccccacaacctgggaattgtgtttggaccaaccctgtttcggccagagcaggagacatctgacccagcagcccatgctctctacccagggcagctggtccagctgatgctcaccaacttcaccagcctcttcccctgatgcagggaaggaagaagagaaaacatatttccggtcatctctggtggtgagaggctggtgttctgttttgaggatatccctttaaatctcccaaatgactgtctctatcttcatgagtgtgacttgaggtgttgggatgggtgagggagcttctctaaagaggaaagtgagtggattaacccctgcttctcttcttgttccctgttatcattcctccccaacataataatacataaagtggcatggta

SEQ ID NO: 285928 - DNA, 847 bp, Homo sapiens
ggaaaggggctcctcttcccttctgtagacccttctctgtcttcttttaccttgcaggatgtgagggtggggcacccccttcaacattccccccaccccacaaaaagcctgttcccctttcctgtggccctgaggtgggggtggggtgggggaggcgggaagttggcaacaggaagtgaggagaagagcaaagaaaactgtgagagagagaatttttaaaaagcagctggggcctgaggtttctcccccagtaccctgggtcacctcagcccagagctggcggcaggcccccagcccctcatgtcagagccccctgtgtactgtaacctggtggaccttcgccgctgtcctcggtccccacccccaggccctgcatgccccctgctgcagaggctggatgcctgggagcagcacctggaccccaactctggacgctgcttctacataaattcactgactggctgcaagtcctggaagcccccgcgccgcagtcgcagcgagacgaaccctggctccatggaggggacacagaccctgaagaggaacaatgatgtcctgcaacctcaggcaaagggcttcagatctgacacagggaccccagaaccgcttgacccacagggttcactcagcctcagccaacgcacctcgcagcttgaccctccagccttgcaggcccctcgacctctgccgcagctcctggacgacccccatgtgaacctcccatttctttgtgaaggccaagatcctccctgccccccctccccccttttcctgctccacataaacatcttcctctttctgaatatcctcctacccagccctcccccagcaactttaagggacttca

SEQ ID NO: 285929 - DNA, 2057 bp, Homo sapiens
ggaaaggggctcctcttcccttctgtagacccttctctgtcttcttttaccttgcaggatgtgagggtggggcacccccttcaacattccccccaccccacaaaaagcctgttcccctttcctgtggccctgaggtgggggtggggtgggggaggcgggaagttggcaacaggaagtgaggagaagagcaaagaaaactgtgagagagagaatttttaaaaagcagctggggcctgaggtttctcccccagtaccctgggtcacctcagcccagagctggcggcaggcccccagcccctcatgtcagagccccctgtgtactgtaacctggtggaccttcgccgctgtcctcggtccccacccccaggccctgcatgccccctgctgcagaggctggatgcctgggagcagcacctggaccccaactctggacgctgcttctacataaattcactgactggctgcaagtcctggaagcccccgcgccgcagtcgcagcgagacgaaccctggctccatggaggggacacagaccctgaagaggaacaatgatgtcctgcaacctcaggcaaagggcttcagatctgacacagggaccccagaaccgcttgacccacagggttcactcagcctcagccaacgcacctcgcagcttgaccctccagccttgcaggcccctcgacctctgccgcagctcctggacgacccccatgaggtggaaaagtcgggtctgctcaacatgaccaagattgcccaaggggggcgcaagctcaggaagaactggggcccgtcttgggtggtgttaacgggtaacagcctggtgttctaccgagagccaccgccgacagcgccctccgcaggctggggaccagcgggtagccggcccgaaagtagcgtggacctgcgcggggcggccctggcgcacggccgccacctgtccagccgccgcaacgtcctgcacatccgcacgatccctggccacgagttcctgctgcagtcggaccacgagacagagctgcgagcctggcaccgcgcgctgcggactgtcatcgagcggctggatcgggagaaccccctggagctgcgtctgtcgggctctggacccgcggagctgagcgccggggaggacgaagaagaggagtcggagctggtgtccaagccgctgctgcgcctcagcagccgccggagctccattcgggggcccgaaggcaccgagcagaaccgcgtgcgcaacaaactaaagcggctcatcgcgaagagaccgcccttacaaagcctgcaggagcggggtctgctccgagaccaggtgttcggctgccagttggaatcactctgccagcgggaaggagacacggtgcccagctttttgcggctctgcattgctgctgtggataaaagaggtctagatgtggatggcatttatcgggtgagcgggaacttggcagtggtccagaagcttcgctttctggtggacagagagcgtgcggtcacctccgatgggaggtatgtgttcccagaacagccaggacaagcactctccgaatcagagcagtgcctctctcagatacaagaattaataggctcaatgccaaagcccaaccatgacactctacggtacctcctggagcatttatgcagggtgatagcacactcagataagaatcgcatgacaccccacaacctgggaattgtgtttggaccaaccctgtttcggccagagcaggagacatctgacccagcagcccatgctctctacccagggcagctggtccagctgatgctcaccaacttcaccagcctcttcccctgatgcagggaaggaagaagagaaaacatatttccggtcatctctggtggtgagaggctggtgttctgttttgaggatatccctttaaatctcccaaatgactgtctctatcttcatgagtgtgacttgaggtgttgggatgggtgagggagcttctctaaagaggaaagtgagtggattaacccctgcttctcttcttgttccctgttatcattcctccccaacataataatacataaagtggcatggta

SEQ ID NO: 285930 - DNA, 2264 bp, Homo sapiens
ggaaaggggctcctcttcccttctgtagacccttctctgtcttcttttaccttgcaggatgtgagggtggggcacccccttcaacattccccccaccccacaaaaagcctgttcccctttcctgtggccctgaggtgggggtggggtgggggaggcgggaagttggcaacaggaagtgaggagaagagcaaagaaaactgtgagagagagaatttttaaaaagcagctggggcctgaggtttctcccccagtaccctgggtcacctcagcccagagctggcggcaggcccccagcccctcatgtcagagccccctgtgtactgtaacctggtggaccttcgccgctgtcctcggtccccacccccaggccctgcatgccccctgctgcagaggctggatgcctgggagcagcacctggaccccaactctggacgctgcttctacataaattcactgactggctgcaagtcctggaagcccccgcgccgcagtcgcagcgagacgaaccctggctccatggaggggacacagaccctgaagaggaacaatgatgtcctgcaacctcaggcaaagggcttcagatctgacacagggaccccagaaccgcttgacccacagggttcactcagcctcagccaacgcacctcgcagcttgaccctccagccttgcaggcccctcgacctctgccgcagctcctggacgacccccatgaggtggaaaagtcgggtctgctcaacatgaccaagattgcccaaggggggcgcaagctcaggaagaactggggcccgtcttgggtggtgttaacgggtaacagcctggtgttctaccgagagccaccgccgacagcgccctccgcaggctggggaccagcgggtagccggcccgaaagtagcgtggacctgcgcggggcggccctggcgcacggccgccacctgtccagccgccgcaacgtcctgcacatccgcacgatccctggccacgagttcctgctgcagtcggaccacgagacagagctgcgagcctggcaccgcgcgctgcggactgtcatcgagcggctggatcgggagaaccccctggagctgcgtctgtcgggctctggacccgcggagctgagcgccggggaggacgaagaagaggagtcggagctggtgtccaagccgctgctgcgcctcagcagccgccggagctccattcgggggcccgaaggcaccgagcagaaccgcgtgcgcaacaaactaaagcggctcatcgcgaagagaccgcccttacaaagcctgcaggagcggggtctgctccgagaccaggtgttcggctgccagttggaatcactctgccagcgggaaggagacacggtgcccagctttttgcggctctgcattgctgctgtggataaaagaggtctagatgtggatggcatttatcgggtgagcgggaacttggcagtggtccagaagcttcgctttctggtggacagagagcgtgcggtcacctccgatgggaggtatgtgttcccagaacagccaggacaagaaggtcggttagatttggacagtactgagtgggatgacattcatgtggtcaccggagccctgaagctttttctccgggagctgccccagcctctggtgccaccactgctgctgccccatttccgtgctgcccttgcactctccgaatcagagcagtgcctctctcagatacaagaattaataggctcaatgccaaagcccaaccatgacactctacggtacctcctggagcatttatgcagggtgatagcacactcagataagaatcgcatgacaccccacaacctgggaattgtgtttggaccaaccctgtttcggccagagcaggagacatctgacccagcagcccatgctctctacccagggcagctggtccagctgatgctcaccaacttcaccagcctcttcccctgatgcagggaaggaagaagagaaaacatatttccggtcatctctggtggtgagaggctggtgttctgttttgaggatatccctttaaatctcccaaatgactgtctctatcttcatgagtgtgacttgaggtgttgggatgggtgagggagcttctctaaagaggaaagtgagtggattaacccctgcttctcttcttgttccctgttatcattcctccccaacataataatacataaagtggcatggtaaaaaaaaaacatcacaccaccaacaacaaactcaaataaacacctcgacactattcaccagcaaaaatactg

SEQ ID NO: 285931 - DNA, 2086 bp, Homo sapiens
ggaaaggggctcctcttcccttctgtagacccttctctgtcttcttttaccttgcaggatgtgagggtggggcacccccttcaacattccccccaccccacaaaaagcctgttcccctttcctgtggccctgaggtgggggtggggtgggggaggcgggaagttggcaacaggaagtgaggagaagagcaaagaaaactgtgagagagagaatttttaaaaagcagctggggcctgaggtttctcccccagtaccctgggtcacctcagcccagagctggcggcaggcccccagcccctcatgtcagagccccctgtgtactgtaacctggtggaccttcgccgctgtcctcggtccccacccccaggccctgcatgccccctgctgcagaggctggatgcctgggagcagcacctggaccccaactctggacgctgcttctacataaattcactgactggctgcaagtcctggaagcccccgcgccgcagtcgcagcgagacgaaccctggctccatggaggggacacagaccctgaagaggaacaatgatgtcctgcaacctcaggcaaagggcttcagatctgacacagggaccccagaaccgcttgacccacagggttcactcagcctcagccaacgcacctcgcagcttgaccctccagccttgcaggcccctcgacctctgccgcagctcctggacgacccccatgaggtggaaaagtcgggtctgctcaacatgaccaagattgcccaaggggggcgcaagctcaggaagaactggggcccgtcttgggtggtgttaacgggtaacagcctggtgttctaccgagagccaccgccgacagcgccctccgcaggctggggaccagcgggtagccggcccgaaagtagcgtggacctgcgcggggcggccctggcgcacggccgccacctgtccagccgccgcaacgtcctgcacatccgcacgatccctggccacgagttcctgctgcagtcggaccacgagacagagctgcgagcctggcaccgcgcgctgcggactgtcatcgagcggctggatcgggagaaccccctggagctgcgtctgtcgggctctggacccgcggagctgagcgccggggaggacgaagaagaggagtcggagctggtgtccaagccgctgctgcgcctcagcagccgccggagctccattcgggggcccgaaggcaccgagcagaaccgcgtgcgcaacaaactaaagcggctcatcgcgaagagaccgcccttacaaagcctgcaggagcggggtctgctccgagaccaggtgttcggctgccagttggaatcactctgccagcgggaaggagacacggtgcccagctttttgcggctctgcattgctgctgtggataaaagaggtctagatgtggatggcatttatcgggtgagcgggaacttggcagtggtccagaagcttcgctttctggtggacagagagcgtgcggtcacctccgatgggaggtatgtgttcccagaacagccaggacaagaaggtcggttagatttggacagtactgagtgggatgacattcatgtggtcaccggagccctgaagctttttctccgggagctgccccagcctctggtgccaccactgctgctgccccatttccgtgctgcccttgggtgatagcacactcagataagaatcgcatgacaccccacaacctgggaattgtgtttggaccaaccctgtttcggccagagcaggagacatctgacccagcagcccatgctctctacccagggcagctggtccagctgatgctcaccaacttcaccagcctcttcccctgatgcagggaaggaagaagagaaaacatatttccggtcatctctggtggtgagaggctggtgttctgttttgaggatatccctttaaatctcccaaatgactgtctctatcttcatgagtgtgacttgaggtgttgggatgggtgagggagcttctctaaagaggaaagtgagtggattaacccctgcttctcttcttgttccctgttatcattcctccccaacataataatacataaagtggcatggta

SEQ ID NO: 285932 - DNA, 2106 bp, Homo sapiens
ggaaaggggctcctcttcccttctgtagacccttctctgtcttcttttaccttgcaggatgtgagggtggggcacccccttcaacattccccccaccccacaaaaagcctgttcccctttcctgtggccctgaggtgggggtggggtgggggaggcgggaagttggcaacaggaagtgaggagaagagcaaagaaaactgtgagagagagaatttttaaaaagcagctggggcctgaggtttctcccccagtaccctgggtcacctcagcccagagctggcggcaggcccccagcccctcatgtcagagccccctgtgtactgtaacctggtggaccttcgccgctgtcctcggtccccacccccaggccctgcatgccccctgctgcagaggctggatgcctgggagcagcacctggaccccaactctggacgctgcttctacataaattcactgactggctgcaagtcctggaagcccccgcgccgcagtcgcagcgagacgaaccctggctccatggaggggacacagaccctgaagaggaacaatgatgtcctgcaacctcaggcaaagggcttcagatctgacacagggaccccagaaccgcttgacccacagggttcactcagcctcagccaacgcacctcgcagcttgaccctccagccttgcaggcccctcgacctctgccgcagctcctggacgacccccatgaggtggaaaagtcgggtctgctcaacatgaccaagattgcccaaggggggcgcaagctcaggaagaactggggcccgtcttgggtggtgttaacgggtaacagcctggtgttctaccgagagccaccgccgacagcgccctccgcaggctggggaccagcgggtagccggcccgaaagtagcgtggacctgcgcggggcggccctggcgcacggccgccacctgtccagccgccgcaacgtcctgcacatccgcacgatccctggccacgagttcctgctgcagtcggaccacgagacagagctgcgagcctggcaccgcgcgctgcggactgtcatcgagcggctggatcgggagaaccccctggagctgcgtctgtcgggctctggacccgcggagctgagcgccggggaggacgaagaagaggagtcggagctggtgtccaagccgctgctgcgcctcagcagccgccggagctccattcgggggcccgaaggcaccgagcagaaccgcgtgcgcaacaaactaaagcggctcatcgcgaagagaccgcccttacaaagcctgcaggagcggggtctgctccgagaccaggtgttcggctgccagttggaatcactctgccagcgggaaggagacacggtgcccagctttttgcggctctgcattgctgctgtggataaaagaggtctagatgtggatggcatttatcgggtgagcgggaacttggcagtggtccagaagcttcgctttctggtggacagagagcgtgcggtcacctccgatgggaggtatgtgttcccagaacagccaggacaagaaggtcggttagatttggacagtactgagtgggatgacattcatgtggtcaccggagccctgaagctttttctccgggagctgccccagcctctggtgccaccactgctgctgccccatttccgtgctgcccttgggtgatagcacactcagataagaatcgcatgacaccccacaacctgggaattgtgtttggaccaaccctgtttcggccagagcaggagacatctgacccagcagcccatgctctctacccagggcagctggtccagctgatgctcaccaacttcaccagcctcttcccctgatgcagggaaggaagaagagaaaacatatttccggtcatctctggtggtgagaggctggtgttctgttttgaggatatccctttaaatctcccaaatgactgtctctatcttcatgagtgtgacttgaggtgttgggatgggtgagggagcttctctaaagaggaaagtgagtggattaacccctgcttctcttcttgttccctgttatcattcctccccaacataataatacataaagtggcatggtattttttctgatgcagttcct

SEQ ID NO: 285933 - DNA, 1632 bp, Homo sapiens
agccaagtataagaagggtgtggagagtgggtagaggtggcatctggatgtagctttatttcctcctcccctaacccagaaccctggctccatggaggggacacagaccctgaagaggaacaatgatgtcctgcaacctcaggcaaagggcttcagatctgacacagggaccccagaaccgcttgacccacagggttcactcagcctcagccaacgcacctcgcagcttgaccctccagccttgcaggcccctcgacctctgccgcagctcctggacgacccccatgaggtggaaaagtcgggtctgctcaacatgaccaagattgcccaaggggggcgcaagctcaggaagaactggggcccgtcttgggtggtgttaacgggtaacagcctggtgttctaccgagagccaccgccgacagcgccctccgcaggctggggaccagcgggtagccggcccgaaagtagcgtggacctgcgcggggcggccctggcgcacggccgccacctgtccagccgccgcaacgtcctgcacatccgcacgatccctggccacgagttcctgctgcagtcggaccacgagacagagctgcgagcctggcaccgcgcgctgcggactgtcatcgagcggctggatcgggagaaccccctggagctgcgtctgtcgggctctggacccgcggagctgagcgccggggaggacgaagaagaggagtcggagctggtgtccaagccgctgctgcgcctcagcagccgccggagctccattcgggggcccgaaggcaccgagcagaaccgcgtgcgcaacaaactaaagcggctcatcgcgaagagaccgcccttacaaagcctgcaggagcggggtctgctccgagaccaggtgttcggctgccagttggaatcactctgccagcgggaaggagacacggtgcccagctttttgcggctctgcattgctgctgtggataaaagaggtctagatgtggatggcatttatcgggtgagcgggaacttggcagtggtccagaagcttcgctttctggtggacagagagcgtgcggtcacctccgatgggaggtatgtgttcccagaacagccaggacaagcactctccgaatcagagcagtgcctctctcagatacaagaattaataggctcaatgccaaagcccaaccatgacactctacggtacctcctggagcatttatgcagggtgatagcacactcagataagaatcgcatgacaccccacaacctgggaattgtgtttggaccaaccctgtttcggccagagcaggagacatctgacccagcagcccatgctctctacccagggcagctggtccagctgatgctcaccaacttcaccagcctcttcccctgatgcagggaaggaagaagagaaaacatatttccggtcatctctggtggtgagaggctggtgttctgttttgaggatatccctttaaatctcccaaatgactgtctctatcttcatgagtgtgacttgaggtgttgggatgggtgagggagcttctctaaagaggaaagtgagtggattaacccctgcttctcttcttgttccctgttatcattcctccccaacataataatacataaagtggcatggta

SEQ ID NO: 285934 - DNA, 1517 bp, Homo sapiens
ggaaaggggctcctcttcccttctgtagacccttctctgtcttcttttaccttgcaggatgtgagggtggggcacccccttcaacattccccccaccccacaaaaagcctgttcccctttcctgtggccctgaggtgggggtggggtgggggaggcgggaagttggcaacaggaagtgaggagaagagcaaagaaaactgtgagagagagaatttttaaaaagcagctggggcctgaggtttctcccccagtaccctgggtcacctcagcccagagctggcggcaggcccccagcccctcatgtcagagccccctgtgtactgtaacctggtggaccttcgccgctgtcctcggtccccacccccaggccctgcatgccccctgctgcagaggctggatgcctgggagcagcacctggaccccaactctggacgctgcttctacataaattcactgactggctgcaagtcctggaagcccccgcgccgcagtcgcagcgagacgaaccctggctccatggaggggacacagaccctgaagaggaacaatgatgtcctgcaacctcaggcaaagggcttcagatctgacacagggaccccagaaccgcttgacccacagccgctgctgcgcctcagcagccgccggagctccattcgggggcccgaaggcaccgagcagaaccgcgtgcgcaacaaactaaagcggctcatcgcgaagagaccgcccttacaaagcctgcaggagcggggtctgctccgagaccaggtgttcggctgccagttggaatcactctgccagcgggaaggagacacggtgcccagctttttgcggctctgcattgctgctgtggataaaagaggtctagatgtggatggcatttatcgggtgagcgggaacttggcagtggtccagaagcttcgctttctggtggacagagagcgtgcggtcacctccgatgggaggtatgtgttcccagaacagccaggacaagcactctccgaatcagagcagtgcctctctcagatacaagaattaataggctcaatgccaaagcccaaccatgacactctacggtacctcctggagcatttatgcagggtgatagcacactcagataagaatcgcatgacaccccacaacctgggaattgtgtttggaccaaccctgtttcggccagagcaggagacatctgacccagcagcccatgctctctacccagggcagctggtccagctgatgctcaccaacttcaccagcctcttcccctgatgcagggaaggaagaagagaaaacatatttccggtcatctctggtggtgagaggctggtgttctgttttgaggatatccctttaaatctcccaaatgactgtctctatcttcatgagtgtgacttgaggtgttgggatgggtgagggagcttctctaaagaggaaagtgagtggattaacccctgcttctcttcttgttccctgttatcattcctccccaacataataatacataaagtggcatggta

SEQ ID NO: 285935 - DNA, 1506 bp, Homo sapiens
ggctggaagcaacagatggggactgcagaggaggtggtggtattgggatagtgctgcagccaagaacttaacgactgaaagtaactgggatatcttcataattatctgaaggtcacagtgggagaacaaaattaaaagaactgagaagacttacaagagaacctcctaagagtcacccaaacaatcggctgagaatgagaagaggttcaagtgattcttgtgcctcaggctcccaagtagctgggactacagtagctgggccagcacacccagaaagcctcacattgtgcagtggagaagctgagagaagaggaaaagaggagtggccagactcccaccactacccaggaccaactcctgctcctgaatcttctgatgggccccacaaggtgacagtgctggctacaatgctatccagccggtggtggccaagttcctgggggatcctagggctgggcccccgaagccctcctcggggatcccagctctgtgccctctatgcctttacttatactggggcagatggccagcaggtgtctctggctgaaggggataggttcctactgcttcgaaagaccaactccgactggtggttggcaagacgcctagaagctccctccacctctcgacccatcttcgtcccagcagcctatatgatagaggaatccatcccttcccagagtccaactaccgtcatccccggccaattgctctggactcctgggccgaagttgtttcatggttccctggaggagttgtctcaggccctcccaagcagggctcaggctagctcggagcagcctcctccacttccccgcaaaatgtgtaggagcgtcagcactgacaatctgagccccagccttctgaagcctttccaggaaggaccaagcggaagatccctctcccaggaagacttgccgtcagaagccagtgccagcacagcaggcccccagcccctcatgtcagagccccctgtgtactgtaacctggtggaccttcgccgctgtcctcggtccccacccccaggccctgcatgccccctgctgcagaggctggatgcctgggagcagcacctggaccccaactctggacgctgcttctacataaattcactgactggctgcaagtcctggaagcccccgcgccgcagtcgcagcgagacgaaccctggctccatggaggggacacagaccctgaagaggaacaatgatgtcctgcaacctcaggcaaagggcttcagatctgacacagggaccccagaaccgcttgacccacagggttcactcagcctcagccaacgcacctcgcagcttgaccctccagccttgcaggcccctcgacctctgccgcagctcctggacgacccccatgtgaacctcccatttctttgtgaaggccaagatcctccctgccccccctccccccttttcctgctccacataaacatcttcctctttctgaatatcctcctacccagccctcccccagcaactttaagggacttca

SEQ ID NO: 285936 - DNA, 527 bp, Homo sapiens
ggtgactctgaggatcccaggctataccaccagatacaagaattaataggctcaatgccaaagcccaaccatgacactctacggtacctcctggagcatttatgcagggtgatagcacactcagataagaatcgcatgacaccccacaacctgggaattgtgtttggaccaaccctgtttcggccagagcaggagacatctgacccagcagcccatgctctctacccagggcagctggtccagctgatgctcaccaacttcaccagcctcttcccctgatgcagggaaggaagaagagaaaacatatttccggtcatctctggtggtgagaggctggtgttctgttttgaggatatccctttaaatctcccaaatgactgtctctatcttcatgagtgtgacttgaggtgttgggatgggtgagggagcttctctaaagaggaaagtgagtggattaacccctgcttctcttcttgttccctgttatcattcctccccaacataataatacataaagtggcatggta

SEQ ID NO: 285937 - DNA, 765 bp, Homo sapiens
cccctccctcaagcttctgctaaccatcttctcttgtttttctttgatcagcctacctcttgcccccgccatggcatcctcatcccactgcctgtcctcctagtcctaaggcttctaggtctcatgccattttccacatcctccctctgcccttcttgtcttccctgtgagttcccaagatgagggacccagttacaacaacacctctgatcacctgccacccaccctccccttttctgtttccagggccgaagttgtttcatggttccctggaggagttgtctcaggccctcccaagcagggctcaggctagctcggagcagcctcctccacttccccgcaaaatgtgtaggagcgtcagcactgacaatctgagccccagccttctgaagcctttccaggaaggaccaagcggaagatccctctcccaggaagacttgccgtcagaagccagtgccagcacagtgagtcacagctcttctgagctgggccctgttctaggcacaggacagacagcacctctgtcttcaggggactcccctggggatgacaaacacaaaaacaaataaataagataacgcttggtactactgataagtctaaaggcaagttaatgtggtggagagtggctgaggtggtgcggggagacatctgtgaggtcacggcattcagttgactctgagcaaggaggagaaagaggcagccgagaggcaaactgggtaggaggtgagaagggacagtaggtaccaaaggccctgaggggac

SEQ ID NO: 285938 - DNA, 439 bp, Homo sapiens
ttgtgggccagtggttgtactaagaatgtcttgcctgagaaccatgggcggtcctacatgaggaagctggcagaatagagaggccgtcaggctggtagtgtgtgtcttagctcctgatctctcctcattcatgttgcagagcgtgcggtcacctccgatgggaggtatgtgttcccagaacagccaggacaaggtacttacatggaagacccttcagatccctaaaacttccacatatcctctttgcttcccgtggaaacccccatgtactattcctgggagggttgtcctcatccccaccttagctaccttgccccactgcagaccctctaggcattcctatagtctgctttgactggatttctccagaacttctaatctctcagtctctaaatctttctggcccttcatgagcccctatacctccttctccctccag

SEQ ID NO: 285939 - DNA, 554 bp, Homo sapiens
tgctgagaagagctcctgtgagtgacgctggcactggcttcccgcctcactctacttccccagaccaggtgttcggctgccagttggaatcactctgccagcgggaaggagacacggtgcccagctttttgcggctctgcattgctgctgtggataaaagaggtcattttctcagagaccccaggatcctcttccaacaggctaaggcctagaattttctgcctcccccattctacctagtcttcctactgccctttttctctccacccttatatccctcaccacacacactttcaagcagcagtccttatctactccttcctcatctcccaggtctagatgtggatggcatttatcgggtgagcgggaacttggcagtggtccagaagcttcgctttctggtggacagaggtgagaaggcttgtgggccagtggttgtactaagaatgtcttgcctgagaaccatgggcggtcctacatgaggaagctggcagaatagagaggccgtcaggctggtagtgtgtgtcttagctcctgatctctcctcattcatg

SEQ ID NO: 285940 - DNA, 324 bp, Homo sapiens
ggtggaggcccggagggaggctccgaccggccgggaccaagggagtggggtaggaacgataggagtcaggagcagttgggggcagggtgggctcagtggagagcccttgcctgggccgggatgtgggaccccggcagtgggtcagagtccagctagggatacagatttctctcctctctcaccttcgacacggcccgccccgggtctaggatcgggagaaccccctggagctgcgtctgtcgggctctggacccgcggagctgagcgccggggaggacgaagaagaggagtcggagctggtgtccaagccgctgctgcgcctca

SEQ ID NO: 285941 - DNA, 127 bp, Homo sapiens
cagttgtgcctgcccctcactgccctctccgcacacagattccctgtccaccaggccagggatgtgggcgggggctggggagcggccagagtcggaatgaaagggcctttttcttccacagctggga

SEQ ID NO: 285942 - DNA, 129 bp, Homo sapiens
cagacttggtatagtgggagagcctgactgaggtggctctagccagtctaattgccgttcctttagctagtggcatcttgattcctgctgtgtcttaactgaccattgtcttaaattctagagtggatc

SEQ ID NO: 285943 - DNA, 346 bp, Homo sapiens
gattggaggcctttgtttgccgctcaactccaggaaaccacccgcgctcggcggccgccagcagtcctggaaggtgggaatgatctggagaccaggagtaagaagacctgagtttagatccccagcctggattcagttctgagtgcctcagttttcccttccacaaaatgaggaggggcaactgaagacggaggtgcccaaggtcagaaggaagcaccacacagagggcacaggcaggatggccgatgctgacaggaaccagcggtgactctggggcccctggcagcagctctgtctcctgaagatgaagtggcccaggtgaagcccaggccagccccaatggcca

SEQ ID NO: 285944 - DNA, 577 bp, Homo sapiens
gattggaggcctttgtttgccgctcaactccaggaaaccacccgcgctcggcggccgccagcaggtgagactcggggaggggctcgcggggcgtccggggtggtccctgtccctcgttgggactcagtttctccgtcgggagaatggggagggagagtggacagcgccagtgggctccgttccactgggacggcgctgctttcggtcttttccacgtggaaaccccacgcgcacggggaaggagacgcatcaccgctccgggaatgggagggagccctggacgggcggtatgggccccagtccaaaccgtgccggccgcggggttcctcagtctccaccctccggcctcagtctccacctctgcacaatgggggcgttggctttttctctttccagctggggctggtggcagggaggggaggggtcccgggggagctcgggggtgggccttggcggggcctcgggctgtgtttgggctggaggcgtggcccgggttgctgtggttactggggaggtgaggctttctgtctgggatttgtgtgagattcgttcacccagcaacaatccgcgcagcctg

SEQ ID NO: 285945 - DNA, 654 bp, Homo sapiens
ctttggtctcggtgcccagggcccaggccgtgtggttgggaagactggaccctgagcagcttcttgggccctggtacgtgcttgcggtggcctcccgggaaaagggctttgccatggagaaggacatgaagaacgtcgtgggggtggtggtgaccctcactccagaaaacaacctgcggacgctgtcctctcagcacgggctgggagggtgtgaccagagtgtcatggacctgataaagcgaaactccggatgggtgtttgagaatccctcaataggcgtgctggagctctgggtgctggccaccaacttcagagactatgccatcatcttcactcagctggagttcggggacgagcccttcaacaccgtggagctgtacagtctgacggagacagccagccaggaggccatggggctcttcaccaagtggagcaggagcctgggcttcctgtcacagtagcaggcccagctgcagaaggacctcacctgtgctcacaagatccttctggctggcggctccagagaggtttaaacactggccttggcggctgagggaggagggtgaagatgaggcaggggctgctggtgctggcgctggtgctggtgctggtgctagtgctggctgcagggtcccaggtgcaggagtggtaccc

SEQ ID NO: 285946 - DNA, 385 bp, Homo sapiens
ggcggggggttttgtttcctagcaataggcgtgctggagctctgggtgctggccaccaacttcagagactatgccatcatcttcactcagctggagttcggggacgagcccttcaacaccgtggagctgtacagtctgacggagacagccagccaggaggccatggggctcttcaccaagtggagcaggagcctgggcttcctgtcacagtagcaggcccagctgcagaaggacctcacctgtgctcacaagatccttctgtgagtgctgcgtccccagtagggatggcgcccacagggtcctgtgacctcggccagtgtccacccacctcgctcagcggctcccggggcccagcaccagctcagaataaagcgattccacagca

SEQ ID NO: 285947 - DNA, 1013 bp, Homo sapiens
ctctggcctcactgctggctggcctggcctggactcctgagctccgtctcctctcaccgggccccggggtcttgaccctgagtgggtgacaggccccttcttttccaggctgggagggtgtgaccagagtgtcatggacctgataaagcgaaactccggatgggtgtttgagaatccctcaataggcgtgctggagctctgggtgctggccaccaacttcagagactatgccatcatcttcactcagctggagttcggggacgagcccttcaacaccgtggagctgtacagtctgacggagacagccagccaggaggccatggggctcttcaccaagtggagcaggagcctgggcttcctgtcacagtagcaggcccagctgcagaaggaccgtgagtgtccaccggagcagcctcgggggaggcttggggcaagttctggagcccacagggcgtgatggggtgacagagaccctggggttgattctggcttctgcctgactcagtcgccctgaaggagtcaggcaggctgagggggtcttcacctgcccctgcccaaagtcaggcctgggggtcttgtccccacggcaggcgagtcttgtgggtggggccctggggtgctggggggctcagtcctttttcacagccagtcttgcctccccttctagtcacctgtgctcacaagatccttctggtaagccgccatcctgagcctcaccctgggctctcttgggggaagggggtgggggaggccaccctacgcacagtgggtgggaggaccctctgcccaagcccacggggttcatggctccactgtctctaaggcagctgagggtgtggaggagcctccatggtgggctgggccccctcacactcctcttggttttcagtgagtgctgcgtccccagtagggatggcgcccacagggtcctgtgacctcggccagtgtccacccacctcgctcagcggctcccggggcccagcaccagctcagaataaagcgattccacagca

SEQ ID NO: 285948 - DNA, 275 bp, Homo sapiens
ctttggtctcggtgcccagggcccaggccgtgtggttgggaagactggaccctgagcagcttcttgggccctggtacgtgcttgcggtggcctcccgggaaaagggctttgccatggagaaggacatgaagaacgtcgtgggggtggtggtgaccctcactccagaaaacaacctgcggacgctgtcctctcagcacgggtgagtgggcgggtcctgccaggccttcccgcaggcaggactgtggctcagccacatcatgtactttgcacatctg

SEQ ID NO: 285949 - DNA, 908 bp, Homo sapiens
ggagacactcactggggcaatctgaggtaatccaacagactgtggcggagggaccggaagcgccaggcagggacccggggtagatgctaaatccaaactgaaacgtacagggctggatgattgaagcaccagcgggaactagtcggacctccgagctctttaaactgtcctcagctcggctggttctccacgagctccgggcagacggcggggggtgggtcggcgtttaagtcaaaggccttggggctccgagtcccttcctctccccgtcctgtgaaggcacgacccagttcagctgtctgtaaagtggagccattagtccctgcctcgtagtgggaaaactgggaggcggaacgaggaggccgccggtcccaacccggcccaggagcatctttctccgcagaccgtttcctggcgagatcctgcgcagccgaggctgtgttagcgccaaggacttccagcagctgttagcagagtggcctcaggaggatgggaggccccacctggtaacaaccctgtgccaccccagcttgagcaggaggtggagcggcggcagcggctggggcaggagtcagcagctaggaaagccctcatcgcgagttcctaccacccggcacggcctgaggtctacgactcactgcaggatgcagctctggcccccgagttcctggccgtgactgagtacagcgtgtccccagacgcagacctcaagggccttctccagcggctggagacagtatcggggcccagcaagaaagaacagccccttctggccttcctgctgggggacagaggctcccagagccacttctgagttggggtacagacttcggtggctcatcagatgaaaggaggtgcagagagagcctgaagttggctctgtgatcccgacttggctgtcactggcc

SEQ ID NO: 285950 - DNA, 424 bp, Homo sapiens
gtaccgggcccccccttggagggaacgggccttatagggcggatcccttgcccaagcttttacagcaggagcagatgtgatcccagccacagcttccaggcccctgggctcctcacaccttaccatataccccgcaggctgctgccagggctgctgccccgctccctcctcctccttcccctggagtcagtggtgggaagcttcccaggagagtcctcagcaacctctggaacacaggacttggccatgactgtctcctgtccctgtgtgggcccagatggttgaggtacatctaggggttctcatcccagctaggctcaggttggggcagcctgaaacaggatgggtccccttctagaagtccctttcagctaacagtctggaacttgcagttgacccagatagattcaggagtgtaggctag

SEQ ID NO: 285951 - DNA, 1821 bp, Homo sapiens
tcaggctagtaccgatctcgggaatataggattctacggcaagctgcgtagcggctgtgggtgcttcactatggcgacggtgggggctccgcggcacttctgccgctgcgcctgcttctgcaccgataacttgtacgtggcgcgctatgggctgcacgtgcgcttccgaggcgagcagcagctgcgccgggactacggcccgatcctgcgcagccgaggctgtgttagcgccaaggacttccagcagctgttagcagagcttgagcaggaggtggagcggcggcagcggctggggcaggagtcagcagctaggaaagccctcatcgcgagttcctaccacccggcacggcctgaggtctacgactcactgcaggatgcagctctggcccccgagttcctggccgtgactgagtacagcgtgtccccagacgcagacctcaagggccttctccagcggctggagacagtatcggaggagaagcgcatctaccgggtgcctgttttcacagcgcccttctgccaggccctgctggaagagctggagcacttcgagcaatcggacatgcctaaggggaggcccaacaccatgaacaactacggggtgctgctgcacgagctcgggctggacgagccgctgatgacaccactgcgggagcgcttcctgcagccgctgatggccctgctgtaccctgactgtggcgggggccggctcgacagccaccgggcctttgtggtcaaatacgcaccgggccaggacctggagctgggctgccactatgataatgccgagctcaccctcaatgtggccttgggcaaggtcttcacagggggcgccctgtattttgggggcctcttccaggcacccacagccctgacggagcccctggaggtggagcacgtggtgggccagggtgtcctccaccgtggcggccagctgcatggagcccggcccttgggcactggtgagcgttggaaccttgtcgtctggctccgagcctctgctgtgcgcaacagcctctgtcccatgtgctgccgtgagcccgacctggtggacgatgagggcttcggtgatggcttcacccgagaggagcccgccacggtggatgtatgtgcgctcacctgagcttgcttgggcccagtgtgggggtggcaggcaggtgagggctccgttgccttggtctgggggcagaaataaaatccccgcagcctactgcacttcttggctcaacggtgtgccagcttctgggtcattctatgggcaaagatgctgccttagttcaggtttgtcagaagcagggtctggaatggggcttcagcgagggagtcagggaagcaggggaggggagggagcagctgggcaaggaagtggcttcagaggacgtccagcctcagctggccccacggagagctccaggcagagcccacagtaccacagtgtgcccacaccaccggttactggctcctggatgagggggccagagaggagtgaataacttcccagacacttatctccagggcagggtgccttccagtagccaagggaagcctccagagagcacagatgtgaaccctcagcagcaggcatcaccccccagtggactcgggtgggccaccagtagcatcttctagatggcagaggggtgaatggcagggccaggaaccaggctgcccgggttcccattctgcttctgccacttccagctgtgtggctttaggtgagccttcaccttttggtgccttcgtttcctcatttagcacctacctcctagagctgttttgggagtcaaatgcgctgacgtatataaagtgctttgcaagatc

SEQ ID NO: 285952 - DNA, 2001 bp, Homo sapiens
aaggctaggtagaggcctgggtggtgaattcgccgagccggggtagatgctaaatccaaactgaaacgtacagggctggatgattgaagcaccagcgggaactagtcggacctccgagctctttaaactgtcctcagctcggctggttctccacgagctccgggcagacggcggggggtgggtcggcgtttaagtcaaaggccttggggctccgagtcccttcctctccccgtcctgtgaaggcacgacccagttcagctgtctgtaaagtggagccattagtccctgcctcgtagtgggaaaactgggaggcggaacgaggaggccgccggtcccaacccggcccaggagcatctttctccgcagaccgtttcctggcgagatcctgcgcagccgaggctgtgttagcgccaaggacttccagcagctgttagcagagcttgagcaggaggtggagcggcggcagcggctggggcaggagtcagcagctaggaaagccctcatcgcgagttcctaccacccggcacggcctgaggtctacgactcactgcaggatgcagctctggcccccgagttcctggccgtgactgagtacagcgtgtccccagacgcagacctcaagggccttctccagcggctggagacagtatcggaggagaagcgcatctaccgggtgcctgttttcacagcgcccttctgccaggccctgctggaagagctggagcacttcgagcaatcggacatgcctaaggggaggcccaacaccatgaacaactacggggtgctgctgcacgagctcgggctggacgagccgctgatgacaccactgcgggagcgcttcctgcagccgctgatggccctgctgtaccctgactgtggcgggggccggctcgacagccaccgggcctttgtggtcaaatacgcaccgggccaggacctggagctgggctgccactatgataatgccgagctcaccctcaatgtggccttgggcaaggtcttcacagggggcgccctgtattttgggggcctcttccaggcacccacagccctgacggagcccctggaggtggagcacgtggtgggccagggtgtcctccaccgtggcggccagctgcatggagcccggcccttgggcactggtgagcgttggaaccttgtcgtctggctccgagcctctgctgtgcgcaacagcctctgtcccatgtgctgccgtgagcccgacctggtggacgatgagggcttcggtgatggcttcacccgagaggagcccgccacggtggatgtatgtgcgctcacctgagcttgcttgggcccagtgtgggggtggcaggcaggtgagggctccgttgccttggtctgggggcagaaataaaatccccgcagcctactgcacttcttggctcaacggtgtgccagcttctgggtcattctatgggcaaagatgctgccttagttcaggtttgtcagaagcagggtctggaatggggcttcagcgagggagtcagggaagcaggggaggggagggagcagctgggcaaggaagtggcttcagaggacgtccagcctcagctggccccacggagagctccaggcagagcccacagtaccacagtgtgcccacaccaccggttactggctcctggatgagggggccagagaggagtgaataacttcccagacacttatctccagggcagggtgccttccagtagccaagggaagcctccagagagcacagatgtgaaccctcagcagcaggcatcaccccccagtggactcgggtgggccaccagtagcatcttctagatggcagaggggtgaatggcagggccaggaaccaggctgcccgggttcccattctgcttctgccacttccagctgtgtggctttaggtgagccttcaccttttggtgccttcgtttcctcatttagcacctacctcctagagctgttttgggagtcaaatgcgctgacgtatataaagtgctttgcaagatc

SEQ ID NO: 285953 - DNA, 2002 bp, Homo sapiens
ggagacactcactggggcaatctgaggtaatccaacagactgtggcggagggaccggaagcgccaggcagggacccggggtagatgctaaatccaaactgaaacgtacagggctggatgattgaagcaccagcgggaactagtcggacctccgagctctttaaactgtcctcagctcggctggttctccacgagctccgggcagacggcggggggtgggtcggcgtttaagtcaaaggccttggggctccgagtcccttcctctccccgtcctgtgaaggcacgacccagttcagctgtctgtaaagtggagccattagtccctgcctcgtagtgggaaaactgggaggcggaacgaggaggccgccggtcccaacccggcccaggagcatctttctccgcagaccgtttcctggcgagatcctgcgcagccgaggctgtgttagcgccaaggacttccagcagctgttagcagagcttgagcaggaggtggagcggcggcagcggctggggcaggagtcagcagctaggaaagccctcatcgcgagttcctaccacccggcacggcctgaggtctacgactcactgcaggatgcagctctggcccccgagttcctggccgtgactgagtacagcgtgtccccagacgcagacctcaagggccttctccagcggctggagacagtatcggcgcccttctgccaggccctgctggaagagctggagcacttcgagcaatcggacatgcctaaggggaggcccaacaccatgaacaactacggggtgctgctgcacgagctcgggctggacgagccgctgatgacaccactgcgggagcgcttcctgcagccgctgatggccctgctgtaccctgactgtggcgggggccggctcgacagccaccgggcctttgtggtcaaatacgcaccgggccaggacctggagctgggctgccactatgataatgccgagctcaccctcaatgtggccttgggcaaggtcttcacagggggcgccctgtattttgggggcctcttccaggcacccacagccctgacggagcccctggaggtggagcacgtggtgggccagggtgtcctccaccgtggcggccagctgcatggagcccggcccttgggcactggtgagcgttggaaccttgtcgtctggctccgagcctctgctgtgcgcaacagcctctgtcccatgtgctgccgtgagcccgacctggtggacgatgagggcttcggtgatggcttcacccgagaggagcccgccacggtggatgtatgtgcgctcacctgagcttgcttgggcccagtgtgggggtggcaggcaggtgagggctccgttgccttggtctgggggcagaaataaaatccccgcagcctactgcacttcttggctcaacggtgtgccagcttctgggtcattctatgggcaaagatgctgccttagttcaggtttgtcagaagcagggtctggaatggggcttcagcgagggagtcagggaagcaggggaggggagggagcagctgggcaaggaagtggcttcagaggacgtccagcctcagctggccccacggagagctccaggcagagcccacagtaccacagtgtgcccacaccaccggttactggctcctggatgagggggccagagaggagtgaataacttcccagacacttatctccagggcagggtgccttccagtagccaagggaagcctccagagagcacagatgtgaaccctcagcagcaggcatcaccccccagtggactcgggtgggccaccagtagcatcttctagatggcagaggggtgaatggcagggccaggaaccaggctgcccgggttcccattctgcttctgccacttccagctgtgtggctttaggtgagccttcaccttttggtgccttcgtttcctcatttagcacctacctcctagagctgttttgggagtcaaatgcgctgacgtatataaagtgctttgcaagatc

SEQ ID NO: 285954 - DNA, 2353 bp, Homo sapiens
ggagacactcactggggcaatctgaggtaatccaacagactgtggcggagggaccggaagcgccaggcagggacccggggtagatgctaaatccaaactgaaacgtacagggctggatgattgaagcaccagcgggaactagtcggacctccgagctctttaaactgtcctcagctcggctggttctccacgagctccgggcagacggcggggggtgggtcggcgtttaagtcaaaggccttggggctccgagtcccttcctctccccgtcctgtgaaggcacgacccagttcagctgtctgtaaagtggagccattagtccctgcctcgtagtgggaaaactgggaggcggaacgaggaggccgccggtcccaacccggcccaggagcatctttctccgcagaccgtttcctggcgagatcctgcgcagccgaggctgtgttagcgccaaggacttccagcagctgttagcagagcttgagcaggaggtggagcggcggcagcggctggggcaggagtcagcagctaggaaagccctcatcgcgagttcctaccacccggcacggcctgaggtctacgactcactgcaggatgcagctctggcccccgagttcctggccgtgactgagtacagcgtgtccccagacgcagacctcaagggccttctccagcggctggagacagtatcgggggtgaggtcctggccctgagacctggcaggaccagggaatggcagcctgggaaacctgggtgtgggatgctggggtccctccagccaccatctctgcctccaaaaaccaaaccagcaggagctggaagggtcagtgggaccaacctgccaggagcaggacatccgcattcattcattcaatacctgccatgagcctgccctgaaaagcaaaggcctcatctccatggcacaggtgatgaaacaggaagactgaagcccaggcctggccggcccacggccacattcaggccaacagaccatccctccttccacagaggagaagcgcatctaccgggtgcctgttttcacagcgcccttctgccaggccctgctggaagagctggagcacttcgagcaatcggacatgcctaaggggaggcccaacaccatgaacaactacggggtgctgctgcacgagctcgggctggacgagccgctgatgacaccactgcgggagcgcttcctgcagccgctgatggccctgctgtaccctgactgtggcgggggccggctcgacagccaccgggcctttgtggtcaaatacgcaccgggccaggacctggagctgggctgccactatgataatgccgagctcaccctcaatgtggccttgggcaaggtcttcacagggggcgccctgtattttgggggcctcttccaggcacccacagccctgacggagcccctggaggtggagcacgtggtgggccagggtgtcctccaccgtggcggccagctgcatggagcccggcccttgggcactggtgagcgttggaaccttgtcgtctggctccgagcctctgctgtgcgcaacagcctctgtcccatgtgctgccgtgagcccgacctggtggacgatgagggcttcggtgatggcttcacccgagaggagcccgccacggtggatgtatgtgcgctcacctgagcttgcttgggcccagtgtgggggtggcaggcaggtgagggctccgttgccttggtctgggggcagaaataaaatccccgcagcctactgcacttcttggctcaacggtgtgccagcttctgggtcattctatgggcaaagatgctgccttagttcaggtttgtcagaagcagggtctggaatggggcttcagcgagggagtcagggaagcaggggaggggagggagcagctgggcaaggaagtggcttcagaggacgtccagcctcagctggccccacggagagctccaggcagagcccacagtaccacagtgtgcccacaccaccggttactggctcctggatgagggggccagagaggagtgaataacttcccagacacttatctccagggcagggtgccttccagtagccaagggaagcctccagagagcacagatgtgaaccctcagcagcaggcatcaccccccagtggactcgggtgggccaccagtagcatcttctagatggcagaggggtgaatggcagggccaggaaccaggctgcccgggttcccattctgcttctgccacttccagctgtgtggctttaggtgagccttcaccttttggtgccttcgtttcctcatttagcacctacctcctagagctgttttgggagtcaaatgcgctgacgtatataaagtgctttgcaagatc

SEQ ID NO: 285955 - DNA, 2120 bp, Homo sapiens
ggagacactcactggggcaatctgaggtaatccaacagactgtggcggagggaccggaagcgccaggcagggacccggggtagatgctaaatccaaactgaaacgtacagggctggatgattgaagcaccagcgggaactagtcggacctccgagctctttaaactgtcctcagctcggctggttctccacgagctccgggcagacggcggggggtgggtcggcgtttaagtcaaaggccttggggctccgagtcccttcctctccccgtcctgtgaaggcacgacccagttcagctgtctgtaaagtggagccattagtccctgcctcgtagtgggaaaactgggaggcggaacgaggaggccgccggtcccaacccggcccaggagcatctttctccgcagaccgtttcctggcgagatcctgcgcagccgaggctgtgttagcgccaaggacttccagcagctgttagcagagcttgagcaggaggtggagcggcggcagcggctggggcaggagtcagcagctaggaaagccctcatcgcgagttcctaccacccggcacggcctgaggtctacgactcactgcaggatgcagctctggcccccgagttcctggccgtgactgagtacagcgtgtccccagacgcagacctcaagggccttctccagcggctggagacagtatcgggtgatgaaacaggaagactgaagcccaggcctggccggcccacggccacattcaggccaacagaccatccctccttccacagaggagaagcgcatctaccgggtgcctgttttcacagcgcccttctgccaggccctgctggaagagctggagcacttcgagcaatcggacatgcctaaggggaggcccaacaccatgaacaactacggggtgctgctgcacgagctcgggctggacgagccgctgatgacaccactgcgggagcgcttcctgcagccgctgatggccctgctgtaccctgactgtggcgggggccggctcgacagccaccgggcctttgtggtcaaatacgcaccgggccaggacctggagctgggctgccactatgataatgccgagctcaccctcaatgtggccttgggcaaggtcttcacagggggcgccctgtattttgggggcctcttccaggcacccacagccctgacggagcccctggaggtggagcacgtggtgggccagggtgtcctccaccgtggcggccagctgcatggagcccggcccttgggcactggtgagcgttggaaccttgtcgtctggctccgagcctctgctgtgcgcaacagcctctgtcccatgtgctgccgtgagcccgacctggtggacgatgagggcttcggtgatggcttcacccgagaggagcccgccacggtggatgtatgtgcgctcacctgagcttgcttgggcccagtgtgggggtggcaggcaggtgagggctccgttgccttggtctgggggcagaaataaaatccccgcagcctactgcacttcttggctcaacggtgtgccagcttctgggtcattctatgggcaaagatgctgccttagttcaggtttgtcagaagcagggtctggaatggggcttcagcgagggagtcagggaagcaggggaggggagggagcagctgggcaaggaagtggcttcagaggacgtccagcctcagctggccccacggagagctccaggcagagcccacagtaccacagtgtgcccacaccaccggttactggctcctggatgagggggccagagaggagtgaataacttcccagacacttatctccagggcagggtgccttccagtagccaagggaagcctccagagagcacagatgtgaaccctcagcagcaggcatcaccccccagtggactcgggtgggccaccagtagcatcttctagatggcagaggggtgaatggcagggccaggaaccaggctgcccgggttcccattctgcttctgccacttccagctgtgtggctttaggtgagccttcaccttttggtgccttcgtttcctcatttagcacctacctcctagagctgttttgggagtcaaatgcgctgacgtatataaagtgctttgcaagatc

SEQ ID NO: 285956 - DNA, 1571 bp, Homo sapiens
cctgtggacacttgtagagtctggggaaaggttccgggcataagtggggggcatgggaatcggcctcccctgctcctcatgttacttccttaagtcatcacaatagccctgaaaagcaaaggcctcatctccatggcacaggtgatgaaacaggaagactgaagcccaggcctggccggcccacggccacattcaggccaacagaccatccctccttccacagaggagaagcgcatctaccgggtgcctgttttcacagcgcccttctgccaggccctgctggaagagctggagcacttcgagcaatcggacatgcctaaggggaggcccaacaccatgaacaactacggggtgctgctgcacgagctcgggctggacgagccgctgatgacaccactgcgggagcgcttcctgcagccgctgatggccctgctgtaccctgactgtggcgggggccggctcgacagccaccgggcctttgtggtcaaatacgcaccgggccaggacctggagctgggctgccactatgataatgccgagctcaccctcaatgtggccttgggcaaggtcttcacagggggcgccctgtattttgggggcctcttccaggcacccacagccctgacggagcccctggaggtggagcacgtggtgggccagggtgtcctccaccgtggcggccagctgcatggagcccggcccttgggcactggtgagcgttggaaccttgtcgtctggctccgagcctctgctgtgcgcaacagcctctgtcccatgtgctgccgtgagcccgacctggtggacgatgagggcttcggtgatggcttcacccgagaggagcccgccacggtggatgtatgtgcgctcacctgagcttgcttgggcccagtgtgggggtggcaggcaggtgagggctccgttgccttggtctgggggcagaaataaaatccccgcagcctactgcacttcttggctcaacggtgtgccagcttctgggtcattctatgggcaaagatgctgccttagttcaggtttgtcagaagcagggtctggaatggggcttcagcgagggagtcagggaagcaggggaggggagggagcagctgggcaaggaagtggcttcagaggacgtccagcctcagctggccccacggagagctccaggcagagcccacagtaccacagtgtgcccacaccaccggttactggctcctggatgagggggccagagaggagtgaataacttcccagacacttatctccagggcagggtgccttccagtagccaagggaagcctccagagagcacagatgtgaaccctcagcagcaggcatcaccccccagtggactcgggtgggccaccagtagcatcttctagatggcagaggggtgaatggcagggccaggaaccaggctgcccgggttcccattctgcttctgccacttccagctgtgtggctttaggtgagccttcaccttttggtgccttcgtttcctcatttagcacctacctcctagagctgttttgggagtcaaatgcgctgacgtatataaagtgctttgcaagatc

SEQ ID NO: 285957 - DNA, 2136 bp, Homo sapiens
tcaggctagtaccgatctcgggaatataggattctacggcaagctgcgtagcggctgtgggtgcttcactatggcgacggtgggggctccgcggcacttctgccgctgcgcctgcttctgcaccgataacttgtacgtggcgcgctatgggctgcacgtgcgcttccgaggcgagcagcagctgcgccgggactacggcccgatcctgcgcagccgaggctgtgttagcgccaaggacttccagcagctgttagcagagcttgagcaggaggtggagcggcggcagcggctggggcaggagtcagcagctaggaaagccctcatcgcgagttcctaccacccggcacggcctgaggtctacgactcactgcaggatgcagctctggcccccgagttcctggccgtgactgagtacagcgtgtccccagacgcagacctcaagggccttctccagcggctggagacagtatcgggggtgaggtcctggccctgagacctggcaggaccagggaatggcagcctgggaaacctgggtgtgggatgctggggtccctccagccaccatctctgcctccaaaaaccaaaccagcaggagctggaagggtcagtgggaccaacctgccaggagcaggacatccgcattcattcattcaatacctgccatgagcctgccctgaaaagcaaaggcctcatctccatggcacaggtgatgaaacaggaagactgaagcccaggcctggccggcccacggccacattcaggccaacagaccatccctccttccacagaggagaagcgcatctaccgggtgcctgttttcacagcgcccttctgccaggccctgctggaagagctggagcacttcgagcaatcggacatgcctaaggggaggcccaacaccatgaacaactacggggtgctgctgcacgagctcgggctggacgagccgctgatgacaccactgcgggagcgcttcctgcagccgctgatggccctgctgtaccctgactgtggcgggggccggctcgacagccaccgggcctttgtggtcaaatacgcaccgggccaggacctggagctgggctgccactatgataatgccgagctcaccctcaatgtggccttgggcaaggtcttcacagggggcgccctgtattttgggggcctcttccaggcacccacagccctgacggagcccctggaggtggagcacgtggtgggccagggtgtcctccaccgtggcggccagctgcatggagcccggcccttgggcactggtgagcgttggaaccttgtcgtctggctccgagcctctgctgtgcgcaacagcctctgtcccatgtgctgccgtgagcccgacctggtggacgatgagggcttcggtgatggcttcacccgagaggagcccgccacggtggatgtatgtgcgctcacctgagcttgcttgggcccagtgtgggggtggcaggcaggtgagggctccgttgccttggtctgggggcagaaataaaatccccgcagcctactgcacttcttggctcaacggtgtgccagcttctgggtcattctatgggcaaagatgctgccttagttcaggtttgtcagaagcagggtctggaatggggcttcagcgagggagtcagggaagcaggggaggggagggagcagctgggcaaggaagtggcttcagaggacgtccagcctcagctggccccacggagagctccaggcagagcccacagtaccacagtgtgcccacaccaccggttactggctcctggatgagggggccagagaggagtgaataacttcccagacacttatctccagggcagggtgccttccagtagccaagggaagcctccagagagcacagatgtgaaccctcagcagcaggcatcaccccccagtggactcgggtgggccaccagtagcatcttctagatggcagaggggtgaatggcagggccaggaaccaggctgcccgggttcccattctgcttctgccacttccagctgtgtggctttaggtgagccttcaccttttggtgccttcgtttcctcatttagcacctacctcctagagctgttttgggagtcaaatgcgctgacgtatataaagtgctttgcaagatc

SEQ ID NO: 285958 - DNA, 2061 bp, Homo sapiens
aaggctaggtagaggcctgggtggtgaattcgccgagccggggtagatgctaaatccaaactgaaacgtacagggctggatgattgaagcaccagcgggaactagtcggacctccgagctctttaaactgtcctcagctcggctggttctccacgagctccgggcagacggcggggggtgggtcggcgtttaagtcaaaggccttggggctccgagtcccttcctctccccgtcctgtgaaggcacgacccagttcagctgtctgtaaagtggagccattagtccctgcctcgtagtgggaaaactgggaggcggaacgaggaggccgccggtcccaacccggcccaggagcatctttctccgcagaccgtttcctggcgagcttgagcaggaggtggagcggcggcagcggctggggcaggagtcagcagctaggaaagccctcatcgcgagttcctaccacccggcacggcctgaggtctacgactcactgcaggatgcagctctggcccccgagttcctggccgtgactgagtacagcgtgtccccagacgcagacctcaagggccttctccagcggctggagacagtatcggccctgaaaagcaaaggcctcatctccatggcacaggtgatgaaacaggaagactgaagcccaggcctggccggcccacggccacattcaggccaacagaccatccctccttccacagaggagaagcgcatctaccgggtgcctgttttcacagcgcccttctgccaggccctgctggaagagctggagcacttcgagcaatcggacatgcctaaggggaggcccaacaccatgaacaactacggggtgctgctgcacgagctcgggctggacgagccgctgatgacaccactgcgggagcgcttcctgcagccgctgatggccctgctgtaccctgactgtggcgggggccggctcgacagccaccgggcctttgtggtcaaatacgcaccgggccaggacctggagctgggctgccactatgataatgccgagctcaccctcaatgtggccttgggcaaggtcttcacagggggcgccctgtattttgggggcctcttccaggcacccacagccctgacggagcccctggaggtggagcacgtggtgggccagggtgtcctccaccgtggcggccagctgcatggagcccggcccttgggcactggtgagcgttggaaccttgtcgtctggctccgagcctctgctgtgcgcaacagcctctgtcccatgtgctgccgtgagcccgacctggtggacgatgagggcttcggtgatggcttcacccgagaggagcccgccacggtggatgtatgtgcgctcacctgagcttgcttgggcccagtgtgggggtggcaggcaggtgagggctccgttgccttggtctgggggcagaaataaaatccccgcagcctactgcacttcttggctcaacggtgtgccagcttctgggtcattctatgggcaaagatgctgccttagttcaggtttgtcagaagcagggtctggaatggggcttcagcgagggagtcagggaagcaggggaggggagggagcagctgggcaaggaagtggcttcagaggacgtccagcctcagctggccccacggagagctccaggcagagcccacagtaccacagtgtgcccacaccaccggttactggctcctggatgagggggccagagaggagtgaataacttcccagacacttatctccagggcagggtgccttccagtagccaagggaagcctccagagagcacagatgtgaaccctcagcagcaggcatcaccccccagtggactcgggtgggccaccagtagcatcttctagatggcagaggggtgaatggcagggccaggaaccaggctgcccgggttcccattctgcttctgccacttccagctgtgtggctttaggtgagccttcaccttttggtgccttcgtttcctcatttagcacctacctcctagagctgttttgggagtcaaatgcgctgacgtatataaagtgctttgcaagatc

SEQ ID NO: 285959 - DNA, 1230 bp, Homo sapiens
tcaggctagtaccgatctcgggaatataggattctacggcaagctgcgtagcggctgtgggtgcttcactatggcgacggtgggggctccgcggcacttctgccgctgcgcctgcttctgcaccgataacttgtacgtggcgcgctatgggctgcacgtgcgcttccgaggcgagcagcagctgcgccgggactacggcccgatcctgcgcagccgaggctgtgttagcgccaaggacttccagcagctgttagcagagcttgagcaggaggtggagcggcggcagcggctggggcaggagtcagcagctaggaaagccctcatcgcgagttcctaccacccggcacggcctgaggtctacgactcactgcaggatgcagctctggcccccgagttcctggccgtgactgagtacagcgtgtccccagacgcagacctcaagggccttctccagcggctggagacagtatcgggggtgaggtcctggccctgagacctggcaggaccagggaatggcagcctgggaaacctgggtgtgggatgctggggtccctccagccaccatctctgcctccaaaaaccaaaccagcaggagctggaagggtcagtgggaccaacctgccaggagcaggacatccgcattcattcattcaatacctgccatgagcctggtatcttcattctttccttcacccttccttcgtgccctcatccagcaaatagtggatatttgtgtcatgtgtgggacagctggcacactcaaacagggctgatccaagatcttaaagggaccattgagacaggtatgggcaggataaagggaccagtaaggaatggcaaagcccggccccccagggctggcaacaggagggagcagttaccacctggagttgtggctctgggcggagcctgcggccatgccaaactccaagtagggcaaaaaatgccccacttctcttcggatttcttgctgggctcacttattggctaaacccagcaggaaatgctgggcaagggaggtttgcgtgttgtttaacctctgattcagtttcctcatctgtaaaatgggagcaacagtaaccccctctcttaaggcactgcgacgatcaagtgagttaatctgcatagagtgcctgtcacagggcccgcacgtagtgtttggaaagtgtttcctattcttattggcactgatagcctgggctaggggctcctgtgggaggcagatacaag

SEQ ID NO: 285960 - DNA, 855 bp, Homo sapiens
ggagacactcactggggcaatctgaggtaatccaacagactgtggcggagggaccggaagcgccaggcagggacccggggtagatgctaaatccaaactgaaacgtacagggctggatgattgaagcaccagcgggaactagtcggacctccgagctctttaaactgtcctcagctcggctggttctccacgagctccgggcagacggcggggggtgggtcggcgtttaagtcaaaggccttggggctccgagtcccttcctctccccgtcctgtgaaggcacgacccagttcagctgtctgtaaagtggagccattagtccctgcctcgtagtgggaaaactgggaggcggaacgaggaggccgccggtcccaacccggcccaggagcatctttctccgcagaccgtttcctggcgagatcctgcgcagccgaggctgtgttagcgccaaggacttccagcagctgttagcagagcttgagcaggaggtggagcggcggcagcggctggggcaggagtcagcagctaggaaagccctcatcgcgagttcctaccacccggcacggcctgaggtctacgactcactgcaggatgcagctctggcccccgagttcctggccgtgactgagtacagcgtgtccccagacgcagacctcaagggccttctccagcggctggagacagtatcggggcccagcaagaaagaacagccccttctggccttcctgctgggggacagaggctcccagagccacttctgagttggggtacagacttcggtggctcatcagatgaaaggaggtgcagagagagcctgaagttggctctgtgatcccgacttggctgtcactggcc

SEQ ID NO: 285961 - DNA, 2150 bp, Homo sapiens
aaggctaggtagaggcctgggtggtgaattcgccgagccggggtagatgctaaatccaaactgaaacgtacagggctggatgattgaagcaccagcgggaactagtcggacctccgagctctttaaactgtcctcagctcggctggttctccacgagctccgggcagacggcggggggtgggtcggcgtttaagtcaaaggccttggggctccgagtcccttcctctccccgtcctgtgaaggcacgacccagttcagctgtctgtaaagtggagccattagtccctgcctcgtagtgggaaaactgggaggcggaacgaggaggccgccggtcccaacccggcccaggagcatctttctccgcagaccgtttcctggcgagatcctgcgcagccgaggctgtgttagcgccaaggacttccagcagctgttagcagaggctgctgccagggctgctgccccgctccctcctcctccttcccctggagtcagtggtgggaagcttcccaggagagtcctcagcaacctctggaacacaggacttggccatgactgtctcctgtccctgtgtgggcccagatggttgagcttgagcaggaggtggagcggcggcagcggctggggcaggagtcagcagctaggaaagccctcatcgcgagttcctaccacccggcacggcctgaggtctacgactcactgcaggatgcagctctggcccccgagttcctggccgtgactgagtacagcgtgtccccagacgcagacctcaagggccttctccagcggctggagacagtatcggaggagaagcgcatctaccgggtgcctgttttcacagcgcccttctgccaggccctgctggaagagctggagcacttcgagcaatcggacatgcctaaggggaggcccaacaccatgaacaactacggggtgctgctgcacgagctcgggctggacgagccgctgatgacaccactgcgggagcgcttcctgcagccgctgatggccctgctgtaccctgactgtggcgggggccggctcgacagccaccgggcctttgtggtcaaatacgcaccgggccaggacctggagctgggctgccactatgataatgccgagctcaccctcaatgtggccttgggcaaggtcttcacagggggcgccctgtattttgggggcctcttccaggcacccacagccctgacggagcccctggaggtggagcacgtggtgggccagggtgtcctccaccgtggcggccagctgcatggagcccggcccttgggcactggtgagcgttggaaccttgtcgtctggctccgagcctctgctgtgcgcaacagcctctgtcccatgtgctgccgtgagcccgacctggtggacgatgagggcttcggtgatggcttcacccgagaggagcccgccacggtggatgtatgtgcgctcacctgagcttgcttgggcccagtgtgggggtggcaggcaggtgagggctccgttgccttggtctgggggcagaaataaaatccccgcagcctactgcacttcttggctcaacggtgtgccagcttctgggtcattctatgggcaaagatgctgccttagttcaggtttgtcagaagcagggtctggaatggggcttcagcgagggagtcagggaagcaggggaggggagggagcagctgggcaaggaagtggcttcagaggacgtccagcctcagctggccccacggagagctccaggcagagcccacagtaccacagtgtgcccacaccaccggttactggctcctggatgagggggccagagaggagtgaataacttcccagacacttatctccagggcagggtgccttccagtagccaagggaagcctccagagagcacagatgtgaaccctcagcagcaggcatcaccccccagtggactcgggtgggccaccagtagcatcttctagatggcagaggggtgaatggcagggccaggaaccaggctgcccgggttcccattctgcttctgccacttccagctgtgtggctttaggtgagccttcaccttttggtgccttcgtttcctcatttagcacctacctcctagagctgttttgggagtcaaatgcgctgacgtatataaagtgctttgcaagatc

SEQ ID NO: 285962 - DNA, 1619 bp, Homo sapiens
tcaggctagtaccgatctcgggaatataggattctacggcaagctgcgtagcggctgtgggtgcttcactatggcgacggtgggggctccgcggcacttctgccgctgcgcctgcttctgcaccgataacttgtacgtggcgcgctatgggctgcacgtgcgcttccgaggcgagcagcagctgcgccgggactacggcccgatcctgcgcagccgaggctgtgttagcgccaaggacttccagcagctgttagcagagcttgagcaggaggtggagcggcggcagcggctggggcaggagtcagcagctaggaaagccctcatcgcgagttcctaccacccggcacggcctgaggtctacgactcactgcaggatgcagctctggcccccgagttcctggccgtgactgagtacagcgtgtccccagacgcagacctcaagggccttctccagcggctggagacagtatcggaggagaagcgcatctaccgggtgcctgttttcacagcgcccttctgccaggccctgctggaagagctggagcacttcgagcaatcggacatgcctaaggggaggcccaacaccatgaacaactacggggtgctgctgcacgagctcgggctggacgagccgctgatgacaccactgcgggagcgcttcctgcagccgctgatggccctgctgtaccctgactgtggcgggggccggctcgacagccaccgggcctttgtggtcaaatacgcaccgggccaggacctggagctgggctgccactatgataatgccgagctcaccctcaatgtggccttgggcaaggtcttcacagggggcgccctgtattttgggggcctcttccaggcacccacagccctgacggagcccctggaggtggagcacgtggtgggccagggtgtcctccaccgtggcggccagctgcatggagcccggcccttgggcactggtgagcgttggaaccttgtcgtctggctccgagcctctgctgtgcgcaacagcctctgtcccatgtgctgccgtgagcccgacctggtggacgatgagggcttcggtgatggcttcacccgagaggagcccgccacggtggatgtatgtgcgctcacctgagcttgcttgggcccagtgtgggggtggcaggcaggtgagggctccgttgccttggtctgggggcagaaataaaatccccgcagcctactgcacttcttggctcaacggtgtgccagcttctgggtcattctatgggcaaagatgctgccttagttcaggtttgtcagaagcagggtctggaatggggcttcagcgagggagtcagggaagcaggggaggggagggagcagctgggcaaggaagtggcttcagaggacgtccagcctcagctggccccacggagagctccaggcagagcccacagtaccacagtgtgcccacaccaccggttactggctcctggatgagggggccagagaggagtgaataattccagctgtgtggctttaggtgagccttcaccttttggtgccttcgtttcctcatttagcacctacctcctagagctgttttgggagtcaaatgcgctgacgtatataaagtgctttgcaagatc

SEQ ID NO: 285963 - DNA, 2038 bp, Homo sapiens
ggagacactcactggggcaatctgaggtaatccaacagactgtggcggagggaccggaagcgccaggcagggacccggggtagatgctaaatccaaactgaaacgtacagggctggatgattgaagcaccagcgggaactagtcggacctccgagctctttaaactgtcctcagctcggctggttctccacgagctccgggcagacggcggggggtgggtcggcgtttaagtcaaaggccttggggctccgagtcccttcctctccccgtcctgtgaaggcacgacccagttcagctgtctgtaaagtggagccattagtccctgcctcgtagtgggaaaactgggaggcggaacgaggaggccgccggtcccaacccggcccaggagcatctttctccgcagaccgtttcctggcgagatcctgcgcagccgaggctgtgttagcgccaaggacttccagcagctgttagcagagcttgagcaggaggtggagcggcggcagcggctggggcaggagtcagcagctaggaaagccctcatcgcgagttcctaccacccggcacggcctgaggtctacgactcactgcaggatgcagctctggcccccgagttcctggccgtgactgagtacagcgtgtccccagacgcagacctcaagggccttctccagcggctggagacagtatcggaggagaagcgcatctaccgggtgcctgttttcacagcgcccttctgccaggccctgctggaagagctggagcacttcgagcaatcggacatgcctaaggggaggcccaacaccatgaacaactacggggtgctgctgcacgagctcgggctggacgagccgctgatgacaccactgcgggagcgcttcctgcagccgctgatggccctgctgtaccctgactgtggcgggggccggctcgacagccaccgggcctttgtggtcaaatacgcaccgggccaggacctggagctgggctgccactatgataatgccgagctcaccctcaatgtggccttgggcaaggtcttcacagggggcgccctgtattttgggggcctcttccaggcacccacagccctgacggagcccctggaggtggagcacgtggtgggccagggtgtcctccaccgtggcggccagctgcatggagcccggcccttgggcactggtgagcgttggaaccttgtcgtctggctccgagcctctgctgtgcgcaacagcctctgtcccatgtgctgccgtgagcccgacctggtggacgatgagggcttcggtgatggcttcacccgagaggagcccgccacggtggatgtatgtgcgctcacctgagcttgcttgggcccagtgtgggggtggcaggcaggtgagggctccgttgccttggtctgggggcagaaataaaatccccgcagcctactgcacttcttggctcaacggtgtgccagcttctgggtcattctatgggcaaagatgctgccttagttcaggtttgtcagaagcagggtctggaatggggcttcagcgagggagtcagggaagcaggggaggggagggagcagctgggcaaggaagtggcttcagaggacgtccagcctcagctggccccacggagagctccaggcagagcccacagtaccacagtgtgcccacaccaccggttactggctcctggatgagggggccagagaggagtgaataacttcccagacacttatctccagggcagggtgccttccagtagccaagggaagcctccagagagcacagatgtgaaccctcagcagcaggcatcaccccccagtggactcgggtgggccaccagtagcatcttctagatggcagaggggtgaatggcagggccaggaaccaggctgcccgggttcccattctgcttctgccacttccagctgtgtggctttaggtgagccttcaccttttggtgccttcgtttcctcatttagcacctacctcctagagctgttttgggagtcaaatgcgctgacgtatataaagtgctttgcaagatc

SEQ ID NO: 285964 - DNA, 1215 bp, Homo sapiens
tcaggctagtaccgatctcgggaatataggattctacggcaagctgcgtagcggctgtgggtgcttcactatggcgacggtgggggctccgcggcacttctgccgctgcgcctgcttctgcaccgataacttgtacgtggcgcgctatgggctgcacgtgcgcttccgaggcgagcagcagctgcgccgggactacggcccgatcctgcgcagccgaggctgtgttagcgccaaggacttccagcagctgttagcagagcttgagcaggaggtggagcggcggcagcggctggggcaggagtcagcagctaggaaagccctcatcgcgagttcctaccacccggcacggcctgaggtctacgactcactgcaggatgcagctctggcccccgagttcctggccgtgactgagtacagcgtgtccccagacgcagacctcaagggccttctccagcggctggagacagtatcggaggagaagcgcatctaccgggtgcctgttttcacagcgcccttctgccaggccctgctggaagagctggagcacttcgagcaatcggacatgcctaaggggaggcccaacaccatgaacaactacggggtgctgctgcacgagctcgggctggacgagccgctgatgacaccactgcgggagcgcttcctgcagccgctgatggccctgctgtaccctgactgtggcgggggccggctcgacagccaccgggcctttgtggtcaaatacgcaccgggccaggacctggagctgggctgccactatgataatgccgagctcaccctcaatgtggccttgggcaaggtcttcacagggggcgccctgtattttgggggcctcttccaggcacccacagccctgacggagcccctggaggtggagcacgtggtgggccagggtgtcctccaccgtggcggccagctgcatggagcccggcccttgggcactggtgagcgttggaaccttgtcgtctggctccgagcctctgctgtgcgcaacagcctctgtcccatgtgctgccgtgagcccgacctggtggacgatgagggcttcggtgatggcttcacccgagaggagcccgccacggtggatgtatgtgcgctcacctgagcttgcttgggcccagtgtgggggtggcaggcaggtgagggctccgttgccttggtctgggggcagaaataaaatccccgcagcctactgca

SEQ ID NO: 285965 - DNA, 2197 bp, Homo sapiens
ggagacactcactggggcaatctgaggtaatccaacagactgtggcggagggaccggaagcgccaggcagggacccggggtagatgctaaatccaaactgaaacgtacagggctggatgattgaagcaccagcgggaactagtcggacctccgagctctttaaactgtcctcagctcggctggttctccacgagctccgggcagacggcggggggtgggtcggcgtttaagtcaaaggccttggggctccgagtcccttcctctccccgtcctgtgaaggcacgacccagttcagctgtctgtaaagtggagccattagtccctgcctcgtagtgggaaaactgggaggcggaacgaggaggccgccggtcccaacccggcccaggagcatctttctccgcagaccgtttcctggcgagatcctgcgcagccgaggctgtgttagcgccaaggacttccagcagctgttagcagagcttgagcaggaggtggagcggcggcagcggctggggcaggagtcagcagctaggaaagccctcatcgcgagttcctaccacccggcacggcctgaggtctacgactcactgcaggatgcagctctggcccccgagttcctggccgtgactgagtacagcgtgtccccagacgcagacctcaagggccttctccagcggctggagacagtatcggggcccagcaagaaagaacagccccttctggccttcctgctgggggacagaggctcccagagccacttctgagttggggtgatgaaacaggaagactgaagcccaggcctggccggcccacggccacattcaggccaacagaccatccctccttccacagaggagaagcgcatctaccgggtgcctgttttcacagcgcccttctgccaggccctgctggaagagctggagcacttcgagcaatcggacatgcctaaggggaggcccaacaccatgaacaactacggggtgctgctgcacgagctcgggctggacgagccgctgatgacaccactgcgggagcgcttcctgcagccgctgatggccctgctgtaccctgactgtggcgggggccggctcgacagccaccgggcctttgtggtcaaatacgcaccgggccaggacctggagctgggctgccactatgataatgccgagctcaccctcaatgtggccttgggcaaggtcttcacagggggcgccctgtattttgggggcctcttccaggcacccacagccctgacggagcccctggaggtggagcacgtggtgggccagggtgtcctccaccgtggcggccagctgcatggagcccggcccttgggcactggtgagcgttggaaccttgtcgtctggctccgagcctctgctgtgcgcaacagcctctgtcccatgtgctgccgtgagcccgacctggtggacgatgagggcttcggtgatggcttcacccgagaggagcccgccacggtggatgtatgtgcgctcacctgagcttgcttgggcccagtgtgggggtggcaggcaggtgagggctccgttgccttggtctgggggcagaaataaaatccccgcagcctactgcacttcttggctcaacggtgtgccagcttctgggtcattctatgggcaaagatgctgccttagttcaggtttgtcagaagcagggtctggaatggggcttcagcgagggagtcagggaagcaggggaggggagggagcagctgggcaaggaagtggcttcagaggacgtccagcctcagctggccccacggagagctccaggcagagcccacagtaccacagtgtgcccacaccaccggttactggctcctggatgagggggccagagaggagtgaataacttcccagacacttatctccagggcagggtgccttccagtagccaagggaagcctccagagagcacagatgtgaaccctcagcagcaggcatcaccccccagtggactcgggtgggccaccagtagcatcttctagatggcagaggggtgaatggcagggccaggaaccaggctgcccgggttcccattctgcttctgccacttccagctgtgtggctttaggtgagccttcaccttttggtgccttcgtttcctcatttagcacctacctcctagagctgttttgggagtcaaatgcgctgacgtatataaagtgctttgcaagatc

SEQ ID NO: 285966 - DNA, 1893 bp, Homo sapiens
tcaggctagtaccgatctcgggaatataggattctacggcaagctgcgtagcggctgtgggtgcttcactatggcgacggtgggggctccgcggcacttctgccgctgcgcctgcttctgcaccgataacttgtacgtggcgcgctatgggctgcacgtgcgcttccgaggcgagcagcagctgcgccgggactacggcccgatcctgcgcagccgaggctgtgttagcgccaaggacttccagcagctgttagcagagcttgagcaggaggtggagcggcggcagcggctggggcaggagtcagcagctaggaaagccctcatcgcgagttcctaccacccggcacggcctgaggtctacgactcactgcaggatgcagctctggcccccgagttcctggccgtgactgagtacagcgtgtccccagacgcagacctcaagggccttctccagcggctggagacagtatcggaggagaagcgcatctaccgggtgcctgttttcacagcgcccttctgccaggccctgctggaagagctggagcacttcgagcaatcggacatgcctaaggggaggcccaacaccatgaacaactacggggtgctgctgcacgagctcgggctggacgagccgctgatgacaccactgcgggagcgcttcctgcagccgctgatggccctgctgtaccctgactgtggcgggggccggctcgacagccaccgggcctttgtggtcaaatacgcaccgggccaggacctggagctgggctgccactatgataatgccgagctcaccctcaatgtggccttgggcaaggtcttcacagggggcgccctgtattttgggggcctcttccaggtgagtgtgtgacccatgcggcagggcctggggcagctgtgagtgcccaggcctgagtcgtgccatctgcaggcacccacagccctgacggagcccctggaggtggagcacgtggtgggccagggtgtcctccaccgtggcggccagctgcatggagcccggcccttgggcactggtgagcgttggaaccttgtcgtctggctccgagcctctgctgtgcgcaacagcctctgtcccatgtgctgccgtgagcccgacctggtggacgatgagggcttcggtgatggcttcacccgagaggagcccgccacggtggatgtatgtgcgctcacctgagcttgcttgggcccagtgtgggggtggcaggcaggtgagggctccgttgccttggtctgggggcagaaataaaatccccgcagcctactgcacttcttggctcaacggtgtgccagcttctgggtcattctatgggcaaagatgctgccttagttcaggtttgtcagaagcagggtctggaatggggcttcagcgagggagtcagggaagcaggggaggggagggagcagctgggcaaggaagtggcttcagaggacgtccagcctcagctggccccacggagagctccaggcagagcccacagtaccacagtgtgcccacaccaccggttactggctcctggatgagggggccagagaggagtgaataacttcccagacacttatctccagggcagggtgccttccagtagccaagggaagcctccagagagcacagatgtgaaccctcagcagcaggcatcaccccccagtggactcgggtgggccaccagtagcatcttctagatggcagaggggtgaatggcagggccaggaaccaggctgcccgggttcccattctgcttctgccacttccagctgtgtggctttaggtgagccttcaccttttggtgccttcgtttcctcatttagcacctacctcctagagctgttttgggagtcaaatgcgctgacgtatataaagtgctttgcaagatc

SEQ ID NO: 285967 - DNA, 1846 bp, Homo sapiens
tcaggctagtaccgatctcgggaatataggattctacggcaagctgcgtagcggctgtgggtgcttcactatggcgacggtgggggctccgcggcacttctgccgctgcgcctgcttctgcaccgataacttgtacgtggcgcgctatgggctgcacgtgcgcttccgaggcgagcagcagctgcgccgggactacggcccgcttgagcaggaggtggagcggcggcagcggctggggcaggagtcagcagctaggaaagccctcatcgcgagttcctaccacccggcacggcctgaggtctacgactcactgcaggatgcagctctggcccccgagttcctggccgtgactgagtacagcgtgtccccagacgcagacctcaagggccttctccagcggctggagacagtatcgggtgatgaaacaggaagactgaagcccaggcctggccggcccacggccacattcaggccaacagaccatccctccttccacagaggagaagcgcatctaccgggtgcctgttttcacagcgcccttctgccaggccctgctggaagagctggagcacttcgagcaatcggacatgcctaaggggaggcccaacaccatgaacaactacggggtgctgctgcacgagctcgggctggacgagccgctgatgacaccactgcgggagcgcttcctgcagccgctgatggccctgctgtaccctgactgtggcgggggccggctcgacagccaccgggcctttgtggtcaaatacgcaccgggccaggacctggagctgggctgccactatgataatgccgagctcaccctcaatgtggccttgggcaaggtcttcacagggggcgccctgtattttgggggcctcttccaggcacccacagccctgacggagcccctggaggtggagcacgtggtgggccagggtgtcctccaccgtggcggccagctgcatggagcccggcccttgggcactggtgagcgttggaaccttgtcgtctggctccgagcctctgctgtgcgcaacagcctctgtcccatgtgctgccgtgagcccgacctggtggacgatgagggcttcggtgatggcttcacccgagaggagcccgccacggtggatgtatgtgcgctcacctgagcttgcttgggcccagtgtgggggtggcaggcaggtgagggctccgttgccttggtctgggggcagaaataaaatccccgcagcctactgcacttcttggctcaacggtgtgccagcttctgggtcattctatgggcaaagatgctgccttagttcaggtttgtcagaagcagggtctggaatggggcttcagcgagggagtcagggaagcaggggaggggagggagcagctgggcaaggaagtggcttcagaggacgtccagcctcagctggccccacggagagctccaggcagagcccacagtaccacagtgtgcccacaccaccggttactggctcctggatgagggggccagagaggagtgaataacttcccagacacttatctccagggcagggtgccttccagtagccaagggaagcctccagagagcacagatgtgaaccctcagcagcaggcatcaccccccagtggactcgggtgggccaccagtagcatcttctagatggcagaggggtgaatggcagggccaggaaccaggctgcccgggttcccattctgcttctgccacttccagctgtgtggctttaggtgagccttcaccttttggtgccttcgtttcctcatttagcacctacctcctagagctgttttgggagtcaaatgcgctgacgtatataaagtgctttgcaagatc

SEQ ID NO: 285968 - DNA, 2171 bp, Homo sapiens
aaggctaggtagaggcctgggtggtgaattcgccgagccggggtagatgctaaatccaaactgaaacgtacagggctggatgattgaagcaccagcgggaactagtcggacctccgagctctttaaactgtcctcagctcggctggttctccacgagctccgggcagacggcggggggtgggtcggcgtttaagtcaaaggccttggggctccgagtcccttcctctccccgtcctgtgaaggcacgacccagttcagctgtctgtaaagtggagccattagtccctgcctcgtagtgggaaaactgggaggcggaacgaggaggccgccggtcccaacccggcccaggagcatctttctccgcagaccgtttcctggcgagatcctgcgcagccgaggctgtgttagcgccaaggacttccagcagctgttagcagagtggcctcaggaggatgggaggccccacctggtaacaaccctgtgccaccccagcttgagcaggaggtggagcggcggcagcggctggggcaggagtcagcagctaggaaagccctcatcgcgagttcctaccacccggcacggcctgaggtctacgactcactgcaggatgcagctctggcccccgagttcctggccgtgactgagtacagcgtgtccccagacgcagacctcaagggccttctccagcggctggagacagtatcggccctgaaaagcaaaggcctcatctccatggcacaggtgatgaaacaggaagactgaagcccaggcctggccggcccacggccacattcaggccaacagaccatccctccttccacagaggagaagcgcatctaccgggtgcctgttttcacagcgcccttctgccaggccctgctggaagagctggagcacttcgagcaatcggacatgcctaaggggaggcccaacaccatgaacaactacggggtgctgctgcacgagctcgggctggacgagccgctgatgacaccactgcgggagcgcttcctgcagccgctgatggccctgctgtaccctgactgtggcgggggccggctcgacagccaccgggcctttgtggtcaaatacgcaccgggccaggacctggagctgggctgccactatgataatgccgagctcaccctcaatgtggccttgggcaaggtcttcacagggggcgccctgtattttgggggcctcttccaggcacccacagccctgacggagcccctggaggtggagcacgtggtgggccagggtgtcctccaccgtggcggccagctgcatggagcccggcccttgggcactggtgagcgttggaaccttgtcgtctggctccgagcctctgctgtgcgcaacagcctctgtcccatgtgctgccgtgagcccgacctggtggacgatgagggcttcggtgatggcttcacccgagaggagcccgccacggtggatgtatgtgcgctcacctgagcttgcttgggcccagtgtgggggtggcaggcaggtgagggctccgttgccttggtctgggggcagaaataaaatccccgcagcctactgcacttcttggctcaacggtgtgccagcttctgggtcattctatgggcaaagatgctgccttagttcaggtttgtcagaagcagggtctggaatggggcttcagcgagggagtcagggaagcaggggaggggagggagcagctgggcaaggaagtggcttcagaggacgtccagcctcagctggccccacggagagctccaggcagagcccacagtaccacagtgtgcccacaccaccggttactggctcctggatgagggggccagagaggagtgaataacttcccagacacttatctccagggcagggtgccttccagtagccaagggaagcctccagagagcacagatgtgaaccctcagcagcaggcatcaccccccagtggactcgggtgggccaccagtagcatcttctagatggcagaggggtgaatggcagggccaggaaccaggctgcccgggttcccattctgcttctgccacttccagctgtgtggctttaggtgagccttcaccttttggtgccttcgtttcctcatttagcacctacctcctagagctgttttgggagtcaaatgcgctgacgtatataaagtgctttgcaagatc

SEQ ID NO: 285969 - DNA, 358 bp, Homo sapiens
tcaggctagtaccgatctcgggaatataggattctacggcaagctgcgtagcggctgtgggtgcttcactatggcgacggtgggggctccgcggcacttctgccgctgcgcctgcttctgcaccgataacttgtacgtggcgcgctatgggctgcacgtgcgcttccgaggcgagcagcagctgcgccgggactacggcccgatcctgcgcagccgaggctgtgttagcgccaaggacttccagcagctgttagcagagcttgagcaggaggtggagcggcggcagcggctggggcaggagtcagcagtccgttgccttggtctgggggcagaaataaaatccccgcagcctactgca

SEQ ID NO: 285970 - DNA, 2716 bp, Homo sapiens
  misc_feature (1312)..(1312): n is a, c, g, or t
ttccctcctcccgctccccgcaggggtggagcctgagcgaggagcccgcgagctctcctctctcctctgtctccgcggatgacgagtggctggataacatggagtcgggcaagatggcgcctcccaagaacgctccgagagatgccttggtgatggcacagatcctgaaggatatgggaatcacagagtatgaaccaagggttataaatcaaatgttggaatttgctttccgttatgtgactacaattctggatgatgcaaaaatttattcgagccatgctaagaaacctaatgttgatgcagatgatgtgagactggcaatccagtgtcgtgctgaccaatcttttacctctcctcccccaagagattttttactggatatcgcaaggcagaaaaatcaaacccctttgccactgattaagccatatgcaggacctagactgccacctgatagatactgcttaacagctccaaactataggctgaagtccttaattaaaaagggacctaaccaagggagactagttccacgattaagtgttggtgctgttagtagcaaacctactactcctactatagcaaccccacaaacggtgtctgtcccaaataaagttgcaactccaatgtcagtgacaagccaaagatttacggtgcagattccaccttctcagtccacacctgtcaaaccagttcctgcaacaactgcagttcaaaatgttctgattaatccttcaatgattgggcccaaaaatattcttattaccaccaacatggtttcgtcacagaacacagccaatgaagcaaacccactgaagagaaaacatgaagatgatgatgacaatgatattatgtaaggaatatagtctagtctagatgcatttcaaaaggaaagttggttttgagcccagtatactgaactagaatattctagatcttgttttaccttaaaagactgaaatgtagctgcagtatttttcgtcagttaaaactgttagatctctttagtaaacatacaaatgtgtttttcagtaggcttcaattacaaacagttaagtacttgtttcttaatagtttcattaatgttgagtcctaatatggcaattctgtttttgagacacttttctgccttctatcactgatagtagcatttaagtttcagattctacagcctagtcagcagatttatctttgacagcataatttctgatctacatttaaatactactttattttataaggtaatatagttacttactgtcactagctaatttttttttttttaccaaatctctcaatataggaaacatttttnggaaaggatggatttagaggagagattctaaatccattttggatgtatttgtttctttgacttccttaacttccaaactcaactccctttctagatcccattcattttctgcacctcccccataggcttgtttctctccattgctattaaatgtagaaggccatacctggaattttaaaaatattattcctggtaatacagctcagtgtcattttcctatttttaaaacatgctctacatgcctaatgttttgtgattcactttaacctgatggtttgcatttgctgtttttcactcttatgtcagagcagttgggttttaccccttagtttttatgcctgttaagctttactgtgcttttgacaggtagttttgggtcagttatattcagttttagtattgtattccaagttgataactcttccatgtttcacatttctaaatttaacagagatgctgtagcttaaaacatgttttgataagtaattacactggacctaggcaaaaccactgaagaacaagtgttcctttttaccacatacatattatgttttgatcactgctgcttgagccccgctattggtataattcagatcattttagcttgttgctgaggatgtcacatataagacaggatcaaacctgaaagacactaatggttcatcctctataaggccaacaaagaaaacaaattaatgtgatgtaacttgcatttatgtgcactctgcataggtttcccaataatactgtaatgttgctgaacacctttccctgttttccatttatacacatattaaagtcatattgggaaagatggcaaagcttttgagaatataaacacacctgttttgtttttcttaagttcaacatacttttgtagaatttgtaaaataaatgttcgtatcataattgagaatttatagccaaggatcctcaaaacagaagtttcatcttaggatagtgtttgatatatctaagaaagtccagtaacagagaagaaatgtctcaaatgtctcgtatcagttttagtgtttttcagtattagggaaaggtaatataaaaacaggtaaaatgtataaaaatagacctgatcaacatcataggagataaatattcattatatagcataggatattattacttgaatgttctcagggaggcagcaagtcagaaggcctaggttctagtcctagctccatcatttaccaactgtgtgaccttacttcacctcttagccttgttctcctcactagcagtaggaaagtaacacctaccctgcctacctcacagggctgttgtgagggttcaattggtatatgtgaaaattctttcagaattgtaaaatgctatatgactgtaaggaattattgcatttgttccaaggttaataaaaatttgagctta

SEQ ID NO: 285971 - DNA, 2757 bp, Homo sapiens
  misc_feature (1353)..(1353): n is a, c, g, or t
gcgtcgacttttttttttttgatacgagcaactgggtcagcacttgaaccacttgcagcaggagaaaaaccatgaaatgaccaactaagttaaagactaccaataggctctctctccggatgacgagtggctggataacatggagtcgggcaagatggcgcctcccaagaacgctccgagagatgccttggtgatggcacagatcctgaaggatatgggaatcacagagtatgaaccaagggttataaatcaaatgttggaatttgctttccgttatgtgactacaattctggatgatgcaaaaatttattcgagccatgctaagaaacctaatgttgatgcagatgatgtgagactggcaatccagtgtcgtgctgaccaatcttttacctctcctcccccaagagattttttactggatatcgcaaggcagaaaaatcaaacccctttgccactgattaagccatatgcaggacctagactgccacctgatagatactgcttaacagctccaaactataggctgaagtccttaattaaaaagggacctaaccaagggagactagttccacgattaagtgttggtgctgttagtagcaaacctactactcctactatagcaaccccacaaacggtgtctgtcccaaataaagttgcaactccaatgtcagtgacaagccaaagatttacggtgcagattccaccttctcagtccacacctgtcaaaccagttcctgcaacaactgcagttcaaaatgttctgattaatccttcaatgattgggcccaaaaatattcttattaccaccaacatggtttcgtcacagaacacagccaatgaagcaaacccactgaagagaaaacatgaagatgatgatgacaatgatattatgtaaggaatatagtctagtctagatgcatttcaaaaggaaagttggttttgagcccagtatactgaactagaatattctagatcttgttttaccttaaaagactgaaatgtagctgcagtatttttcgtcagttaaaactgttagatctctttagtaaacatacaaatgtgtttttcagtaggcttcaattacaaacagttaagtacttgtttcttaatagtttcattaatgttgagtcctaatatggcaattctgtttttgagacacttttctgccttctatcactgatagtagcatttaagtttcagattctacagcctagtcagcagatttatctttgacagcataatttctgatctacatttaaatactactttattttataaggtaatatagttacttactgtcactagctaatttttttttttttaccaaatctctcaatataggaaacatttttnggaaaggatggatttagaggagagattctaaatccattttggatgtatttgtttctttgacttccttaacttccaaactcaactccctttctagatcccattcattttctgcacctcccccataggcttgtttctctccattgctattaaatgtagaaggccatacctggaattttaaaaatattattcctggtaatacagctcagtgtcattttcctatttttaaaacatgctctacatgcctaatgttttgtgattcactttaacctgatggtttgcatttgctgtttttcactcttatgtcagagcagttgggttttaccccttagtttttatgcctgttaagctttactgtgcttttgacaggtagttttgggtcagttatattcagttttagtattgtattccaagttgataactcttccatgtttcacatttctaaatttaacagagatgctgtagcttaaaacatgttttgataagtaattacactggacctaggcaaaaccactgaagaacaagtgttcctttttaccacatacatattatgttttgatcactgctgcttgagccccgctattggtataattcagatcattttagcttgttgctgaggatgtcacatataagacaggatcaaacctgaaagacactaatggttcatcctctataaggccaacaaagaaaacaaattaatgtgatgtaacttgcatttatgtgcactctgcataggtttcccaataatactgtaatgttgctgaacacctttccctgttttccatttatacacatattaaagtcatattgggaaagatggcaaagcttttgagaatataaacacacctgttttgtttttcttaagttcaacatacttttgtagaatttgtaaaataaatgttcgtatcataattgagaatttatagccaaggatcctcaaaacagaagtttcatcttaggatagtgtttgatatatctaagaaagtccagtaacagagaagaaatgtctcaaatgtctcgtatcagttttagtgtttttcagtattagggaaaggtaatataaaaacaggtaaaatgtataaaaatagacctgatcaacatcataggagataaatattcattatatagcataggatattattacttgaatgttctcagggaggcagcaagtcagaaggcctaggttctagtcctagctccatcatttaccaactgtgtgaccttacttcacctcttagccttgttctcctcactagcagtaggaaagtaacacctaccctgcctacctcacagggctgttgtgagggttcaattggtatatgtgaaaattctttcagaattgtaaaatgctatatgactgtaaggaattattgcatttgttccaaggttaataaaaatttgagctta

SEQ ID NO: 285972 - DNA, 652 bp, Homo sapiens
agcctcctgagtagctgggaccataggctcacaacaccacacctgccaaattctccggtttgccccggaacttttgagaatataaacacacctgttttgtttttcttaagttcaacatacttttgtagaatttgtaaaataaatgttcgtatcataattgagaatttatagccaaggatcctcaaaacagaagtttcatcttaggatagtgtttgatatatctaagaaagtccagtaacagagaagaaatgtctcaaatgtctcgtatcagttttagtgtttttcagtattagggaaaggtaatataaaaacaggtaaaatgtataaaaatagacctgatcaacatcataggagataaatattcattatatagcataggatattattacttgaatgttctcagggaggcagcaagtcagaaggcctaggttctagtcctagctccatcatttaccaactgtgtgaccttacttcacctcttagccttgttctcctcactagcagtaggaaagtaacacctaccctgcctacctcacagggctgttgtgagggttcaattggtatatgtgaaaattctttcagaattgtaaaatgctatatgactgtaaggaattattgcatttgttccaaggttaataaaaatttgagctta

SEQ ID NO: 285973 - DNA, 303 bp, Homo sapiens
gcctgtgacttctgaactgcccattagctcccaacgcatgcattaaaccctcaaagaggctgggacccactccctccacgcatactcccaaatgcctgagtcatgatggcttctggtccattctgcacccccaagtgctgacccagagctccacccctccagcctcacctccaccttctcaatctcagtgactctaagtctctatactacacattacctgtcagcccgcagaatgatccctgcccgtgacttctgaactgcccattagctcccaacgcatgcattaaaccctcaaagaggctg

SEQ ID NO: 285974 - DNA, 990 bp, Homo sapiens
gattgggaccgggccccttttccaccacgcgtcataaatattagaatattactattccaatgattaaatgaggatcttgaaataaattctgaagtcttccaatttttacatttattggaggggtccctgagttctgtcaacttttttatttaagtctcttgctcttattttgtgcataaatgttaaaccttccaaaaatgaaatgttagctttctttcttttactttttattaaatttaatagaaaatatgacctgagtagttaaaaagtattttgcattatttgcagtaagatgtctctagcactgctcaaagggcaaattttaaaacttcagtctgggtgaaagatttgctagttttacagaaagatttgctatcttaaactcaagctggtttttctgttctcatgtaagtgactgggatgctgtcttatgaattcttccaaggtcatgtttgtgaaataaacattacatgagagctttcctgtcatctacactatatgttgtctggagtgttgaacaaatttattttagtttctaagttgtaatctatcctcatatggtctatacgattttgaatgtgtgccactacatactgagatgataatgctgtacaattttaagtggtagcagtttctgtatgcagtaggctgaaatattttgatgaactgcttaatttttggattttattttttaagttgtataatttattttcttgcaaaataaaaatgtaatataaaagcttttacctatccagaaaatgttgatgttctactataaaatagttacaaagagtttaattaaaatttttatagtaggtatatttttaaatttgaaggtaaattaatctcagccagccttaggaatcagaaatatgaaaagtaacccacttatttatattagacttcaaattctaattcaaaatgagagcagtcaggaatgtagcttttccactgatgatagcatgtggctatatgcctggaagaggtaat

SEQ ID NO: 285975 - DNA, 483 bp, Homo sapiens
accattaaccttccctctacacttatcatcttcactattctaattctactgactatccttgaaatggtcgccaatccgattggattttaaaaatttaggtttgttgttttaaaccataattgttctcagaacttttttggaacttcggcgaccatttcacaattttttttataaccagacaagttgtcctgcaaatattaaggagactggcagatgttatcaaatataaaataactattgggattaacatctataaacccttcttgatcaaggtatttaacagtcaattatagttaaccaagaagtaaacaaaaataacactggaatagaagaaatgtgacagtgggctggtgctattcattgaatccatgtaagtattgaactagaagagcatctgagggaattaagattgcataataaaatgtttttctgaaaggtgtaggaataattattgagtgctaatcttatattgagatgtcccat

SEQ ID NO: 285976 - DNA, 5346 bp, Homo sapiens
tcatcatttttttgcagtcaacacatatttactgggcgcattctatgcacgagttattgaagacagctgttgtaagcatttcaggacaatgcacctcccttaacaccgagtccgggatttggggcggggtgccggaaaacgccaggtcccgccagcagagggcacggtcccggcctcgctgcagcctcgggacccaccgaggcttccaggctcccacgctcgctcccgagcgcgtccccgccctcgcgtcacgtgacgtggccgcggaacctgagctgcggggcctaagccgagctaaattcgttgcaggtggccgcggcgggtgcaaccacaaaggctaatccgaaggagtcggggaggctcgtggagtcgatgcttcctcttccaagtcaggtcggctcccgttaccttctcagcattcgccgttccggtcttcctgagcgcgtgcatgaggtctttcgcgtggggaagctccggtgaccatgtaggggacaagagtgaggaagctcctggtgcttgggacgaggtcagcgctgtcggcgcgctgctccagcgcccaccacaccctggtgcgggccgacgggcctgggccctggtgggagctccggcctccggtcaaggcctggccgggagcgccacgaattctcgcgtcgtctcgcgagagtccaagttaaagaacatggcgacgtctaatctgttaaagaataaaggttctcttcagtttgaagacaaatgggattttatgcgcccgattgttttgaagcttttacgccaggaatctgttacaaaacagcagtggtttgatctgttttcggatgtgcatgcagtctgtctttgggatgataaaggcccagcaaaaattcatcaggctttaaaagaagatattcttgagtttattaagcaggcacaggcacgagtactgagccatcaagatgatacggctttgctaaaagcatatattgttgaatggcgaaagttctttacacaatgtgatattttaccaaaacctttttgtcaactagagattactttaatgggtaaacagggcagcaataaaaaatcaaatgtggaagacagtattgttcgaaagcttatgcttgatacatggaatgagtcaatcttttcaaacataaaaaacagactccaagatagtgcaatgaagctggtacatgctgagagattgggagaagcttttgattctcagctggttattggagtaagagaatcctatgttaacctttgttctaatcctgaggataaacttcaaatttatagggacaattttgagaaggcatacttggattcaacagagagattttatagaacacaagcaccctcgtatttacaacaaaatggtgtacagaattatatgaaatatgcagatgctaaattaaaagaagaagaaaaacgagcactacgttatttagaaacaagacgagaatgtaactccgttgaagcactcatggaatgctgtgtaaatgccctggtgacatcatttaaagagactatcttagctgagtgccaaggcatgatcaagagaaatgaaactgaaaaattacatttaatgttttcattgatggacaaagttcctaatggtatagagccaatgttgaaagacttggaggaacatatcattagtgctggcctggcagatatggtagcagctgctgaaactattactactgactctgagaaatacgttgagcagttacttacactatttaatagatttagtaaactcgtcaaagaagcttttcaagatgatccacgatttcttactgcaagagataaggcgtataaagcagttgttaatgatgctaccatatttaaacttgaattacctttgaagcagaagggggtgggattaaaaactcagcctgaatcaaaatgccctgagctgcttgccaattactgtgacatgttgctaagaaaaacaccattaagcaaaaaactaacctctgaagagattgaagcaaagcttaaagaagtgctcttggtacttaagtatgtacagaacaaagatgtttttatgaggtatcataaagctcatttgacacgacgtcttatattagacatctctgccgatagtgaaattgaagaaaacatggtagagtggctaagagaagttggtatgccagcggattatgtaaacaagcttgctagaatgtttcaggacataaaagtatctgaagatttgaaccaagcttttaaggaaatgcacaaaaataataaattggcattaccagctgattcagttaatataaaaattctgaatgctggcgcctggtcaagaagttctgagaaagtctttgtctcacttcctactgaactggaggacttgataccggaagtagaagaattctacaaaaaaaatcatagtggtagaaaattacattggcatcatctcatgtcaaatggaattataacatttaagaatgaagttggtcaatatgatttggaggtaaccacgtttcagctcgctgtattgtttgcatggaaccaaagacccagagagaaaatcagctttgaaaatcttaagcttgcaactgaactccctgatgctgaacttaggaggactttatggtctttagtagctttcccaaaactcaaacggcaagttttgttgtatgaacctcaagtcaactcacccaaagactttacagaaggtaccctcttctcagtgaaccaggagttcagtttaataaaaaatgcaaaggttcagaaaaggggtaaaatcaacttgattggacgtttgcagctcactacagaaaggatgagagaagaagagaatgaaggaatagttcaactacgaatactaagaacccaggaagctatcatacaaataatgaaaatgagaaagaaaattagtaatgctcagctgcagactgaattagtagaaattttgaaaaacatgttcttgccacaaaagaaaatgataaaagagcaaatagagtggctaatagagcacaaatacatcagaagagatgaatctgatatcaacactttcatatatatggcataattttgaatatcatggacaatatttagaacccaaattttggagtgcttgggcagaaagttgtaaagtttgtgctggagaaaggtttatttggactttgattacataaatattaaaatctctgccttaccttacaaaaacaactatattttgccaatcacattagttagcatgatggcattcccttcatgttgcacactctttgacagcatgctgttttgtggagaaacttgcattcatgaagagcccattatcaacttttaaaagtgaatttgatttgtacccaccaggagaaatacagttgggaagggtgagggtggggttcttgttgcttttttctcttttttcctctcttaaaaaatgtacttgcacaaggaaggatcttcagatattcatgcactgaaaaatgctgttatcttttgtttttaaaaaatgcaattaaaactagaaatagcactcttggtttcttttgatgaaaagagtgagctggtcaatgcaacattgggaaacggcagatgtagataattcagcattggcgtatttgcttgtcccaatacaagaatgccaaaggaggaaacaggaaaaattgccgtccattttaaaaatttaggtttgttgttttaaaccataattgttctcagaacttttttggaacttctaattttgggtcatttaatttaagaatgagagtcatgatgttttgatttatgaaggtgaatttaatgcaaaagtgggtaacactacattcatagcaaagttttttattaaattttataaatttttaatagccaattatgtcctaattgtattttggggaatgaacagcagcaaatactgtaaatgtacagttttctttttttttttttttggttatgtatacaaaagttttaactactttttggtgtttatgaaaatcatttagttgacaaggtgcctatgccattgttaaattttctttaagtaatttaacaacagatttgctaatttaaaaaaaaatgaaaaaaaaaatcttaccagcagtttgtaaaggtctggaatcacagttggcatcctttattcaggtctcttctctccaacgtacacttaaaattggtgccgagcagggatataacctgcagttaagtgaaaagaaaatccagcctccccctccaaaaaaaaaaaaaaaaatttaatttttaaaaattagtggtatggcaataagacacttcagaggctatcttaacctctgaatacccatcttctagtttaaagacagagacatcccatctggaaaatgttaacttgtgttgccatctcgttgccggagtaagtagacataagacagagtttaagaagtaaaaatatagaaaaattttgatggtcacaatgagataaatattagaatattactattccaatgattaaatgaggatcttgaaataaattctgaagtcttccaatttttacatttattggaggggtccctgagttctgtcaacttttttatttaagtctcttgctcttattttgtgcataaatgttaaaccttccaaaaatgaaatgttagctttctttcttttactttttattaaatttaatagaaaatatgacctgagtagttaaaaagtattttgcattatttgcagtaagatgtctctagcactgctcaaagggcaaattttaaaacttcagtctgggtgaaagatttgctagttttacagaaagatttgctatcttaaactcaagctggtttttctgttctcatgtaagtgactgggatgctgtcttatgaattcttccaaggtcatgtttgtgaaataaacattacatgagagctttcctgtcatctacactatatgttgtctggagtgttgaacaaatttattttagtttctaagttgtaatctatcctcatatggtctatacgattttgaatgtgtgccactacatactgagatgataatgctgtacaattttaagtggtagcagtttctgtatgcagtaggctgaaatattttgatgaactgcttaatttttggattttattttttaagttgtataatttattttcttgcaaaataaaaatgtaatataaaagcttttacctatccagaaaatgttgatgttctactataaaatagttacaaagagtttaattaaaatttttatagtaggtatatttttaaatttgaaggtaaattaatctcagccagccttaggaatcagaaatatgaaaagtaacccacttatttatattagacttcaaattctaattcaaaatgagagcagtcaggaatgtagcttttccactgatgatagcatgtggctatatgcctggaagaggtaat

SEQ ID NO: 285977 - DNA, 5325 bp, Homo sapiens
tcatcatttttttgcagtcaacacatatttactgggcgcattctatgcacgagttattgaagacagctgttgtaagcatttcaggacaatgcacctcccttaacaccgagtccgggatttggggcggggtgccggaaaacgccaggtcccggcctcgctgcagcctcgggacccaccgaggcttccaggctcccacgctcgctcccgagcgcgtccccgccctcgcgtcacgtgacgtggccgcggaacctgagctgcggggcctaagccgagctaaattcgttgcaggtggccgcggcgggtgcaaccacaaaggctaatccgaaggagtcggggaggctcgtggagtcgatgcttcctcttccaagtcaggtcggctcccgttaccttctcagcattcgccgttccggtcttcctgagcgcgtgcatgaggtctttcgcgtggggaagctccggtgaccatgtaggggacaagagtgaggaagctcctggtgcttgggacgaggtcagcgctgtcggcgcgctgctccagcgcccaccacaccctggtgcgggccgacgggcctgggccctggtgggagctccggcctccggtcaaggcctggccgggagcgccacgaattctcgcgtcgtctcgcgagagtccaagttaaagaacatggcgacgtctaatctgttaaagaataaaggttctcttcagtttgaagacaaatgggattttatgcgcccgattgttttgaagcttttacgccaggaatctgttacaaaacagcagtggtttgatctgttttcggatgtgcatgcagtctgtctttgggatgataaaggcccagcaaaaattcatcaggctttaaaagaagatattcttgagtttattaagcaggcacaggcacgagtactgagccatcaagatgatacggctttgctaaaagcatatattgttgaatggcgaaagttctttacacaatgtgatattttaccaaaacctttttgtcaactagagattactttaatgggtaaacagggcagcaataaaaaatcaaatgtggaagacagtattgttcgaaagcttatgcttgatacatggaatgagtcaatcttttcaaacataaaaaacagactccaagatagtgcaatgaagctggtacatgctgagagattgggagaagcttttgattctcagctggttattggagtaagagaatcctatgttaacctttgttctaatcctgaggataaacttcaaatttatagggacaattttgagaaggcatacttggattcaacagagagattttatagaacacaagcaccctcgtatttacaacaaaatggtgtacagaattatatgaaatatgcagatgctaaattaaaagaagaagaaaaacgagcactacgttatttagaaacaagacgagaatgtaactccgttgaagcactcatggaatgctgtgtaaatgccctggtgacatcatttaaagagactatcttagctgagtgccaaggcatgatcaagagaaatgaaactgaaaaattacatttaatgttttcattgatggacaaagttcctaatggtatagagccaatgttgaaagacttggaggaacatatcattagtgctggcctggcagatatggtagcagctgctgaaactattactactgactctgagaaatacgttgagcagttacttacactatttaatagatttagtaaactcgtcaaagaagcttttcaagatgatccacgatttcttactgcaagagataaggcgtataaagcagttgttaatgatgctaccatatttaaacttgaattacctttgaagcagaagggggtgggattaaaaactcagcctgaatcaaaatgccctgagctgcttgccaattactgtgacatgttgctaagaaaaacaccattaagcaaaaaactaacctctgaagagattgaagcaaagcttaaagaagtgctcttggtacttaagtatgtacagaacaaagatgtttttatgaggtatcataaagctcatttgacacgacgtcttatattagacatctctgccgatagtgaaattgaagaaaacatggtagagtggctaagagaagttggtatgccagcggattatgtaaacaagcttgctagaatgtttcaggacataaaagtatctgaagatttgaaccaagcttttaaggaaatgcacaaaaataataaattggcattaccagctgattcagttaatataaaaattctgaatgctggcgcctggtcaagaagttctgagaaagtctttgtctcacttcctactgaactggaggacttgataccggaagtagaagaattctacaaaaaaaatcatagtggtagaaaattacattggcatcatctcatgtcaaatggaattataacatttaagaatgaagttggtcaatatgatttggaggtaaccacgtttcagctcgctgtattgtttgcatggaaccaaagacccagagagaaaatcagctttgaaaatcttaagcttgcaactgaactccctgatgctgaacttaggaggactttatggtctttagtagctttcccaaaactcaaacggcaagttttgttgtatgaacctcaagtcaactcacccaaagactttacagaaggtaccctcttctcagtgaaccaggagttcagtttaataaaaaatgcaaaggttcagaaaaggggtaaaatcaacttgattggacgtttgcagctcactacagaaaggatgagagaagaagagaatgaaggaatagttcaactacgaatactaagaacccaggaagctatcatacaaataatgaaaatgagaaagaaaattagtaatgctcagctgcagactgaattagtagaaattttgaaaaacatgttcttgccacaaaagaaaatgataaaagagcaaatagagtggctaatagagcacaaatacatcagaagagatgaatctgatatcaacactttcatatatatggcataattttgaatatcatggacaatatttagaacccaaattttggagtgcttgggcagaaagttgtaaagtttgtgctggagaaaggtttatttggactttgattacataaatattaaaatctctgccttaccttacaaaaacaactatattttgccaatcacattagttagcatgatggcattcccttcatgttgcacactctttgacagcatgctgttttgtggagaaacttgcattcatgaagagcccattatcaacttttaaaagtgaatttgatttgtacccaccaggagaaatacagttgggaagggtgagggtggggttcttgttgcttttttctcttttttcctctcttaaaaaatgtacttgcacaaggaaggatcttcagatattcatgcactgaaaaatgctgttatcttttgtttttaaaaaatgcaattaaaactagaaatagcactcttggtttcttttgatgaaaagagtgagctggtcaatgcaacattgggaaacggcagatgtagataattcagcattggcgtatttgcttgtcccaatacaagaatgccaaaggaggaaacaggaaaaattgccgtccattttaaaaatttaggtttgttgttttaaaccataattgttctcagaacttttttggaacttctaattttgggtcatttaatttaagaatgagagtcatgatgttttgatttatgaaggtgaatttaatgcaaaagtgggtaacactacattcatagcaaagttttttattaaattttataaatttttaatagccaattatgtcctaattgtattttggggaatgaacagcagcaaatactgtaaatgtacagttttctttttttttttttttggttatgtatacaaaagttttaactactttttggtgtttatgaaaatcatttagttgacaaggtgcctatgccattgttaaattttctttaagtaatttaacaacagatttgctaatttaaaaaaaaatgaaaaaaaaaatcttaccagcagtttgtaaaggtctggaatcacagttggcatcctttattcaggtctcttctctccaacgtacacttaaaattggtgccgagcagggatataacctgcagttaagtgaaaagaaaatccagcctccccctccaaaaaaaaaaaaaaaaatttaatttttaaaaattagtggtatggcaataagacacttcagaggctatcttaacctctgaatacccatcttctagtttaaagacagagacatcccatctggaaaatgttaacttgtgttgccatctcgttgccggagtaagtagacataagacagagtttaagaagtaaaaatatagaaaaattttgatggtcacaatgagataaatattagaatattactattccaatgattaaatgaggatcttgaaataaattctgaagtcttccaatttttacatttattggaggggtccctgagttctgtcaacttttttatttaagtctcttgctcttattttgtgcataaatgttaaaccttccaaaaatgaaatgttagctttctttcttttactttttattaaatttaatagaaaatatgacctgagtagttaaaaagtattttgcattatttgcagtaagatgtctctagcactgctcaaagggcaaattttaaaacttcagtctgggtgaaagatttgctagttttacagaaagatttgctatcttaaactcaagctggtttttctgttctcatgtaagtgactgggatgctgtcttatgaattcttccaaggtcatgtttgtgaaataaacattacatgagagctttcctgtcatctacactatatgttgtctggagtgttgaacaaatttattttagtttctaagttgtaatctatcctcatatggtctatacgattttgaatgtgtgccactacatactgagatgataatgctgtacaattttaagtggtagcagtttctgtatgcagtaggctgaaatattttgatgaactgcttaatttttggattttattttttaagttgtataatttattttcttgcaaaataaaaatgtaatataaaagcttttacctatccagaaaatgttgatgttctactataaaatagttacaaagagtttaattaaaatttttatagtaggtatatttttaaatttgaaggtaaattaatctcagccagccttaggaatcagaaatatgaaaagtaacccacttatttatattagacttcaaattctaattcaaaatgagagcagtcaggaatgtagcttttccactgatgatagcatgtggctatatgcctggaagaggtaat

SEQ ID NO: 285978 - DNA, 4565 bp, Homo sapiens
tcatcatttttttgcagtcaacacatatttactgggcgcattctatgcacgagttattgaagacagctgttgtaagcatttcaggacaatgcacctcccttaacaccgagtccgggatttggggcggggtgccggaaaacgccaggtcccgccagcagagggcacggtcccggcctcgctgcagcctcgggacccaccgaggcttccaggctcccacgctcgctcccgagcgcgtccccgccctcgcgtcacgtgacgtggccgcggaacctgagctgcggggcctaagccgagctaaattcgttgcaggtggccgcggcgggtgcaaccacaaaggctaatccgaaggagtcggggaggctcgtggagtcgatgcttcctcttccaagtcaggtcggctcccgttaccttctcagcattcgccgttccggtcttcctgagcgcgtgcatgaggtctttcgcgtggggaagctccggtgaccatgtaggggacaagagtgaggaagctcctggtgcttgggacgaggtcagcgctgtcggcgcgctgctccagcgcccaccacaccctggtgcgggccgacgggcctgggccctggtgggagctccggcctccggtcaaggcctggccgggagcgccacgaattctcgcgtcgtctcgcgagagtccaagttaaagaacatggcgacgtctaatctgttaaagaataaaggttctcttcagtttgaagacaaatgggattttatgcgcccgattgttttgaagcttttacgccaggaatctgttacaaaacagcagtggtttgatctgttttcggatgtgcatgcagtctgtctttgggatgataaaggcccagcaaaaattcatcaggctttaaaagaagatattcttgagtttattaagcaggcacaggcacgagtactgagccatcaagatgatacggctttgctaaaagcatatattgttgaatggcgaaagttctttacacaatgtgatattttaccaaaacctttttgtcaactagagattactttaatgggtaaacagggcagcaataaaaaatcaaatgtggaagacagtattgttcgaaagcttatgcttgatacatggaatgagtcaatcttttcaaacataaaaaacagactccaagatagtgcaatgaagctggtacatgctgagagattgggagaagcttttgattctcagctggttattggagtaagagaatcctatgttaacctttgttctaatcctgaggataaacttcaaatttatagggacaattttgagaaggcatacttggattcaacagagagattttatagaacacaagcaccctcgtatttacaacaaaatggtgtacagaattatatgaaatatgcagatgctaaattaaaagaagaagaaaaacgagcactacgttatttagaaacaagacgagaatgtaactccgttgaagcactcatggaatgctgtgtaaatgccctggtgacatcatttaaagagactatcttagctgagtgccaaggcatgatcaagagaaatgaaactgaaaaattacatttaatgttttcattgatggacaaagttcctaatggtatagagccaatgttgaaagacttggaggaacatatcattagtgctggcctggcagatatggtagcagctgctgaaactattactactgactctgagaaatacgttgagcagttacttacactatttaatagatttagtaaactcgtcaaagaagcttttcaagatgatccacgatttcttactgcaagagataaggcgtataaagcagttgttaatgatgctaccatatttaaacttgaattacctttgaagcagaagggggtgggattaaaaactcagcctgaatcaaaatgccctgagctgcttgccaattactgtgacatgttgctaagaaaaacaccattaagcaaaaaactaacctctgaagagattgaagcaaagcttaaagaagtgctcttggtacttaagtatgtacagaacaaagatgtttttatgaggtatcataaagctcatttgacacgacgtcttatattagacatctctgccgatagtgaaattgaagaaaacatggtagagtggctaagagaagttggtatgccagcggattatgtaaacaagcttgctagaatgtttcaggacataaaagtatctgaagatttgaaccaagcttttaaggaaatgcacaaaaataataaattggcattaccagctgattcagttaatataaaaattctgaatgctggcgcctggtcaagaagttctgagaaagtctttgtctcacttcctactgaactggaggacttgataccggaagtagaagaattctacaaaaaaaatcatagtggtagaaaattacattggcatcatctcatgtcaaatggaattataacatttaagaatgaagttggtcaatatgatttggaggtaaccacgtttcagctcgctgtattgtttgcatggaaccaaagacccagagagaaaatcagctttgaaaatcttaagcttgcaactgaactccctgatgctgaacttaggaggactttatggtctttagtagctttcccaaaactcaaacggcaagttttgttgtatgaacctcaagtcaactcacccaaagactttacagaaggtaccctcttctcagtgaaccaggagttcagtttaataaaaaatgcaaaggttcagaaaaggggtaaaatcaacttgattggacgtttgcagctcactacagaaaggatgagagaagaagagaatgaaggaatagttcaactacgaatactaagaacccaggaagctatcatacaaataatgaaaatgagaaagaaaattagtaatgctcagctgcagactgaattagtagaaattttgaaaaacatgttcttgccacaaaagaaaatgataaaagagcaaatagagtggctaatagagcacaaatacatcagaagagatgaatctgatatcaacactttcatatatatggcataattttgaatatcatggacaatatttagaacccaaattttggagtgcttgggcagaaagttgtaaagtttgtgctggagaaaggtttatttggactttgattacataaatattaaaatctctgccttaccttacaaaaacaactatattttgccaatcacattagttagcatgatggcattcccttcatgttgcacactctttgacagcatgctgttttgtggagaaacttgcattcatgaagagcccattatcaacttttaaaagtgaatttgatttgtacccaccaggagaaatacagttgggaagggtgagggtggggttcttgttgcttttttctcttttttcctctcttaaaaaatgtacttgcacaaggaaggatcttcagatattcatgcactgaaaaatgctgttatcttttgtttttaaaaaatgcaattaaaactagaaatagcactcttggtttcttttgatgaaaagagtgagctggtcaatgcaacattgggaaacggcagatgtagataattcagcattggcgtatttgcttgtcccaatacaagaatgccaaaggaggaaacaggaaaaattgccgtccattttaaaaatttaggtttgttgttttaaaccataattgttctcagaacttttttggaacttctaattttgggtcatttaatttaagaatgagagtcatgatgttttgatttatgaaggtgaatttaatgcaaaagtgggtaacactacattcatagcaaagttttttattaaattttataaatttttaatagccaattatgtcctaattgtattttggggaatgaacagcagcaaatactgtaaatgtacagttttctttttttttttttttggttatgtatacaaaagttttaactactttttggtgtttatgaaaatcatttagttgacaaggtgcctatgccattgttaaattttctttaagtaatttaacaacagatttgctaatttaaaaaaaaatgaaaaaaaaaatcttaccagcagtttgtaaaggtctggaatcacagttggcatcctttattcaggtctcttctctccaacgtacacttaaaattggtgccgagcagggatataacctgcagttaagtgaaaagaaaatccagcctccccctccaaaaaaaaaaaaaaaaatttaatttttaaaaattagtggtatggcaataagacacttcagaggctatcttaacctctgaatacccatcttctagtttaaagacagagacatcccatctggaaaatgttaacttgtgttgccatctcgttgccggagtaagtagacataagacagagtttaagaagtaaaaatatagaaaaattttgatggtcacaatgagataaatattagaatattactattccaatgattaaatgaggatcttgaaataaattctgaagtcttccaatttttacatttattggaggggtccctgagttctgtcaacttttttatttaagtctcttgctcttattttgtgcataaatgtctaatagggagatgtctcatatggga

SEQ ID NO: 285979 - DNA, 3155 bp, Homo sapiens
tcatcatttttttgcagtcaacacatatttactgggcgcattctatgcacgagttattgaagacagctgttgtaagcatttcaggacaatgcacctcccttaacaccgagtccgggatttggggcggggtgccggaaaacgccaggtcccgccagcagagggcacggtcccggcctcgctgcagcctcgggacccaccgaggcttccaggctcccacgctcgctcccgagcgcgtccccgccctcgcgtcacgtgacgtggccgcggaacctgagctgcggggcctaagccgagctaaattcgttgcaggtggccgcggcgggtgcaaccacaaaggctaatccgaaggagtcggggaggctcgtggagtcgatgcttcctcttccaagtcaggtcggctcccgttaccttctcagcattcgccgttccggtcttcctgagcgcgtgcatgaggtctttcgcgtggggaagctccggtgaccatgtaggggacaagagtgaggaagctcctggtgcttgggacgaggtcagcgctgtcggcgcgctgctccagcgcccaccacaccctggtgcgggccgacgggcctgggccctggtgggagctccggcctccggtcaaggcctggccgggagcgccacgaattctcgcgtcgtctcgcgagagtccaagttaaagaacatggcgacgtctaatctgttaaagaataaaggttctcttcagtttgaagacaaatgggattttatgcgcccgattgttttgaagcttttacgccaggaatctgttacaaaacagcagtggtttgatctgttttcggatgtgcatgcagtctgtctttgggatgataaaggcccagcaaaaattcatcaggctttaaaagaagatattcttgagtttattaagcaggcacaggcacgagtactgagccatcaagatgatacggctttgctaaaagcatatattgttgaatggcgaaagttctttacacaatgtgatattttaccaaaacctttttgtcaactagagattactttaatgggtaaacagggcagcaataaaaaatcaaatgtggaagacagtattgttcgaaagcttatgcttgatacatggaatgagtcaatcttttcaaacataaaaaacagactccaagatagtgcaatgaagctggtacatgctgagagattgggagaagcttttgattctcagctggttattggagtaagagaatcctatgttaacctttgttctaatcctgaggataaacttcaaatttatagggacaattttgagaaggcatacttggattcaacagagagattttatagaacacaagcaccctcgtatttacaacaaaatggtgtacagaattatatgaaatatgcagatgctaaattaaaagaagaagaaaaacgagcactacgttatttagaaacaagacgagaatgtaactccgttgaagcactcatggaatgctgtgtaaatgccctggtgacatcatttaaagagactatcttagctgagtgccaaggcatgatcaagagaaatgaaactgaaaaattacatttaatgttttcattgatggacaaagttcctaatggtatagagccaatgttgaaagacttggaggaacatatcattagtgctggcctggcagatatggtagcagctgctgaaactattactactgactctgagaaatacgttgagcagttacttacactatttaatagatttagtaaactcgtcaaagaagcttttcaagatgatccacgatttcttactgcaagagataaggcgtataaagcagttgttaatgatgctaccatatttaaacttgaattacctttgaagcagaagggggtgggattaaaaactcagcctgaatcaaaatgccctgagctgcttgccaattactgtgacatgttgctaagaaaaacaccattaagcaaaaaactaacctctgaagagattgaagcaaagcttaaagaagtgctcttggtacttaagtatgtacagaacaaagatgtttttatgaggtatcataaagctcatttgacacgacgtcttatattagacatctctgccgatagtgaaattgaagaaaacatggtagagtggctaagagaagttggtatgccagcggattatgtaaacaagcttgctagaatgtttcaggacataaaagtatctgaagatttgaaccaagcttttaaggaaatgcacaaaaataataaattggcattaccagctgattcagttaatataaaaattctgaatgctggcgcctggtcaagaagttctgagaaagtctttgtctcacttcctactgaactggaggacttgataccggaagtagaagaattctacaaaaaaaatcatagtggtagaaaattacattggcatcatctcatgtcaaatggaattataacatttaagaatgaagttggtcaatatgatttggaggtaaccacgtttcagctcgctgtattgtttgcatggaaccaaagacccagagagaaaatcagctttgaaaatcttaagcttgcaactgaactccctgatgctgaacttaggaggactttatggtctttagtagctttcccaaaactcaaacggcaagttttgttgtatgaacctcaagtcaactcacccaaagactttacagaaggtaccctcttctcagtgaaccaggagttcagtttaataaaaaatgcaaaggttcagaaaaggggtaaaatcaacttgattggacgtttgcagctcactacagaaaggatgagagaagaagagaatgaaggaatagttcaactacgaatactaagaacccaggaagctatcatacaaataatgaaaatgagaaagaaaattagtaatgctcagctgcagactgaattagtagaaattttgaaaaacatgttcttgccacaaaagaaaatgataaaagagcaaatagagtggctaatagagcacaaatacatcagaagagatgaatctgatatcaacactttcatatatatggcataattttgaatatcatggacaatatttagaacccaaattttggagtgcttgggcagaaagttgtaaagtttgtgctggagaaaggtttatttggactttgattacataaatattaaaatctctgccttaccttaca

SEQ ID NO: 285980 - DNA, 5169 bp, Homo sapiens
tcatcatttttttgcagtcaacacatatttactgggcgcattctatgcacgagttattgaagacagctgttgtaagcatttcaggacaatgcacctcccttaacaccgagtccgggatttggggcggggtgccggaaaacgccaggtcccgccagcagagggcacggtcccggcctcgctgcagcctcgggacccaccgaggcttccaggctcccacgctcgctcccgagcgcgtccccgccctcgcgtcacgtgacgtggccgcggaacctgagctgcggggcctaagccgagctaaattcgttgcaggtggccgcggcgggtgcaaccacaaaggctaatccgaaggagtcggggaggctcgtggagtcgatgcttcctcttccaagtcaggtcggctcccgttaccttctcagcattcgccgttccggtcttcctgagcgcgtgcatgaggtctttcgcgtggggaagctccggtgaccatgtaggggacaagagtgaggaagctcctggtgcttgggacgaggtcagcgctgtcggcgcgctgctccagcgcccaccacaccctggtgcgggccgacgggcctgggccctggtgggagctccggcctccggtcaaggcctggccgggagcgccacgaattctcgcgtcgtctcgcgagagtccaagttaaagaacatggcgacgtctaatctgttaaagaataaaggttctcttcagtttgaagacaaatgggattttatgcgcccgattgttttgaagcttttacgccaggaatctgttacaaaacagcagtggtttgatctgttttcggatgtgcatgcagtctgtctttgggatgataaaggcccagcaaaaattcatcaggctttaaaagaagatattcttgagtttattaagcaggcacaggcacttatgcttgatacatggaatgagtcaatcttttcaaacataaaaaacagactccaagatagtgcaatgaagctggtacatgctgagagattgggagaagcttttgattctcagctggttattggagtaagagaatcctatgttaacctttgttctaatcctgaggataaacttcaaatttatagggacaattttgagaaggcatacttggattcaacagagagattttatagaacacaagcaccctcgtatttacaacaaaatggtgtacagaattatatgaaatatgcagatgctaaattaaaagaagaagaaaaacgagcactacgttatttagaaacaagacgagaatgtaactccgttgaagcactcatggaatgctgtgtaaatgccctggtgacatcatttaaagagactatcttagctgagtgccaaggcatgatcaagagaaatgaaactgaaaaattacatttaatgttttcattgatggacaaagttcctaatggtatagagccaatgttgaaagacttggaggaacatatcattagtgctggcctggcagatatggtagcagctgctgaaactattactactgactctgagaaatacgttgagcagttacttacactatttaatagatttagtaaactcgtcaaagaagcttttcaagatgatccacgatttcttactgcaagagataaggcgtataaagcagttgttaatgatgctaccatatttaaacttgaattacctttgaagcagaagggggtgggattaaaaactcagcctgaatcaaaatgccctgagctgcttgccaattactgtgacatgttgctaagaaaaacaccattaagcaaaaaactaacctctgaagagattgaagcaaagcttaaagaagtgctcttggtacttaagtatgtacagaacaaagatgtttttatgaggtatcataaagctcatttgacacgacgtcttatattagacatctctgccgatagtgaaattgaagaaaacatggtagagtggctaagagaagttggtatgccagcggattatgtaaacaagcttgctagaatgtttcaggacataaaagtatctgaagatttgaaccaagcttttaaggaaatgcacaaaaataataaattggcattaccagctgattcagttaatataaaaattctgaatgctggcgcctggtcaagaagttctgagaaagtctttgtctcacttcctactgaactggaggacttgataccggaagtagaagaattctacaaaaaaaatcatagtggtagaaaattacattggcatcatctcatgtcaaatggaattataacatttaagaatgaagttggtcaatatgatttggaggtaaccacgtttcagctcgctgtattgtttgcatggaaccaaagacccagagagaaaatcagctttgaaaatcttaagcttgcaactgaactccctgatgctgaacttaggaggactttatggtctttagtagctttcccaaaactcaaacggcaagttttgttgtatgaacctcaagtcaactcacccaaagactttacagaaggtaccctcttctcagtgaaccaggagttcagtttaataaaaaatgcaaaggttcagaaaaggggtaaaatcaacttgattggacgtttgcagctcactacagaaaggatgagagaagaagagaatgaaggaatagttcaactacgaatactaagaacccaggaagctatcatacaaataatgaaaatgagaaagaaaattagtaatgctcagctgcagactgaattagtagaaattttgaaaaacatgttcttgccacaaaagaaaatgataaaagagcaaatagagtggctaatagagcacaaatacatcagaagagatgaatctgatatcaacactttcatatatatggcataattttgaatatcatggacaatatttagaacccaaattttggagtgcttgggcagaaagttgtaaagtttgtgctggagaaaggtttatttggactttgattacataaatattaaaatctctgccttaccttacaaaaacaactatattttgccaatcacattagttagcatgatggcattcccttcatgttgcacactctttgacagcatgctgttttgtggagaaacttgcattcatgaagagcccattatcaacttttaaaagtgaatttgatttgtacccaccaggagaaatacagttgggaagggtgagggtggggttcttgttgcttttttctcttttttcctctcttaaaaaatgtacttgcacaaggaaggatcttcagatattcatgcactgaaaaatgctgttatcttttgtttttaaaaaatgcaattaaaactagaaatagcactcttggtttcttttgatgaaaagagtgagctggtcaatgcaacattgggaaacggcagatgtagataattcagcattggcgtatttgcttgtcccaatacaagaatgccaaaggaggaaacaggaaaaattgccgtccattttaaaaatttaggtttgttgttttaaaccataattgttctcagaacttttttggaacttctaattttgggtcatttaatttaagaatgagagtcatgatgttttgatttatgaaggtgaatttaatgcaaaagtgggtaacactacattcatagcaaagttttttattaaattttataaatttttaatagccaattatgtcctaattgtattttggggaatgaacagcagcaaatactgtaaatgtacagttttctttttttttttttttggttatgtatacaaaagttttaactactttttggtgtttatgaaaatcatttagttgacaaggtgcctatgccattgttaaattttctttaagtaatttaacaacagatttgctaatttaaaaaaaaatgaaaaaaaaaatcttaccagcagtttgtaaaggtctggaatcacagttggcatcctttattcaggtctcttctctccaacgtacacttaaaattggtgccgagcagggatataacctgcagttaagtgaaaagaaaatccagcctccccctccaaaaaaaaaaaaaaaaatttaatttttaaaaattagtggtatggcaataagacacttcagaggctatcttaacctctgaatacccatcttctagtttaaagacagagacatcccatctggaaaatgttaacttgtgttgccatctcgttgccggagtaagtagacataagacagagtttaagaagtaaaaatatagaaaaattttgatggtcacaatgagataaatattagaatattactattccaatgattaaatgaggatcttgaaataaattctgaagtcttccaatttttacatttattggaggggtccctgagttctgtcaacttttttatttaagtctcttgctcttattttgtgcataaatgttaaaccttccaaaaatgaaatgttagctttctttcttttactttttattaaatttaatagaaaatatgacctgagtagttaaaaagtattttgcattatttgcagtaagatgtctctagcactgctcaaagggcaaattttaaaacttcagtctgggtgaaagatttgctagttttacagaaagatttgctatcttaaactcaagctggtttttctgttctcatgtaagtgactgggatgctgtcttatgaattcttccaaggtcatgtttgtgaaataaacattacatgagagctttcctgtcatctacactatatgttgtctggagtgttgaacaaatttattttagtttctaagttgtaatctatcctcatatggtctatacgattttgaatgtgtgccactacatactgagatgataatgctgtacaattttaagtggtagcagtttctgtatgcagtaggctgaaatattttgatgaactgcttaatttttggattttattttttaagttgtataatttattttcttgcaaaataaaaatgtaatataaaagcttttacctatccagaaaatgttgatgttctactataaaatagttacaaagagtttaattaaaatttttatagtaggtatatttttaaatttgaaggtaaattaatctcagccagccttaggaatcagaaatatgaaaagtaacccacttatttatattagacttcaaattctaattcaaaatgagagcagtcaggaatgtagcttttccactgatgatagcatgtggctatatgcctggaagaggtaat

SEQ ID NO: 285981 - DNA, 3811 bp, Homo sapiens
tcatcatttttttgcagtcaacacatatttactgggcgcattctatgcacgagttattgaagacagctgttgtaagcatttcaggacaatgcacctcccttaacaccgagtccgggatttggggcggggtgccggaaaacgccaggtcccgccagcagagggcacggtcccggcctcgctgcagcctcgggacccaccgaggcttccaggctcccacgctcgctcccgagcgcgtccccgccctcgcgtcacgtgacgtggccgcggaacctgagctgcggggcctaagccgagctaaattcgttgcaggtggccgcggcgggtgcaaccacaaaggctaatccgaaggagtcggggaggctcgtggagtcgatgcttcctcttccaagtcaggtcggctcccgttaccttctcagcattcgccgttccggtcttcctgagcgcgtgcatgaggtctttcgcgtggggaagctccggtgaccatgtaggggacaagagtgaggaagctcctggtgcttgggacgaggtcagcgctgtcggcgcgctgctccagcgcccaccacaccctggtgcgggccgacgggcctgggccctggtgggagctccggcctccggtcaaggcctggccgggagcgccacgaattctcgcgtcgtctcgcgagagtccaagttaaagaacatggcgacgtctaatctgttaaagaataaaggttctcttcagtttgaagacaaatgggattttatgcgcccgattgttttgaagcttttacgccaggaatctgttacaaaacagcagtggtttgatctgttttcggatgtgcatgcagtctgtctttgggatgataaaggcccagcaaaaattcatcaggctttaaaagaagatattcttgagtttattaagcaggcacaggcacgagtactgagccatcaagatgatacggctttgctaaaagcatatattgttgaatggcgaaagttctttacacaatgtgatattttaccaaaacctttttgtcaactagagattactttaatgggtaaacagggcagcaataaaaaatcaaatgtggaagacagtattgttcgaaagcttatgcttgatacatggaatgagtcaatcttttcaaacataaaaaacagactccaagatagtgcaatgaagctggtacatgctgagagattgggagaagcttttgattctcagctggttattggagtaagagaatcctatgttaacctttgttctaatcctgaggataaacttcaaatttatagggacaattttgagaaggcatacttggattcaacagagagattttatagaacacaagcaccctcgtatttacaacaaaatggtgtacagaattatatgaaatatgcagatgctaaattaaaagaagaagaaaaacgagcactacgttatttagaaacaagacgagaatgtaactccgttgaagcactcatggaatgctgtgtaaatgccctggtgacatcatttaaagagactatcttagctgagtgccaaggcatgatcaagagaaatgaaactgaaaaattacatttaatgttttcattgatggacaaagttcctaatggtatagagccaatgttgaaagacttggaggaacatatcattagtgctggcctggcagatatggtagcagctgctgaaactattactactgactctgagaaatacgttgagcagttacttacactatttaatagatttagtaaactcgtcaaagaagcttttcaagatgatccacgatttcttactgcaagagataaggcgtataaagcagttgttaatgatgctaccatatttaaacttgaattacctttgaagcagaagggggtgggattaaaaactcagcctgaatcaaaatgccctgagctgcttgccaattactgtgacatgttgctaagaaaaacaccattaagcaaaaaactaacctctgaagagattgaagcaaagcttaaagaagtgctcttggtacttaagtatgtacagaacaaagatgtttttatgaggtatcataaagctcatttgacacgacgtcttatattagacatctctgccgatagtgaaattgaagaaaacatggtagagtggctaagagaagttggtatgccagcggattatgtaaacaagcttgctagaatgtttcaggacataaaagtatctgaagatttgaaccaagcttttaaggaaatgcacaaaaataataaattggcattaccagctgattcagttaatataaaaattctgaatgctggcgcctggtcaagaagttctgagaaagtctttgtctcacttcctactgaactggaggacttgataccggaagtagaagaattctacaaaaaaaatcatagtggtagaaaattacattggcatcatctcatgtcaaatggaattataacatttaagaatgaagttggtcaatatgatttggaggtaaccacgtttcagctcgctgtattgtttgcatggaaccaaagacccagagagaaaatcagctttgaaaatcttaagcttgcaactgaactccctgatgctgaacttaggaggactttatggtctttagtagctttcccaaaactcaaacggcaagttttgttgtatgaacctcaagtcaactcacccaaagactttacagaaggtaccctcttctcagtgaaccaggagttcagtttaataaaaaatgcaaaggttcagaaaaggggtaaaatcaacttgattggacgtttgcagctcactacagaaaggatgagagaagaagagaatgaaggaatagttcaactacgaatactaagaacccaggaagctatcatacaaataatgaaaatgagaaagaaaattagtaatgctcagctgcagactgaattagtagaaattttgaaaaacatgttcttgccacaaaagaaaatgataaaagagcaaatagagtggctaatagagcacaaatacatcagaagagatgaatctgatatcaacactttcatatatatggcataattttgaatatcatggacaatatttagaacccaaattttggagtgcttgggcagaaagttgtaaagtttgtgctggagaaaggtttatttggactttgattacataaatattaaaatctctgccttaccttacaaaaacaactatattttgccaatcacattagttagcatgatggcattcccttcatgttgcacactctttgacagcatgctgttttgtggagaaacttgcattcatgaagagcccattatcaacttttaaaagtgaatttgatttgtacccaccaggagaaatacagttgggaagggtgagggtggggttcttgttgcttttttctcttttttcctctcttaaaaaatgtacttgcacaaggaaggatcttcagatattcatgcactgaaaaatgctgttatcttttgtttttaaaaaatgcaattaaaactagaaatagcactcttggtttcttttgatgaaaagagtgagctggtcaatgcaacattgggaaacggcagatgtaggtgagaagttaagtatttaatagtatcaaattgttcaaacattgctcagtataataactggattttaatggtgacctaaaaatggtattaaatattttcaactttcaaatgttggttttctttaagcaggagactgctattttagttgttgttaaatgatgaggagtttttttttttttaaatatggctggaaagcttgttttgaaaaatgaagcttatattaattgttgcttcaatagtttaaaaaatttatggagataggtaggtcatt

SEQ ID NO: 285982 - DNA, 1890 bp, Homo sapiens
ctaattaggtgactgttcataatgggtatatttggaatttagaagaaataattttgtagtaattgtggcccttatgtttaacagataattcagcattggcgtatttgcttgtcccaatacaagaatgccaaaggaggaaacaggaaaaattgccgtccattttaaaaatttaggtttgttgttttaaaccataattgttctcagaacttttttggaacttctaattttgggtcatttaatttaagaatgagagtcatgatgttttgatttatgaaggtgaatttaatgcaaaagtgggtaacactacattcatagcaaagttttttattaaattttataaatttttaatagccaattatgtcctaattgtattttggggaatgaacagcagcaaatactgtaaatgtacagttttctttttttttttttttggttatgtatacaaaagttttaactactttttggtgtttatgaaaatcatttagttgacaaggtgcctatgccattgttaaattttctttaagtaatttaacaacagatttgctaatttaaaaaaaaatgaaaaaaaaaatcttaccagcagtttgtaaaggtctggaatcacagttggcatcctttattcaggtctcttctctccaacgtacacttaaaattggtgccgagcagggatataacctgcagttaagtgaaaagaaaatccagcctccccctccaaaaaaaaaaaaaaaaatttaatttttaaaaattagtggtatggcaataagacacttcagaggctatcttaacctctgaatacccatcttctagtttaaagacagagacatcccatctggaaaatgttaacttgtgttgccatctcgttgccggagtaagtagacataagacagagtttaagaagtaaaaatatagaaaaattttgatggtcacaatgagataaatattagaatattactattccaatgattaaatgaggatcttgaaataaattctgaagtcttccaatttttacatttattggaggggtccctgagttctgtcaacttttttatttaagtctcttgctcttattttgtgcataaatgttaaaccttccaaaaatgaaatgttagctttctttcttttactttttattaaatttaatagaaaatatgacctgagtagttaaaaagtattttgcattatttgcagtaagatgtctctagcactgctcaaagggcaaattttaaaacttcagtctgggtgaaagatttgctagttttacagaaagatttgctatcttaaactcaagctggtttttctgttctcatgtaagtgactgggatgctgtcttatgaattcttccaaggtcatgtttgtgaaataaacattacatgagagctttcctgtcatctacactatatgttgtctggagtgttgaacaaatttattttagtttctaagttgtaatctatcctcatatggtctatacgattttgaatgtgtgccactacatactgagatgataatgctgtacaattttaagtggtagcagtttctgtatgcagtaggctgaaatattttgatgaactgcttaatttttggattttattttttaagttgtataatttattttcttgcaaaataaaaatgtaatataaaagcttttacctatccagaaaatgttgatgttctactataaaatagttacaaagagtttaattaaaatttttatagtaggtatatttttaaatttgaaggtaaattaatctcagccagccttaggaatcagaaatatgaaaagtaacccacttatttatattagacttcaaattctaattcaaaatgagagcagtcaggaatgtagcttttccactgatgatagcatgtggctatatgcctggaagaggtaat

SEQ ID NO: 285983 - DNA, 1753 bp, Homo sapiens
  misc_feature (8)..(8): n is a, c, g, or t
  misc_feature (10)..(10): n is a, c, g, or t
  misc_feature (20)..(20): n is a, c, g, or t
ggcggccngnatgggacatncattttaaaaatttaggtttgttgttttaaaccataattgttctcagaacttttttggaacttctaattttgggtcatttaatttaagaatgagagtcatgatgttttgatttatgaaggtgaatttaatgcaaaagtgggtaacactacattcatagcaaagttttttattaaattttataaatttttaatagccaattatgtcctaattgtattttggggaatgaacagcagcaaatactgtaaatgtacagttttctttttttttttttttggttatgtatacaaaagttttaactactttttggtgtttatgaaaatcatttagttgacaaggtgcctatgccattgttaaattttctttaagtaatttaacaacagatttgctaatttaaaaaaaaatgaaaaaaaaaatcttaccagcagtttgtaaaggtctggaatcacagttggcatcctttattcaggtctcttctctccaacgtacacttaaaattggtgccgagcagggatataacctgcagttaagtgaaaagaaaatccagcctccccctccaaaaaaaaaaaaaaaaatttaatttttaaaaattagtggtatggcaataagacacttcagaggctatcttaacctctgaatacccatcttctagtttaaagacagagacatcccatctggaaaatgttaacttgtgttgccatctcgttgccggagtaagtagacataagacagagtttaagaagtaaaaatatagaaaaattttgatggtcacaatgagataaatattagaatattactattccaatgattaaatgaggatcttgaaataaattctgaagtcttccaatttttacatttattggaggggtccctgagttctgtcaacttttttatttaagtctcttgctcttattttgtgcataaatgttaaaccttccaaaaatgaaatgttagctttctttcttttactttttattaaatttaatagaaaatatgacctgagtagttaaaaagtattttgcattatttgcagtaagatgtctctagcactgctcaaagggcaaattttaaaacttcagtctgggtgaaagatttgctagttttacagaaagatttgctatcttaaactcaagctggtttttctgttctcatgtaagtgactgggatgctgtcttatgaattcttccaaggtcatgtttgtgaaataaacattacatgagagctttcctgtcatctacactatatgttgtctggagtgttgaacaaatttattttagtttctaagttgtaatctatcctcatatggtctatacgattttgaatgtgtgccactacatactgagatgataatgctgtacaattttaagtggtagcagtttctgtatgcagtaggctgaaatattttgatgaactgcttaatttttggattttattttttaagttgtataatttattttcttgcaaaataaaaatgtaatataaaagcttttacctatccagaaaatgttgatgttctactataaaatagttacaaagagtttaattaaaatttttatagtaggtatatttttaaatttgaaggtaaattaatctcagccagccttaggaatcagaaatatgaaaagtaacccacttatttatattagacttcaaattctaattcaaaatgagagcagtcaggaatgtagcttttccactgatgatagcatgtggctatatgcctggaagaggtaat

SEQ ID NO: 285984 - DNA, 2056 bp, Homo sapiens
tcatcatttttttgcagtcaacacatatttactgggcgcattctatgcacgagttattgaagacagctgttgtaagcatttcaggacaatgcacctcccttaacaccgagtccgggatttggggcggggtgccggaaaacgccaggtcccgccagcagagggcacggtcccggcctcgctgcagcctcgggacccaccgaggcttccaggctcccacgctcgctcccgagcgcgtccccgccctcgcgtcacgtgacgtggccgcggaacctgagctgcggggcctaagccgagctaaattcgttgcaggtggccgcggcgggtgcaaccacaaaggctaatccgaaggagtcggggaggctcgtggagtcgatgcttcctcttccaagtcaggtcggctcccgttaccttctcagcattcgccgttccggtcttcctgagcgcgtgcatgaggtctttcgcgtggggaagctccggtgaccatgtaggggacaagagtgaggaagctcctggtgcttgggacgaggtcagcgctgtcggcgcgctgctccagcgcccaccacaccctggtgcgggccgacgggcctgggccctggtgggagctccggcctccggtcaaggcctggccgggagcgccacgaattctcgcgtcgtctcgcgagagtccaagttaaagaacatggcgacgtctaatctgttaaagaataaaggttctcttcagtttgaagacaaatgggattttatgcgcccgattgttttgaagcttttacgccaggaatctgttacaaaacagcagtggtttgatctgttttcggatgtgcatgcagtctgtctttgggatgataaaggcccagcaaaaattcatcaggctttaaaagaagatattcttgagtttattaagcaggcacaggcacgagtactgagccatcaagatgatacggctttgctaaaagcatatattgttgaatggcgaaagttctttacacaatgtgatattttaccaaaacctttttgtcaactagagattactttaatgggtaaacagggcagcaataaaaaatcaaatgtggaagacagtattgttcgaaagcttatgcttgatacatggaatgagtcaatcttttcaaacataaaaaacagactccaagatagtgcaatgaagctggtacatgctgagagattgggagaagcttttgattctcagctggttattggagtaagagaatcctatgttaacctttgttctaatcctgaggataaacttcaaatttatagggacaattttgagaaggcatacttggattcaacagagagattttatagaacacaagcaccctcgtatttacaacaaaatggtgtacagaattatatgaaatatgcagatgctaaattaaaagaagaagaaaaacgagcactacgttatttagaaacaagacgagaatgtaactccgttgaagcactcatggaatgctgtgtaaatgccctggtgacatcatttaaagagactatcttagctgagtgccaaggcatgatcaagagaaatgaaactgaaaaattacatttaatgttttcattgatggacaaagttcctaatggtatagagccaatgttgaaagacttggaggaacatatcattagtgctggcctggcagatatggtagcagctgctgaaactattactactgactctgagaaatacgttgagcagttacttacactatttaatagatttagtaaactcgtcaaagaagcttttcaagatgatccacgatttcttactgcaagagataagacccagctcaaagaatacttcccctggagcttccttgatgtcctgcctccctccacagctcatcaccagcagagttgattcctccatcctccgtcctttcatgggactccttcgggagttatgttatacttatccttgtttcccagggaagcatttgtattgcataccatctttttccatcctcactagtataggataatgataataaaacaccatactgtccttagcattgtatcttttttagtgtaataaacctataacaag

SEQ ID NO: 285985 - DNA, 390 bp, Homo sapiens
ggtcatttgctgcacccatcaacccgtcatctacatgaggtgtttctcctaatgcttatccctcccctatccccccaccccaataagcagattctcttttatggggcatgagaaaacaaaagatgtttttatttgttaagtaaaagatactagtctcaacattaatcccctagtgattattattcatttgggtagatgttggatagaggatgaatatgcataaaaagtcatttttcagtttgttgtacttaaaataatttcgtatattaatgcgcttttatttttattttttcttttaggaagctatcatacaaataatgaaaatgagaaagaaaattagtaatgctcagctgcagactgaattagtagaaattttgaaaaacatgttct

SEQ ID NO: 285986 - DNA, 547 bp, Homo sapiens
ctcttggtacttaagtatgtacagaacaaagatgtttttatgaggtatcataaagctcatttgacacgacgtcttatattagacatctctgccgatagtgaaattgaagaaaacatggtagagtggctaagagtaagtaaatttttttaaatatttggttttctaatacattacatcatttatatgtgtgcttaagtaatacattttggagatattgttaatgtcaaagaagtaggaaacattttataagaatatagcgtcagttaggccgggcgcactggctcatacctgtaatcccagcactttgggaggccgaggcaggtggatcacctgaagtcaggagttcaagactagcctgaccaacatggcaaaaccgcgtctctactaaaaatacaaaaattagctggatgtgctggtgcactccggtaattccagctgcttgggaggctgaggcaagagaatcacttgaacccaggaggtggaggttgcagtgagccaagatcgtgccattgcactccagcctgggtaacagagtgggactccattt

SEQ ID NO: 285987 - DNA, 490 bp, Homo sapiens
tgttatttttcatcagtggagaacaactatattcgttttgtcttggctgtaagcatttgttaaacattagatagccttgtgaattagaatttagttagaaagttgcttttttctcatttttccaagaatgtttttctgtttttgaatattactgatctattgaattcctattcatccttccattaagacccagctcaaagaatacttcccctggagcttccttgatgtcctgcctccctccacagctcatcaccagcagagttgattcctccatcctccgtcctttcatgggactccttcgggagttatgttatacttatccttgtttcccagggaagcatttgtattgcataccatctttttccatcctcactagtataggataatgataataaaacaccatactgtccttagcattgtatcttttttagtgtaataaacctataacaagaaattgctgttagttttttctcttctttgactacctttc

SEQ ID NO: 285988 - DNA, 519 bp, Homo sapiens
ttggaatttagaagaaataattttgtagtaattgtggcccttatgtttaacagataattcagcattggcgtatttgcttgtcccaatacaagaatgccaaaggaggaaacaggaaaaattgccgtccattttaaaaatttaggtttgttgttttaaaccataattgttctcagaacttttttggaacttctaattttgggtcatttaatttaagaatgagagtcatgatgttttgatttatgaaggtgaatttaatgcaaaagtgggtaacactacattcatagcaaagttttttattaaattttataaatttttaatagccaattatgtcctaattgtattttggggaatgaacagcagcaaatactgtaaatgtacagttttctttttttttttttttggttatgtatacaaaagttttaactactttttggtgtttatgaaaatcatttagttgacaaggtgcctatgccattgttaaattttctttaagtaatttaacaacagatttgctaattt

SEQ ID NO: 285989 - DNA, 508 bp, Homo sapiens
agagagaacgacaggtttgccttctactcattcttaaaactaaacacttcaaactaaaaatgcagaactaacccactgacccctgttgctaatggtgctatgtggcccttcctgccgacaagctcgcagcccctgatgggggctgtgtagcccttcagcctgagtaggggttgtgagcccagccccgtcccggaatgccacggtcatctggtgctctaccactgggcagagggagggcaggactgcctttcggggtcctgaacccaccttccgggttcaagatattcttgtgcatcagcctcccaagtagctgggattacaggcacctgccaccacgcctgactaatttttgtatttttagtagagacggggtttcaccatgttagccaggctgtcctcaaaggtgatctgcccgccttggcctcacaaagtgctgggattacaggcgtgagccactgcgcccggccctcgcttccaaagatttttcattgttgttcccagaagaggc

SEQ ID NO: 285990 - DNA, 563 bp, Homo sapiens
tcctggctggtgaacaggcctgaaggcagaatccctacacaatgaagaagtctgtaaacgatgttttcctgtgtctaataaactctagtgacctttatccattgagataaggctcaagagaacaatgtgagatggcagagtggtctcagagtgggattttcagaactctaaatattcttctaagttaactttcttacttttcttccattaaagaaggaaactggtcttcagtttgattttttcactctcaggtctccaacatatcccattgaccagagtaagtataattttctttttagatttcagcattcaattttggaaccatcagcaaaagatctcagattctgagaaggaacaaatgatctggtcctggcctggagaattgggcccctgggagcatggggtcttcctcgcagttgctctatgggaatgaaaaagccactgatgcttcattgaaggctgggccccagactggcaccttggtttaatgactacagatcctcctgcttgatgaatgtgtgcatctcaaaggccagaggcagacgtgcatctaaagacaggtg

SEQ ID NO: 285991 - DNA, 1058 bp, Homo sapiens
gacatgtttttccatttgtttgtgtcttctctgatttctttgagcagtgttttgtaattcttctagagatctcctagagatctttcacctccctggttagctgtattcctaggtatcttattttttctgtgtgtagcaattatgaatgggattgtgttcttcatttgactctctgcttgacttgatgtataggactgctagtaatttttgcacattgattttgtatgctaagactttgctaaagtttatcagcagaagaagctttggggccaagactatggggctttctagatatagaaacatgtcatctgtaaacagagacagtttgacttcctgtctattcctctcttccctcctctgtttggatgcccttccagttttgcacattcagtgtaatgttggctgtgggtttgtcatggctagctctcatcattttggcacttctgactagaagggcaagaggggccagtgttgttgttacctgaaaggtaagtgcagcccacaaaaatgcagtgaagaagaagatgtattatgcatatgtttaagttaatacaattgagatatatttagcagacagaatcaatagagttgatgagtgactgactggatgtgtggggagtttatatcactcccaggtttttgacttgggcaaccgggcactcatgaaggaaaaaggggatccagggagaggaacttttctgaggactggggtagggctgaacagctgcattcgaggctggtggagggtgggctgggcatgggatgcacaaatggaaattccactgggtctgcagctcacacataggcatgaccagcatagagatagagaggccccagtgctgctgagtaactgtgattccccaggtgatggcatcagctgagaagggaaggaagcccatgagaggacactgaagaaggagtgagcagacaataagaagcccacagaagacagagaaggaacaactagagggagaagccaaggcaggcgtgtgtggtaacacataggaactgagggagaggacatttcaagatggtggccctgaggattgcttggctgg

SEQ ID NO: 285992 - DNA, 521 bp, Homo sapiens
ccttcttccctccattcttctgtttttaatggggatgtttaaaatccaatctcacattaattttttcttaagtgtaaataatgggaaaacttcacttcgagaggggactcctcagtagacctccataatttcctggcttttactgccagttagtcatcaggaatagccacggctaagagagtaccaactgggcaagccagtgaattataccagtgcatctcagatttactgatttgtttaacttttgttttttgttctttttttttttcagagatagaatctcactatgttgaccaggctggtcttgaactcttggcacccaagcgatccttttgcctggaatcccaaagtgtcagatttactgaagaatatttcattgtaattactttttatactttataggtcaagagctctgttttaaatacaaaatttattgaatatactttttcaaacaaagtttcatgttctaatcattgtctgatttcagcattaaatgaaacacagtaaagaaagttgggctg

SEQ ID NO: 285993 - DNA, 499 bp, Homo sapiens
tgtttctctcctgtcactttgctcctatttctttcatgtgaaagaatgttcattttctttgaaaatgagctcatttcctcattttctttccatatttcagcaggaacaaagatcaccacaactggctcgccttcaactatgttagatggcaacttgccttcagtatggtgaaacacatcagttaagaccggggttgtgcatggcaggactttctacaaggacacccagtctccttaataaacatgagatgctctctttccagaatttctcttgcctgacacagcataggaagatgctgaacggccacacagtgatccattggtcagtggtgacataaggaggtcagaggggaggagtgaggagaagtagggaagactaggtggttgtaggcctccttcatctgttcattggctgtggcattaggccagctactctttgcacttctgtaaagtgagacggtcgatcttgtctgcctctctagaggatggttgcaggtgtc

SEQ ID NO: 285994 - DNA, 1986 bp, Homo sapiens
gacatgtttttccatttgtttgtgtcttctctgatttctttgagcagtgttttgtaattcttctagagatctcctagagatctttcacctccctggttagctgtattcctaggtatcttattttttctgtgtgtagcaattatgaatgggattgtgttcttcatttgactctctgcttgacttgatgtataggactgctagtaatttttgcacattgattttgtatgctaagactttgctaaagtttatcagcagaagaagctttggggccaagactatggggctttctagatatagaaacatgtcatctgtaaacagagacagtttgacttcctgtctattcctctcttccctcctctgtttggatgcccttccagttttgcacattcagtgtaatgttggctgtgggtttgtcatggctagctctcatcattttggcacttctgactagaagggcaagaggggccagtgttgttgttacctgaaaggtaagtgcagcccacaaaaatgcagtgaagaagaagatgtattatgcatatgtttaagttaatacaattgagatatatttagcagacagaatcaatagagttgatgagtgactgactggatgtgtggggagtttatatcactcccaggtttttgacttgggcaaccgggcactcatgaaggaaaaaggggatccagggagaggaacttttctgaggactggggtagggctgaacagctgcattcgaggctggtggagggtgggctgggcatgggatgcacaaatggaaattccactgggtctgcagctcacacataggcatgaccagcatagagatagagaggccccagtgctgctgagtaactgtgattccccaggtgatggcatcagctgagaagggaaggaagcccatgagaggacactgaagaaggagtgagcagacaataagaagcccacagaagacagagaaggaacaactagagggagaagccaaggcaggcgtgtgtggtaacacataggaactgagggagaggacatttcaagatggtggggatgccatacaacaggactatgtgatggtttttggctgtgtccataggaagtcacaacaggcaagggaaagaaaccagaacccagtcatggagctaagaagtgagtcagagagtagaggggtagggacagtgaggtaagtcctctttctaaggaagtttggctgaaggatagactagctggacacatgctggctgtgtggggtagagggaggaatgatggagggtaggagagccttgagcctgcgagaagagtctcttagaatagagaagctgaagttaaagttgtggaagagagtggggataactgagtgacagataatcaggagaagaaaaggagatccagactcatgacagagagatgacctttgccaagagcacagccgtctttcacggtcacagagaggtaggacaaaatgagtggtgttcaagaattggtttgtagcacaatatttcaactatgtcctttaaaaagtttctccacagacactacccaaagcagtgcttcactacagtggcagacagacctgaaaattttcatctgaagcagcagagtgaactgcagaggcaggtcaccaaccagtgtggaggctaaaagcgggcctctttggggattccaggtggaagtgttggacatctgtagtattcctggtctcgaatcatcctgatattcttcattttgttattcacattggactaggagatagaatctcactatgttgaccaggctggtcttgaactcttggcacccaagcgatccttttgcctggaatcccaaagtgtcagatttactgaagaatatttcattgtaattactttttatactttataggtcaagagctctgttttaaatacaaaatttattgaatatactttttcaaacaaagtttcatgttctaatcattgtctgatttcagcattaaatgaaacacagtaaagaaagttgggctg

SEQ ID NO: 285995 - DNA, 2207 bp, Homo sapiens
gacatgtttttccatttgtttgtgtcttctctgatttctttgagcagtgttttgtaattcttctagagatctcctagagatctttcacctccctggttagctgtattcctaggtatcttattttttctgtgtgtagcaattatgaatgggattgtgttcttcatttgactctctgcttgacttgatgtataggactgctagtaatttttgcacattgattttgtatgctaagactttgctaaagtttatcagcagaagaagctttggggccaagactatggggctttctagatatagaaacatgtcatctgtaaacagagacagtttgacttcctgtctattcctctcttccctcctctgtttggatgcccttccagttttgcacattcagtgtaatgttggctgtgggtttgtcatggctagctctcatcattttggcacttctgactagaagggcaagaggggccagtgttgttgttacctgaaaggtaagtgcagcccacaaaaatgcagtgaagaagaagatgtattatgcatatgtttaagttaatacaattgagatatatttagcagacagaatcaatagagttgatgagtgactgactggatgtgtggggagtttatatcactcccaggtttttgacttgggcaaccgggcactcatgaaggaaaaaggggatccagggagaggaacttttctgaggactggggtagggctgaacagctgcattcgaggctggtggagggtgggctgggcatgggatgcacaaatggaaattccactgggtctgcagctcacacataggcatgaccagcatagagatagagaggccccagtgctgctgagtaactgtgattccccaggtgatggcatcagctgagaagggaaggaagcccatgagaggacactgaagaaggagtgagcagacaataagaagcccacagaagacagagaaggaacaactagagggagaagccaaggcaggcgtgtgtggtaacacataggaactgagggagaggacatttcaagatggtggggatgccatacaacaggactatgtgatggtttttggctgtgtccataggaagtcacaacaggcaagggaaagaaaccagaacccagtcatggagctaagaagtgagtcagagagtagaggggtagggacagtgaggtaagtcctctttctaaggaagtttggctgaaggatagactagctggacacatgctggctgtgtggggtagagggaggaatgatggagggtaggagagccttgagcctgcgagaagagtctcttagaatagagaagctgaagttaaagttgtggaagagagtggggataactgagtgacagataatcaggagaagaaaaggagatccagactcatgacagagagatgacctttgccaagagcacagccgtctttcacggtcacagagaggtaggacaaaatgagtggtgttcaagaattggtttgtagcacaatatttcaactatgtcctttaaaaagtttctccacagacactacccaaagcagtgcttcactacagtggcagacagacctgaaaattttcatctgaagcagcagagtgaactgcagaggcaggtcaccaaccagtgtggaggctaaaagcgggcctctttggggattccaggtggaagtgttggacatctgtagtattcctggtctcgaatcatcctgatattcttcattttgttattcacattggactaggcaggaacaaagatcaccacaactggctcgccttcaactatgttagatggcaacttgccttcagtatggtgaaacacatcagttaagaccggggttgtgcatggcaggactttctacaaggacacccagtctccttaataaacatgagatgctctctttccagaatttctcttgcctgacacagcataggaagatgctgaacggccacacagtgatccattgagatagaatctcactatgttgaccaggctggtcttgaactcttggcacccaagcgatccttttgcctggaatcccaaagtgtcagatttactgaagaatatttcattgtaattactttttatactttataggtcaagagctctgttttaaatacaaaatttattgaatatactttttcaaacaaagtttcatgttctaatcattgtctgatttcagcattaaatgaaacacagtaaagaaagttgggctg

SEQ ID NO: 285996 - DNA, 904 bp, Homo sapiens
ggcacccattcaacatctcatttcttagctccagaacccagtcatggagctaagaagtgagtcagagagtagaggggtagggacagtgaggtaagtcctctttctaaggaagtttggctgaaggatagactagctggacacatgctggctgtgtggggtagagggaggaatgatggagggtaggagagccttgagcctgcgagaagagtctcttagaatagagaagctgaagttaaagttgtggaagagagtggggataactgagtgacagataatcaggagaagaaaaggagatccagactcatgacagagagatgacctttgccaagagcacagccgtctttcacggtcacagagaggtaggacaaaatgagtggtgttcaagaattggtttgtagcacaatatttcaactatgtcctttaaaaagtttctccacagacactacccaaagcagtgcttcactacagtggcagacagacctgaaaattttcatctgaagcagcagagtgaactgcagaggcaggtcaccaaccagtgtggaggctaaaagcgggcctctttggggattccaggtggaagtgttggacatctgtagtattcctggtctcgaatcatcctgatattcttcattttgttattcacattggactaggagatagaatctcactatgttgaccaggctggtcttgaactcttggcacccaagcgatccttttgcctggaatcccaaagtgtcagatttactgaagaatatttcattgtaattactttttatactttataggtcaagagctctgttttaaatacaaaatttattgaatatactttttcaaacaaagtttcatgttctaatcattgtctgatttcagcattaaatgaaacacagtaaagaaagttgggctg

SEQ ID NO: 285997 - DNA, 2231 bp, Homo sapiens
  misc_feature (2210)..(2211): n is a, c, g, or t
gacatgtttttccatttgtttgtgtcttctctgatttctttgagcagtgttttgtaattcttctagagatctcctagagatctttcacctccctggttagctgtattcctaggtatcttattttttctgtgtgtagcaattatgaatgggattgtgttcttcatttgactctctgcttgacttgatgtataggactgctagtaatttttgcacattgattttgtatgctaagactttgctaaagtttatcagcagaagaagctttggggccaagactatggggctttctagatatagaaacatgtcatctgtaaacagagacagtttgacttcctgtctattcctctcttccctcctctgtttggatgcccttccagttttgcacattcagtgtaatgttggctgtgggtttgtcatggctagctctcatcattttggcacttctgactagaagggcaagaggggccagtgttgttgttacctgaaaggtaagtgcagcccacaaaaatgcagtgaagaagaagatgtattatgcatatgtttaagttaatacaattgagatatatttagcagacagaatcaatagagttgatgagtgactgactggatgtgtggggagtttatatcactcccaggtttttgacttgggcaaccgggcactcatgaaggaaaaaggggatccagggagaggaacttttctgaggactggggtagggctgaacagctgcattcgaggctggtggagggtgggctgggcatgggatgcacaaatggaaattccactgggtctgcagctcacacataggcatgaccagcatagagatagagaggccccagtgctgctgagtaactgtgattccccaggtgatggcatcagctgagaagggaaggaagcccatgagaggacactgaagaaggagtgagcagacaataagaagcccacagaagacagagaaggaacaactagagggagaagccaaggcaggcgtgtgtggtaacacataggaactgagggagaggacatttcaagatggtggggatgccatacaacaggactatgtgatggtttttggctgtgtccataggaagtcacaacaggcaagggaaagaaaccagaacccagtcatggagctaagaagtgagtcagagagtagaggggtagggacagtgaggtaagtcctctttctaaggaagtttggctgaaggatagactagctggacacatgctggctgtgtggggtagagggaggaatgatggagggtaggagagccttgagcctgcgagaagagtctcttagaatagagaagctgaagttaaagttgtggaagagagtggggataactgagtgacagataatcaggagaagaaaaggagatccagactcatgacagagagatgacctttgccaagagcacagccgtctttcacggtcacagagaggtaggacaaaatgagtggtgttcaagaattggtttgtagcacaatatttcaactatgtcctttaaaaagtttctccacagacactacccaaagcagtgcttcactacagtggcagacagacctgaaaattttcatctgaagcagcagagtgaactgcagaggcaggtcaccaaccagtgtggaggctaaaagcgggcctctttggggattccaggtggaagtgttggacatctgtagtattcctggtctcgaatcatcctgatattcttcattttgttattcacattggactaggcaggaacaaagatcaccacaactggctcgccttcaactatgttagatggcaacttgccttcagtatggtgaaacacatcagttaagaccggggttgtgcatggcaggactttctacaaggacacccagtctccttaataaacatgagatgctctctttccagaatttctcttgcctgacacagcataggaagatgctgaacggccacacagtgatccattgagatagaatctcactatgttgaccaggctggtcttgaactcttggcacccaagcgatccttttgcctggaatcccaaagtgtcagatttactgaagaatatttcattgtaattactttttatactttataggtcaagagctctgttttaaatacaaaatttattgaatatactttttcaaacaaagtttcatgttctaatcattgtctgatttcagcattaaatgaaacacagtaaagaaagttgggctggtnnaaaaaaaaaaagtattaatc

SEQ ID NO: 285998 - DNA, 2078 bp, Homo sapiens
gacatgtttttccatttgtttgtgtcttctctgatttctttgagcagtgttttgtaattcttctagagatctcctagagatctttcacctccctggttagctgtattcctaggtatcttattttttctgtgtgtagcaattatgaatgggattgtgttcttcatttgactctctgcttgacttgatgtataggactgctagtaatttttgcacattgattttgtatgctaagactttgctaaagtttatcagcagaagaagctttggggccaagactatggggctttctagatatagaaacatgtcatctgtaaacagagacagtttgacttcctgtctattcctctcttccctcctctgtttggatgcccttccagttttgcacattcagtgtaatgttggctgtgggtttgtcatggctagctctcatcattttggcacttctgactagaagggcaagaggggccagtgttgttgttacctgaaaggtaagtgcagcccacaaaaatgcagtgaagaagaagatgtattatgcatatgtttaagttaatacaattgagatatatttagcagacagaatcaatagagttgatgagtgactgactggatgtgtggggagtttatatcactcccaggtttttgacttgggcaaccgggcactcatgaaggaaaaaggggatccagggagaggaacttttctgaggactggggtagggctgaacagctgcattcgaggctggtggagggtgggctgggcatgggatgcacaaatggaaattccactgggtctgcagctcacacataggcatgaccagcatagagatagagaggccccagtgctgctgagtaactgtgattccccaggtgatggcatcagctgagaagggaaggaagcccatgagaggacactgaagaaggagtgagcagacaataagaagcccacagaagacagagaaggaacaactagagggagaagccaaggcaggcgtgtgtggtaacacataggaactgagggagaggacatttcaagatggtggggatgccatacaacaggactatgtgatggtttttggctgtgtccataggaagtcacaacaggcaagggaaagaaaccagaacccagtcatggagctaagaagtgagtcagagagtagaggggtagggacagtgaggtaagtcctctttctaaggaagtttggctgaaggatagactagctggacacatgctggctgtgtggggtagagggaggaatgatggagggtaggagagccttgagcctgcgagaagagtctcttagaatagagaagctgaagttaaagttgtggaagagagtggggataactgagtgacagataatcaggagaagaaaaggagatccagactcatgacagagagatgacctttgccaagagcacagccgtctttcacggtcacagagaggtaggacaaaatgagtggtgttcaagaattggtttgtagcacaatatttcaactatgtcctttaaaaagtttctccacagacactacccaaagcagtgcttcactacagtggcagacagacctgaaaattttcatctgaagcagcagagtgaactgcagaggcaggtcaccaaccagtgtggaggctaaaagcgggcctctttggggattccaggtggaagtgttggacatctgtagtattcctggtctcgaatcatcctgatattcttcattttgttattcacattggactaggagatagaatctcactatgttgaccaggctggtcttgaactcttggcacccaagcgatccttttgcctggaatcccaaagtgtcagatttactgaagaatatttcattgtaattactttttatactttataggtcaagagctctgttttaaatacaaaatttattgaatatactttttcaaacaaagtttcatgttctaatcattgtctgatttcagcattaaatgaaacacagtaaagaaagttgggctgatgttgttgttggtggttgtttttgtattctgattacagaactgtattttgagtgggctgaacatagagtaaatgcatcctcagctgctggt

SEQ ID NO: 285999 - DNA, 2135 bp, Homo sapiens
gacatgtttttccatttgtttgtgtcttctctgatttctttgagcagtgttttgtaattcttctagagatctcctagagatctttcacctccctggttagctgtattcctaggtatcttattttttctgtgtgtagcaattatgaatgggattgtgttcttcatttgactctctgcttgacttgatgtataggactgctagtaatttttgcacattgattttgtatgctaagactttgctaaagtttatcagcagaagaagctttggggccaagactatggggctttctagatatagaaacatgtcatctgtaaacagagacagtttgacttcctgtctattcctctcttccctcctctgtttggatgcccttccagttttgcacattcagtgtaatgttggctgtgggtttgtcatggctagctctcatcattttggcacttctgactagaagggcaagaggggccagtgttgttgttacctgaaaggtaagtgcagcccacaaaaatgcagtgaagaagaagatgtattatgcatatgtttaagttaatacaattgagatatatttagcagacagaatcaatagagttgatgagtgactgactggatgtgtggggagtttatatcactcccaggtttttgacttgggcaaccgggcactcatgaaggaaaaaggggatccagggagaggaacttttctgaggactggggtagggctgaacagctgcattcgaggctggtggagggtgggctgggcatgggatgcacaaatggaaattccactgggtctgcagctcacacataggcatgaccagcatagagatagagaggccccagtgctgctgagtaactgtgattccccaggtgatggcatcagctgagaagggaaggaagcccatgagaggacactgaagaaggagtgagcagacaataagaagcccacagaagacagagaaggaacaactagagggagaagccaaggcaggcgtgtgtggtaacacataggaactgagggagaggacatttcaagatggtggggatgccatacaacaggactatgtgatggtttttggctgtgtccataggaagtcacaacaggcaagggaaagaaaccagaacccagtcatggagctaagaagtgagtcagagagtagaggggtagggacagtgaggtaagtcctctttctaaggaagtttggctgaaggatagactagctggacacatgctggctgtgtggggtagagggaggaatgatggagggtaggagagccttgagcctgcgagaagagtctcttagaatagagaagctgaagttaaagttgtggaagagagtggggataactgagtgacagataatcaggagaagaaaaggagatccagactcatgacagagagatgacctttgccaagagcacagccgtctttcacggtcacagagaggtaggacaaaatgagtggtgttcaagaattggtttgtagcacaatatttcaactatgtcctttaaaaagtttctccacagacactacccaaagcagtgcttcactacagtggcagacagacctgaaaattttcatctgaagcagcagagtgaactgcagaggcaggtcaccaaccagtgtggaggctaaaagcgggcctctttggggattccaggtggaagtgttggacatctgtagtattcctggtctcgaatcatcctgatattcttcattttgttattcacattggactaggcaggaacaaagatcaccacaactggctcgccttcaactatgttagatggcaacttgccttcagtatggtgaaacacatcagttaagaccggggttgtgcatggcaggactttctacaaggacacccagtctccttaataaacatgagatgctctctttccagaatttctcttgcctgacacagcataggaagatgctgaacggccacacagtgatccattggtcagtggtgacataaggaggtcagaggggaggagtgaggagaagtagggaagactaggtggttgtaggcctccttcatctgttcattggctgtggcattaggccagctactctttgcacttctgtaaagtgagacggtcgatcttgtctgcctctctagaggatggttgcaggtgtc

SEQ ID NO: 286000 - DNA, 1691 bp, Homo sapiens
gacatgtttttccatttgtttgtgtcttctctgatttctttgagcagtgttttgtaattcttctagagatctcctagagatctttcacctccctggttagctgtattcctaggtatcttattttttctgtgtgtagcaattatgaatgggattgtgttcttcatttgactctctgcttgacttgatgtataggactgctagtaatttttgcacattgattttgtatgctaagactttgctaaagtttatcagcagaagaagctttggggccaagactatggggctttctagatatagaaacatgtcatctgtaaacagagacagtttgacttcctgtctattcctctcttccctcctctgtttggatgcccttccagttttgcacattcagtgtaatgttggctgtgggtttgtcatggctagctctcatcattttggcacttctgactagaagggcaagaggggccagtgttgttgttacctgaaaggtaagtgcagcccacaaaaatgcagtgaagaagaagatgtattatgcatatgtttaagttaatacaattgagatatatttagcagacagaatcaatagagttgatgagtgactgactggatgtgtggggagtttatatcactcccaggtttttgacttgggcaaccgggcactcatgaaggaaaaaggggatccagggagaggaacttttctgaggactggggtagggctgaacagctgcattcgaggctggtggagggtgggctgggcatgggatgcacaaatggaaattccactgggtctgcagctcacacataggcatgaccagcatagagatagagaggccccagtgctgctgagtaactgtgattccccaggtgatggcatcagctgagaagggaaggaagcccatgagaggacactgaagaaggagtgagcagacaataagaagcccacagaagacagagaaggaacaactagagggagaagccaaggcaggcgtgtgtgtttctccacagacactacccaaagcagtgcttcactacagtggcagacagacctgaaaattttcatctgaagcagcagagtgaactgcagaggcaggtcaccaaccagtgtggaggctaaaagcgggcctctttggggattccaggtggaagtgttggacatctgtagtattcctggtctcgaatcatcctgatattcttcattttgttattcacattggactaggcaggaacaaagatcaccacaactggctcgccttcaactatgttagatggcaacttgccttcagtatggtgaaacacatcagttaagaccggggttgtgcatggcaggactttctacaaggacacccagtctccttaataaacatgagatgctctctttccagaatttctcttgcctgacacagcataggaagatgctgaacggccacacagtgatccattgagatagaatctcactatgttgaccaggctggtcttgaactcttggcacccaagcgatccttttgcctggaatcccaaagtgtcagatttactgaagaatatttcattgtaattactttttatactttataggtcaagagctctgttttaaatacaaaatttattgaatatactttttcaaacaaagtttcatgttctaatcattgtctgatttcagcattaaatgaaacacagtaaagaaagttgggctg

SEQ ID NO: 286001 - DNA, 1909 bp, Homo sapiens
gacatgtttttccatttgtttgtgtcttctctgatttctttgagcagtgttttgtaattcttctagagatctcctagagatctttcacctccctggttagctgtattcctaggtatcttattttttctgtgtgtagcaattatgaatgggattgtgttcttcatttgactctctgcttgacttgatgtataggactgctagtaatttttgcacattgattttgtatgctaagactttgctaaagtttatcagcagaagaagctttggggccaagactatggggctttctagatatagaaacatgtcatctgtaaacagagacagtttgacttcctgtctattcctctcttccctcctctgtttggatgcccttccagttttgcacattcagtgtaatgttggctgtgggtttgtcatggctagctctcatcattttggcacttctgactagaagggcaagaggggccagtgttgttgttacctgaaaggtaagtgcagcccacaaaaatgcagtgaagaagaagatgtattatgcatatgtttaagttaatacaattgagatatatttagcagacagaatcaatagagttgatgagtgactgactggatgtgtggggagtttatatcactcccaggtttttgacttgggcaaccgggcactcatgaaggaaaaaggggatccagggagaggaacttttctgaggactggggtagggctgaacagctgcattcgaggctggtggagggtgggctgggcatgggatgcacaaatggaaattccactgggtctgcagctcacacataggcatgaccagcatagagatagagaggccccagtgctgctgagtaactgtgattccccaggtgatggcatcagctgagaagggaaggaagcccatgagaggacactgaagaaggagtgagcagacaataagaagcccacagaagacagagaaggaacaactagagggagaagccaaggcaggcgtgtgtggtaacacataggaactgagggagaggacatttcaagatggtggggatgccatacaacaggactatgtgatggtttttggctgtgtccataggaagtcacaacaggcaagggaaagaaaccagaacccagtcatggagctaagaagtgagtcagagagtagaggggtagggacagtgaggtaagtcctctttctaaggaagtttggctgaaggatagactagctggacacatgctggctgtgtggggtagagggaggaatgatggagggtaggagagccttgagcctgcgagaagagtctcttagaatagagaagctgaagttaaagttgtggaagagagtggggataactgagtgacagataatcaggagaagaaaaggagatccagactcatgacagagagatgacctttgccaagagcacagccgtctttcacggtcacagagaggtaggacaaaatgagtggtgttcaagaattggtttgtagcacaatatttcaactatgtcctttaaaaagtttctccacagacactacccaaagcagtgcttcactacagtggcagacagacctgaaaattttcatctgaagcagcagagtgaactgcagaggcaggtcaccaaccagtgtggaggctaaaagcgggcctctttggggattccaggtggaagtgttggacatctgtagtattcctggtctcgaatcatcctgatattcttcattttgttattcacattggactagggtgaggaaatgagttctggtcagagtcaatgtttcctaacaatgttgatttatttggtcctaaatatttaaacacattttataaatagcttttccacaccacatatatagggaaaaacagggagttaacttggcccagcagcactgtttgtggggctaacaccctgtctgtgt

SEQ ID NO: 286002 - DNA, 980 bp, Homo sapiens
caaggtggctggccggcaggccaatggcggccaacgccacttccggccgccctccgagcatcgctcttcggcaacccgaagccacaggatggaggagggggatcccagcaaagatcccagtttctgacctgcagcatagtccctctctctgaagaacttcctgtaatattttttgctaggaagagtttgaagtttgaaatcccagaatgaggaaattcatccagcttggagacttccaatcccttcattgtgcagaaggttgctaatgctctcaggagaagcccttcaccaagagaatacttccacatagagtcctctccattgagactaaggaaacatgctatgtcatgtagccacagcagcctttgcagctgttgaaggcagcaagacttgcatggcaatcagaagacacagaaccaagactcatatccagttataagatggcagatgggacacacactcatcaggcttagtgagcagccaatccagagggaaccatactcagccctaggggctgggcgcggtggctctcgcctgtaatcccagcactttgggaggccaaggcggatggatcacctgaggtcacgagttcaagaccagcctgaccaacatggagaaatcccatctctactaaaaatacaaaattagctgggcatggtggtgcatgcctgtagtcccagttactcgggaggctgaggcaggagaatcactcgaacccgagaggcagaggttgtggtgagctgagattgtgccattgcactccagtctgggcaacaagagtgaaactctgtctcaaaaaaaaaaaaaaaaaaaaaaagccctaggaagatttcttcaaacagatgaagctaatgatatccccagtgtgtttgaatatattgagagatcacacaatagggacactgtttagggttgaattaatagcaagcaaatgggatgctaaggaaatataaagaataaaagttcaaagggaaaacaaa

SEQ ID NO: 286003 - DNA, 647 bp, Homo sapiens
caaggtggctggccggcaggccaatggcggccaacgccacttccggccgccctccgagcatcgctcttcggcaacccgaagccacaggatggaggagggggatcccagcaaagatcccagtttctgacctgcagcatagtccctctctctgaagaacttcctgtaatattttttgctaggaagagtttgaagtttgaaatcccagaatgaggaaattcatccagcttggagacttccaatcccttcattgtgcagaaggttgctaatgctctcaggagaagcccttcaccaagagaatacttccacatagagtcctctccattgagactaaggaaacatgctatgtcatgtagccacagcagcctttgcagctgttgaaggcagcaagacttgcatggcaatcagaagacacagaaccaagactcatatccatctgggcaacaagagtgaaactctgtctcaaaaaaaaaaaaaaaaaaaaaaagccctaggaagatttcttcaaacagatgaagctaatgatatccccagtgtgtttgaatatattgagagatcacacaatagggacactgtttagggttgaattaatagcaagcaaatgggatgctaaggaaatataaagaataaaagttcaaagggaaaacaaa

SEQ ID NO: 286004 - DNA, 397 bp, Homo sapiens
cctctacaaggatgtgatgatggggacctatgggaacctactctcattaggacttcaagcttccaaacctgatgtcatctccaggctggagcggggggacgaaccatagacccctcacatcctgagaactcaggggagctggagctggaggcacaagagagaagagacggggtttcaccgtgttagccaggatggtctctatctcctgacctcgtgatccgcccgcctcgacctcctgaagtgctgggattgcaggcatgaagcaccgcaccaggccttttatattcttttgaataaatcaaactttatgtaattttatttttcttctccattagctttttagttgtacattcttttttaagtgatgactctaatgattaaatatgtctcttcaact

SEQ ID NO: 286005 - DNA, 2847 bp, Homo sapiens
  misc_feature (953)..(953): n is a, c, g, or t
ctcgcaagacctggttgtttaaaagtgggcggcaccttccccttcgctcttcctcctgctcctgccctgatgtgtctggatggtgacagatgggaatcttctccagtgaccagaatccatgccttaccttgggagcccaagctgacttctcaagctctggggatgcctcagtgatctctgatgtggaattagtggaggctggccgttgctcacctctacacagcctgctggtcgttagcgagcaggagttctgatgttcctctcatcttggatgtctttcctaggagaatatttctcacgtgtttgacagaaaacattatctgtccatcatttccatggattcctgggtctcacgggcagaaggacaaggcagatatgaggcggatctggtaaaaccataaacaccatgagatcagagcatccatctgtagactcacagagcaagaagcgtgactgccccaatcttgaatggatgagtaagatgaaaatcaatttataaacatcttgtgacaagctggaattcagttatagatcaattacagattgctcactggacaatcaaggacattattagaaaacggtttccaccactagaaattcatctacattgacatccacctaaatatccagaaggtcatccccactttcgtcgctctccacagtcagctgccgggtccaccacttcttaacttcagaaccgcaggaagccgcgtcagtcatggggttcattttgcacacgacagatttcatggttgtccttcctccaaaccgaggaacctagatcttctctgatctctgaaaaataagttcctggatatgaaaggggatactttccttggtggtagtcccagtgaagacccactgaacatcgtcagcctcaaaatgtaagctgtgctgtcatctgctttgtggaacacatatgctacacatcttctcctttcaattgggctgangttggggcacagttaaagagcattataaagctcctgctttagcatgaacttagttatctatagaaaaaaacatgtacaaggacactgggctgtggggagcattgctctccctccattcctgagtgctcttaatgggattatcctggctttccaaaaccctatagagaagaagctcatagaagaaaattctcttactgaatcagtaaaatatggaaaataatgggactgtttattaaaggattgaatgagagaacacaagtaatgcacttagaagagtgactggcatacagtgagtactacgtgctggcttctcaaccatgatagcctgaaatgtacccggaaaatgggggctaatgtaagtcatatttagagaagttattttgggggacaatgtttttgacaagactacatttttcattatgttgctgtctgtaaacaactgtagatgcagacttgcattttgaaaggcaagacccaaaacacacaaacagagtaaatacctttaaaatgcctcgatcgctggagaaatgcctggatggacctacctgagggcagacgccactgcccaaatttcctctggggtttccctgcgtcggctgcatcttgccgacttcctcctcgatccgacagcgtggggctcaggagctgctgctggctgcttgtctgcatgggaggagaagcacacagttaccgtctttttaaccctgcgctctcctccttttactataagaaaggaaaacacatggcaggaggacaagtgggaagaacaacatggactcagagtgtccacaatggggaaaagtgaaaatgggtataaagggtcacagaagaaaaagagccaccactgcacgccctgctgaaggagacaccactcttcctgggacatcttgtcctgggtaacccccactgcttcgttcccctccatgcctgagaatgtcattgtttcccttcatatcttcgctggcaaaccagggggtaaggaaggggaactgcaggaaggaaggtggggcagtggggacgggctgggcgggggcagtctactgtcaccagcctggagatccacacttagagcttcagggaaagagttctctgcaggcaaagctgtatgatgggccctggtggaggatggagctgataacaatctaagctacagtgaaagaaagagagatgccaagacttcccacacatttcacctgttctcaggttcacctgtcacctctccctttcctaacaaaagccttggtcttcacatctctttagtatccttttttttttttttttgtcacctctttctttcttaggctttttcatctaaaaacagagggctctgaaatcatcactttccccaacctcattagccctgtctcactgtctgtcctgacttcagcctgcctccctctcccatgcgagacattgccaaccatcttcagggtgaccagtggcaaggccactgcagatgcctccccttgccccttggttgactaactccgcagaagtccctgcagtcggtggcagatgatttctaaaggctggggagcccaaaacatgagatctactgaaaactgagctatggcaccagtgggcctcctggagcaccctgctgggccgtggagccttaggcttccaaaggtactctggcccctggctgcgttgctgcacaccatggagcctggtgctgctgggggctctgcacagagcacgggatcagctccacgttgttaacctcaaatcgtaattgctgcctcataaaggggcaggtcctcccagccagctgcttctcacagcacaggactctccaggacgctgataactccttgtacttttttatatagacacatacatagagtttgaaaatgaaaatatgctgtgacttaataaatagaaactcctcaaa

SEQ ID NO: 286006 - DNA, 732 bp, Homo sapiens
gctctgagcaggccgacagtcatagacgagtagaccttaggcgagggaaggcatgtactttccctaagaagcgggaggagagaaataaatagagggcagtgggatgagaagaacctcgcgggatgggaagccgcggagggaagggccgtctttggttacctggagagcgggagcagctgcggatcccttatgaagtgcccggatgaagctccagcgctcacgcgctttccgcattgagtgcagcgccatcttgagaagggcggagccgtcttgtttggaatgacgtctgttcagagagccaatcccagtctcgcgactcctgcttgctgggcgcggcttgggcctccaggctgcgcagcgcagccgctatcgggcggactgcagttcttgccgagcagtcgcaatgatttgtatgacagctgctagcccaagagagagttccagaagagggctacctaacaggtgctgtggcatttagaagaggaatggagccattgtcaacgcacagcttgcaggggagcaggagagtcagtctaagaaggaaatgtgatgatggaaacagaggttggaagatggaagaggacccagagtcaaggaatgcagatggagtcttgctctgctgcccaggctggagtgcagtggactgatcttggctcactgcagcgtccatcttccgggttcaagcgattctcctgcttcagcctctcaagtagctgggattacaggcgccca

SEQ ID NO: 286007 - DNA, 935 bp, Homo sapiens
gctctgagcaggccgacagtcatagacgagtagaccttaggcgagggaaggcatgtactttccctaagaagcgggaggagagaaataaatagagggcagtgggatgagaagaacctcgcgggatgggaagccgcggagggaagggccgtctttggttacctggagagcgggagcagctgcggatcccttatgaagtgcccggatgaagctccagcgctcacgcgctttccgcattgagtgcagcgccatcttgagaagggcggagccgtcttgtttggaatgacgtctgttcagagagccaatcccagtctcgcgactcctgcttgctgggcgcggcttgggcctccaggctgcgcagcgcagccgctatcgggcggactgcagttcttgccgagcaggggagcaggagagtcagtctaagaaggaaatgtgatgatggaaacagaggttggaagatggaagaggacccagagtcaaggaatgcaggtagaaaagaaaagcctggattctcccctaaagcctccagatggaacacagccctgcctccaccttgatttcaggacttcttaccccaagaatctcacccgggaggaaccatctatcatcctgccttgaaggtagtttctgctggatctggtcagacctttgtatgatggattttggaaacccagtggaaggatgttcgctcattgcccccatttgccactataggactatgcgcctcccttttatttactcaatttgcttttatcctgatctattatgttgttgtagacccagttccagttgttacaatactgggttatcagttctaaggccctgggcaagggtggtgtggaacaggtcccacataactgcccatgtcgagagctctaagcctaaattgggagggacaccagggacaagactcctgggttcatagcctaggggcctaa

SEQ ID NO: 286008 - DNA, 1163 bp, Homo sapiens
gctctgagcaggccgacagtcatagacgagtagaccttaggcgagggaaggcatgtactttccctaagaagcgggaggagagaaataaatagagggcagtgggatgagaagaacctcgcgggatgggaagccgcggagggaagggccgtctttggttacctggagagcgggagcagctgcggatcccttatgaagtgcccggatgaagctccagcgctcacgcgctttccgcattgagtgcagcgccatcttgagaagggcggagccgtcttgtttggaatgacgtctgttcagagagccaatcccagtctcgcgactcctgcttgctgggcgcggcttgggcctccaggctgcgcagcgcagccgctatcgggcggactgcagttcttgccgagcagctactgaaaattaccaaggagaggtaggagataagagatgcctataaaggagctgaaatctaccaggtcgcaatgatttgtatgacagctgctagcccaagagagagttccagaagagggctacctaacaggtgctgtggcatttagaagaggaatggagccattgtcaacgcacagcttgcaggggagcaggagagtcagtctaagaaggaaatgtgatgatggaaacagaggttggaagatggaagaggacccagagtcaaggaatgcaggtagaaaagaaaagcctggattctcccctaaagcctccagatggaacacagccctgcctccaccttgatttcaggacttcttaccccaagaatcgtgtctgtcttcatcctaaggagtcaactgctataccttagtgatttcaatgtaattgtttggtctgtaagtcattcttgccactgtggttctggggccattgttctgcaacgatgaataaacaatgttttagaaatcactcatccaagaaaggtgacaagatactggaatagaggtatttgaaaaatattcatgggaattttagaggattgtagatggtctgaatacctgtgaagacatcatctaatgtatctaaaaaccacataatgcttcatctcaatgtattttaagaattaattttgttataagctagaatttttcattttggttttaataataacatcaaaaggattttttaacataaattagaaagggcatacatggagaagtaaagaagaa

SEQ ID NO: 286009 - DNA, 852 bp, Homo sapiens
gctctgagcaggccgacagtcatagacgagtagaccttaggcgagggaaggcatgtactttccctaagaagcgggaggagagaaataaatagagggcagtgggatgagaagaacctcgcgggatgggaagccgcggagggaagggccgtctttggttacctggagagcgggagcagctgcggatcccttatgaagtgcccggatgaagctccagcgctcacgcgctttccgcattgagtgcagcgccatcttgagaagggcggagccgtcttgtttggaatgacgtctgttcagagagccaatcccagtctcgcgactcctgcttgctgggcgcggcttgggcctccaggctgcgcagcgcagccgctatcgggcggactgcagttcttgccgagcagctactgaaaattaccaaggagaggtaggagataagagatgcctataaaggagctgaaatctaccagggtaagacaaaacagtaaattaaaaccatataggataatcttgtaggtatacaaagtactggtgaagttcaagtataattggtgtaatttagaagtgagcaggaaagggatgaaggcaaaaaaaaaactaggaaatcaagttatagtcttcaacaaagctgatcagtttggttttggctgttaaatttgaggtgcttgtagtacttccaaaatgtgatgcccattaaatagatacatgggtctggagctcagaagagatttgaactaccaaacagatggtaattgaaaccaaggaaatccttgagaccatcagatagagtttgtggagtgaaagtagccagatgatggaaataaaggagccaagaggtgttgtagaacccaaagaatg

SEQ ID NO: 286010 - DNA, 407 bp, Homo sapiens
aatcgaaggtcctctttatgcacagttggactcactcgtcagtcagaccatgcttagttttctgggatatgctctcaccagacaatgattaggacccccaaaaggaggctttttatggaggggtagtgtaataaatacaagaggcaggaagtacaggagacctaggagatggggaggagactgaaggagaagaggttggccctccaagggtggcttccaagactctgaagccaagctgccacctccacaacctcacctagctccccttacccctttctattcctgcagactcaagaggtctgctcatccactccaactccatccgaatcagagatccactggcttcttccagaagcctgcggtggcctgtcctaccccaccggggccacccccagacccctcaccga

SEQ ID NO: 286011 - DNA, 1062 bp, Homo sapiens
ttttcaatccctggggatgaatgttgtaaaattagcacgcagttgccaatccgtaatgaaccctgtttctgggaactgggaggctttagagttgtaacgtgaacagccttttccatcagcctgggtaagggattgacagtccacctccactggtccccctccctccagtgtcccaagatgagtccaaaacccacagtcacatcattcatccactcttcttgtaaaccatggttgccacctactctgtggccagccctgggccgggcgtgggggacatagagacgagtcagacccggaccctgccctcgagacgctcccaggtctggtggggagacagacacgtcatcaaaaagacaagtaagagtgagtgagcacttataggcaagagtgtccgcaggactgtgaaatgaaaacaagttgcagaacaaaggggatggtatgagtgcatgggaaaaataaaacacagaaagaaaaaggagcagaatgaaaaataatgtttttaagccagtgtgacttttcaaaaaatgaaaaggtggtataatgaaaactgattatttaaaacctgggaaaagcagacatcaaattgttctcatcagttacttctggcggtggtttataaggcttttcaacttttatattatatctttgaatgtttttttaaacaaagtaattaatattcacagtgggcccctccagatcaagccatgcttagttttctgggatatgctctcaccagacaatgattaggacccccaaaaggaggctttttatggaggggtagtgtaataaatacaagaggcaggaagtacaggagacctaggagatggggaggagactgaaggagaagaggttggccctccaagggtggcttccaagactctgaagccaagctgccacctccacaacctcacctagctccccttacccctttctattcctgcagactcaagaggtctgctcatccactccaactccatccgaatcagagatccactggcttcttccagaagcctgcggtggcctgtcctaccccaccggggccacccccagacccctcaccga

SEQ ID NO: 286012 - DNA, 950 bp, Homo sapiens
agattctccctgcctccagtttcactccccacctccactggtccccctccctccagtgtcccaagatgagtccaaaacccacagtcacatcattcatccactcttcttgtaaaccatggttgccacctactctgtggccagccctgggccgggcgtgggggacatagagacgagtcagacccggaccctgccctcgagacgctcccaggtctggtggggagacagacacgtcatcaaaaagacaagtaagagtgagtgagcacttataggcaagagtgtccgcaggactgtgaaatgaaaacaagttgcagaacaaaggggatggtatgagtgcatgggaaaaataaaacacagaaagaaaaaggagcagaatgaaaaataatgtttttaagccagtgtgacttttcaaaaaatgaaaaggtggtataatgaaaactgattatttaaaacctgggaaaagcagacatcaaattgttctcatcagttacttctggcggtggtttataaggcttttcaacttttatattatatctttgaatgtttttttaaacaaagtaattaatattcacagtgggcccctccagatcaagccatgcttagttttctgggatatgctctcaccagacaatgattaggacccccaaaaggaggctttttatggaggggtagtgtaataaatacaagaggcaggaagtacaggagacctaggagatggggaggagactgaaggagaagaggttggccctccaagggtggcttccaagactctgaagccaagctgccacctccacaacctcacctagctccccttacccctttctattcctgcagactcaagaggtctgctcatccactccaactccatccgaatcagagatccactggcttcttccagaagcctgcggtggcctgtcctaccccaccggggccacccccagacccctcaccga

SEQ ID NO: 286013 - DNA, 418 bp, Homo sapiens
agttcactcacagctgacttggggtgagggaagaatttgcatttctgacgagatcccaggtgatgttgaggctgctgttcgggggcctcgcttgagaagctccggtgcagagtggacgccttagtctgtttagggagccgcctaacaaactgtatcgccagcctcagggcctcagcctttctgcctttccttccagggtggacccgaactccccggtgctcttggaggacccagtcctttgtgccttggcaaaaaagcacaagcgaaccccagccctgattgccctgcgctaccagctgcagcgtggggttgtggtcctggccaagagctacaatgagcagcgcatcagacagaacgtgcaggtgtgaggagcggggctgtgggcctcaggtctcctgcacagtgtccttcacacgtg

SEQ ID NO: 286014 - DNA, 1362 bp, Homo sapiens
ccttctctctctctctccctctccctctcctgccagccaagtgaagacatgcttacttccccttcaccttccttcatgatgacagtgtgctcaggggcgttgccagctcattgctcttatagcctgtgagggaggaagaaacatttgctaaccaggccagtgacagaaatggattcgaaataccagtgtgtgaagctgaatgatggtcacttcatgcctgtcctgggatttggcacctatgcgcctgcagaggttcctaaaagtaaagctctagaggccgtcaaattggcaatagaagccgggttccaccatattgattctgcacatgtttacaataatgaggagcaggttggactggccatccgaagcaagattgcagatggcagtgtgaagagagaagacatattctacacttcaaagctttggagcaattcccatcgaccagagttggtccgaccagccttggaaaggtcactgaaaaatcttcaattggactatgttgacctctatcttattcattttccagtgtctgtaaagccaggtgaggaagtgatcccaaaagatgaaaatggaaaaatactatttgacacagtggatctctgtgccacatgggaggccatggagaagtgtaaagatgcaggattggccaagtccatcggggtgtccaacttcaaccacaggctgctggagatgatcctcaacaagccagggctcaagtacaagcctgtctgcaaccaggtggaatgtcatccttacttcaaccagagaaaactgctggatttctgcaagtcaaaagacattgttctggttgcctatagtgctctgggatcccatcgagaagaaccatgggtggacccgaactccccggtgctcttggaggacccagtcctttgtgccttggcaaaaaagcacaagcgaaccccagccctgattgccctgcgctaccagctgcagcgtggggttgtggtcctggccaagagctacaatgagcagcgcatcagacagaacgtgcaggtgtttgaattccagttgacttcagaggagatgaaagccatagatggcctaaacagaaatgtgcgatatttgacccttgatatttttgctggcccccctaattatccattttctgatgaatattaacatggagggcattgcatgaggtctgccagaaggccctgcgtgtggatggtgacacagaggatggctctatgctggtgactggacacatcgcctctggttaaatctctcctgcttggcgacttcagtaagctacagctaagcccatcggccggaaaagaaagacaataattttgtttttcattttgaaaaaattaaatgctctctcctaaagattcttcacct

SEQ ID NO: 286015 - DNA, 1454 bp, Homo sapiens
ccttctctctctctctccctctccctctcctgccagccaagtgaagacatgcttacttccccttcaccttccttcatgatggtaagaaacggttgaactggatgcaatttttatcacagcttgtgtaagactgcctctgtccctcctctcacatgccattggttaaccagcagacagtgtgctcaggggcgttgccagctcattgctcttatagcctgtgagggaggaagaaacatttgctaaccaggccagtgacagaaatggattcgaaataccagtgtgtgaagctgaatgatggtcacttcatgcctgtcctgggatttggcacctatgcgcctgcagaggttcctaaaagtaaagctctagaggccgtcaaattggcaatagaagccgggttccaccatattgattctgcacatgtttacaataatgaggagcaggttggactggccatccgaagcaagattgcagatggcagtgtgaagagagaagacatattctacacttcaaagctttggagcaattcccatcgaccagagttggtccgaccagccttggaaaggtcactgaaaaatcttcaattggactatgttgacctctatcttattcattttccagtgtctgtaaagccaggtgaggaagtgatcccaaaagatgaaaatggaaaaatactatttgacacagtggatctctgtgccacatgggaggccatggagaagtgtaaagatgcaggattggccaagtccatcggggtgtccaacttcaaccacaggctgctggagatgatcctcaacaagccagggctcaagtacaagcctgtctgcaaccaggtggaatgtcatccttacttcaaccagagaaaactgctggatttctgcaagtcaaaagacattgttctggttgcctatagtgctctgggatcccatcgagaagaaccatgggtggacccgaactccccggtgctcttggaggacccagtcctttgtgccttggcaaaaaagcacaagcgaaccccagccctgattgccctgcgctaccagctgcagcgtggggttgtggtcctggccaagagctacaatgagcagcgcatcagacagaacgtgcaggtgtttgaattccagttgacttcagaggagatgaaagccatagatggcctaaacagaaatgtgcgatatttgacccttgatatttttgctggcccccctaattatccattttctgatgaatattaacatggagggcattgcatgaggtctgccagaaggccctgcgtgtggatggtgacacagaggatggctctatgctggtgactggacacatcgcctctggttaaatctctcctgcttggcgacttcagtaagctacagctaagcccatcggccggaaaagaaagacaataattttgtttttcattttgaaaaaattaaatgctctctcctaaagattcttcacct

SEQ ID NO: 286016 - DNA, 1688 bp, Homo sapiens
ccttctctctctctctccctctccctctcctgccagccaagtgaagacatgcttacttccccttcaccttccttcatgatgttaccattggaatgacatactgcatcctatagttataccatccactctgaaatcaatgtgaatttaacttcagttccatacagaaacttcttttccacagatggagtttaagcccaagctggagtgcgatggtgcaatcccaactcactgcaacctctgcctcccaggttcaagctattttcctggcttagcctccggagtagctggaattacagatgtgcgcccccatgaccagtaagaaacggttgaactggatgcaatttttatcacagcttgtgtaagactgcctctgtccctcctctcacatgccattggttaaccagcagacagtgtgctcaggggcgttgccagctcattgctcttatagcctgtgagggaggaagaaacatttgctaaccaggccagtgacagaaatggattcgaaataccagtgtgtgaagctgaatgatggtcacttcatgcctgtcctgggatttggcacctatgcgcctgcagaggttcctaaaagtaaagctctagaggccgtcaaattggcaatagaagccgggttccaccatattgattctgcacatgtttacaataatgaggagcaggttggactggccatccgaagcaagattgcagatggcagtgtgaagagagaagacatattctacacttcaaagctttggagcaattcccatcgaccagagttggtccgaccagccttggaaaggtcactgaaaaatcttcaattggactatgttgacctctatcttattcattttccagtgtctgtaaagccaggtgaggaagtgatcccaaaagatgaaaatggaaaaatactatttgacacagtggatctctgtgccacatgggaggccatggagaagtgtaaagatgcaggattggccaagtccatcggggtgtccaacttcaaccacaggctgctggagatgatcctcaacaagccagggctcaagtacaagcctgtctgcaaccaggtggaatgtcatccttacttcaaccagagaaaactgctggatttctgcaagtcaaaagacattgttctggttgcctatagtgctctgggatcccatcgagaagaaccatgggtggacccgaactccccggtgctcttggaggacccagtcctttgtgccttggcaaaaaagcacaagcgaaccccagccctgattgccctgcgctaccagctgcagcgtggggttgtggtcctggccaagagctacaatgagcagcgcatcagacagaacgtgcaggtgtttgaattccagttgacttcagaggagatgaaagccatagatggcctaaacagaaatgtgcgatatttgacccttgatatttttgctggcccccctaattatccattttctgatgaatattaacatggagggcattgcatgaggtctgccagaaggccctgcgtgtggatggtgacacagaggatggctctatgctggtgactggacacatcgcctctggttaaatctctcctgcttggcgacttcagtaagctacagctaagcccatcggccggaaaagaaagacaataattttgtttttcattttgaaaaaattaaatgctctctcctaaagattcttcacct

SEQ ID NO: 286017 - DNA, 1554 bp, Homo sapiens
ccttctctctctctctccctctccctctcctgccagccaagtgaagacatgcttacttccccttcaccttccttcatgatgttaccattggaatgacatactgcatcctatagttataccatccactctgaaatcaatgtgaatttaacttcagttccatacagaaacttcttttccacaggtaagaaacggttgaactggatgcaatttttatcacagcttgtgtaagactgcctctgtccctcctctcacatgccattggttaaccagcagacagtgtgctcaggggcgttgccagctcattgctcttatagcctgtgagggaggaagaaacatttgctaaccaggccagtgacagaaatggattcgaaataccagtgtgtgaagctgaatgatggtcacttcatgcctgtcctgggatttggcacctatgcgcctgcagaggttcctaaaagtaaagctctagaggccgtcaaattggcaatagaagccgggttccaccatattgattctgcacatgtttacaataatgaggagcaggttggactggccatccgaagcaagattgcagatggcagtgtgaagagagaagacatattctacacttcaaagctttggagcaattcccatcgaccagagttggtccgaccagccttggaaaggtcactgaaaaatcttcaattggactatgttgacctctatcttattcattttccagtgtctgtaaagccaggtgaggaagtgatcccaaaagatgaaaatggaaaaatactatttgacacagtggatctctgtgccacatgggaggccatggagaagtgtaaagatgcaggattggccaagtccatcggggtgtccaacttcaaccacaggctgctggagatgatcctcaacaagccagggctcaagtacaagcctgtctgcaaccaggtggaatgtcatccttacttcaaccagagaaaactgctggatttctgcaagtcaaaagacattgttctggttgcctatagtgctctgggatcccatcgagaagaaccatgggtggacccgaactccccggtgctcttggaggacccagtcctttgtgccttggcaaaaaagcacaagcgaaccccagccctgattgccctgcgctaccagctgcagcgtggggttgtggtcctggccaagagctacaatgagcagcgcatcagacagaacgtgcaggtgtttgaattccagttgacttcagaggagatgaaagccatagatggcctaaacagaaatgtgcgatatttgacccttgatatttttgctggcccccctaattatccattttctgatgaatattaacatggagggcattgcatgaggtctgccagaaggccctgcgtgtggatggtgacacagaggatggctctatgctggtgactggacacatcgcctctggttaaatctctcctgcttggcgacttcagtaagctacagctaagcccatcggccggaaaagaaagacaataattttgtttttcattttgaaaaaattaaatgctctctcctaaagattcttcacct

SEQ ID NO: 286018 - DNA, 1579 bp, Homo sapiens
ccttctctctctctctccctctccctctcctgccagccaagtgaagacatgcttacttccccttcaccttccttcatgatgacagtgtgctcaggggcgttgccagctcattgctcttatagcctgtgagggaggaagaaacatttgctaaccaggccagtgacagaaatggattcgaaataccagtgtgtgaagctgaatgatggtcacttcatgcctgtcctgggatttggcacctatgcgcctgcagaggttcctaaaagtaaagctctagaggccgtcaaattggcaatagaagccgggttccaccatattgattctgcacatgtttacaataatgaggagcaggttggactggccatccgaagcaagattgcagatggcagtgtgaagagagaagacatattctacacttcaaagctttggagcaattcccatcgaccagagttggtccgaccagccttggaaaggtcactgaaaaatcttcaattggactatgttgacctctatcttattcattttccagtgtctgtaaagccaggtgaggaagtgatcccaaaagatgaaaatggaaaaatactatttgacacagtggatctctgtgccacatgggaggccatggagaagtgtaaagatgcaggattggccaagtccatcggggtgtccaacttcaaccacaggctgctggagatgatcctcaacaagccagggctcaagtacaagcctgtctgcaaccaggtggaatgtcatccttacttcaaccagagaaaactgctggatttctgcaagtcaaaagacattgttctggttgcctatagtgctctgggatcccatcgagaagaaccatgggtggacccgaactccccggtgctcttggaggacccagtcctttgtgccttggcaaaaaagcacaagcgaaccccagccctgattgccctgcgctaccagctgcagcgtggggttgtggtcctggccaagagctacaatgagcagcgcatcagacagaacgtgcaggtgtttgaattccagttgacttcagaggagatgaaagccatagatggcctaaacagaaatgtgcgatatttgacccttgatatttttgctggcccccctaattatccattttctgatgaatattaacatggagggcattgcatgaggtctgccagaaggccctgcgtgtggatggtgacacagaggatggctctatgctggtgactggacacatcgcctctggttaaatctctcctgcttggcgacttcagtaagctacagctaagcccatcggccggaaaagaaagacaataattttgtttttcattttgaaaaaattaaatgctctctcctaaagattcttcacctaaaaaaaaaacaacaacattgtgccgccgcgcccagcccccacaaaaaagttaaaaaaaccataggtgggggccgcggccccacagcccaggtaaccgtgggcccacacgtcccagaaaaacccggccacgaaaaagggcgggtccccaaaaaaacccggggaacgcgtcagacaacccaagaggcggggcaagggccaagaggccagggccacaac

SEQ ID NO: 286019 - DNA, 1356 bp, Homo sapiens
ccttctctctctctctccctctccctctcctgccagccaagtgaagacatgcttacttccccttcaccttccttcatgatgacagtgtgctcaggggcgttgccagctcattgctcttatagcctgtgagggaggaagaaacatttgctaaccaggccagtgacagaaatggattcgaaataccagtgtgtgaagctgaatgatggtcacttcatgcctgtcctgggatttggcacctatgcgcctgcagaggttcctaaaagtaaagctctagaggccgtcaaattggcaatagaagccgggttccaccatattgattctgcacatgtttacaataatgaggagcaggttggactggccatccgaagcaagattgcagatggcagtgtgaagagagaagacatattctacacttcaaagctttggagcaattcccatcgaccagagttggtccgaccagccttggaaaggtcactgaaaaatcttcaattggactatgttgacctctatcttattcattttccagtgtctgtaaagccaggtgaggaagtgatcccaaaagatgaaaatggaaaaatactatttgacacagtggatctctgtgccacatgggaggccatggagaagtgtaaagatgcaggattggccaagtccatcggggtgtccaacttcaaccacaggctgctggagatgatcctcaacaagccagggctcaagtacaagcctgtctgcaaccaggtggaatgtcatccttacttcaaccagagaaaactgctggatttctgcaagtcaaaagacattgttctggttgcctatagtgctctgggatcccatcgagaagaaccatgggtggacccgaactccccggtgctcttggaggacccagtcctttgtgccttggcaaaaaagcacaagcgaaccccagccctgattgccctgcgctaccagctgcagcgtggggttgtggtcctggccaagagctacaatgagcagcgcatcagacagaacgtgcaggtgtttgaattccagttgacttcagaggagatgaaagccatagatggcctaaacagaaatgtgcgatatttgacccttgatatttttgctggcccccctaattatccattttctgatgaatattaacatggagggcattgcatgaggtctgccagaaggccctgcgtgtggatggtgacacagaggatggctctatgctggtgactggacacatcgcctctggttaaatctctcctgcttggcgacttcagtaagctacagctaagcccatcggccggaaaagaaagacaataatggggttggggatggggaaaaaatgaaatgctgggtccaaaaaaaaaa

SEQ ID NO: 286020 - DNA, 1191 bp, Homo sapiens
ccttctctctctctctccctctccctctcctgccagccaagtgaagacatgcttacttccccttcaccttccttcatgatggttcctaaaagtaaagctctagaggccgtcaaattggcaatagaagccgggttccaccatattgattctgcacatgtttacaataatgaggagcaggttggactggccatccgaagcaagattgcagatggcagtgtgaagagagaagacatattctacacttcaaagctttggagcaattcccatcgaccagagttggtccgaccagccttggaaaggtcactgaaaaatcttcaattggactatgttgacctctatcttattcattttccagtgtctgtaaagccaggtgaggaagtgatcccaaaagatgaaaatggaaaaatactatttgacacagtggatctctgtgccacatgggaggccatggagaagtgtaaagatgcaggattggccaagtccatcggggtgtccaacttcaaccacaggctgctggagatgatcctcaacaagccagggctcaagtacaagcctgtctgcaaccaggtggaatgtcatccttacttcaaccagagaaaactgctggatttctgcaagtcaaaagacattgttctggttgcctatagtgctctgggatcccatcgagaagaaccatgggtggacccgaactccccggtgctcttggaggacccagtcctttgtgccttggcaaaaaagcacaagcgaaccccagccctgattgccctgcgctaccagctgcagcgtggggttgtggtcctggccaagagctacaatgagcagcgcatcagacagaacgtgcaggtgtttgaattccagttgacttcagaggagatgaaagccatagatggcctaaacagaaatgtgcgatatttgacccttgatatttttgctggcccccctaattatccattttctgatgaatattaacatggagggcattgcatgaggtctgccagaaggccctgcgtgtggatggtgacacagaggatggctctatgctggtgactggacacatcgcctctggttaaatctctcctgcttggcgacttcagtaagctacagctaagcccatcggccggaaaagaaagacaataattttgtttttcattttgaaaaaattaaatgctctctcctaaagattcttcacct

SEQ ID NO: 286021 - DNA, 1501 bp, Homo sapiens
ccttctctctctctctccctctccctctcctgccagccaagtgaagacatgcttacttccccttcaccttccttcatgatgtgggaagagtgctgcaacccagccctagccaacgccgcatgagagggagtgtgccgagggcttctgagaaggtttctctcacatctagaaagaagcgcttaagatgtggcagcccctcttcttcaagtggctcttgtcctgttgccctgggagttctcaaattgctgcagcagcctccacccagcctgaggatgacatcaatacacagaggaagaagagtcaggaaaagatgagagaagttacagactctcctgggcgaccccgagagcttaccattcctcagacttcttcacatggtgctaacagatttgttcctaaaagtaaagctctagaggccgtcaaattggcaatagaagccgggttccaccatattgattctgcacatgtttacaataatgaggagcaggttggactggccatccgaagcaagattgcagatggcagtgtgaagagagaagacatattctacacttcaaagctttggagcaattcccatcgaccagagttggtccgaccagccttggaaaggtcactgaaaaatcttcaattggactatgttgacctctatcttattcattttccagtgtctgtaaagccaggtgaggaagtgatcccaaaagatgaaaatggaaaaatactatttgacacagtggatctctgtgccacatgggaggccatggagaagtgtaaagatgcaggattggccaagtccatcggggtgtccaacttcaaccacaggctgctggagatgatcctcaacaagccagggctcaagtacaagcctgtctgcaaccaggtggaatgtcatccttacttcaaccagagaaaactgctggatttctgcaagtcaaaagacattgttctggttgcctatagtgctctgggatcccatcgagaagaaccatgggtggacccgaactccccggtgctcttggaggacccagtcctttgtgccttggcaaaaaagcacaagcgaaccccagccctgattgccctgcgctaccagctgcagcgtggggttgtggtcctggccaagagctacaatgagcagcgcatcagacagaacgtgcaggtgtttgaattccagttgacttcagaggagatgaaagccatagatggcctaaacagaaatgtgcgatatttgacccttgatatttttgctggcccccctaattatccattttctgatgaatattaacatggagggcattgcatgaggtctgccagaaggccctgcgtgtggatggtgacacagaggatggctctatgctggtgactggacacatcgcctctggttaaatctctcctgcttggcgacttcagtaagctacagctaagcccatcggccggaaaagaaagacaataattttgtttttcattttgaaaaaattaaatgctctctcctaaagattcttcacct

SEQ ID NO: 286022 - DNA, 1222 bp, Homo sapiens
tttttgctttccattcgaatgagaatattggtattaactttctttggagtgactccaaatgggaaacaacacatgcccgtcaacagatgaatggcactatgccccatccatacaaaatactactactaatctatatgccggaatgtactgatttctgccctaacatcaatacatcgacaaataatattgctgcgttaaagaagaacgagaaggacatatcatatgattccatatatgtaaaagcattgaaaaacaatgaacaaatctatggagaccaaagcttggctggagttggcgggtggcagagttggtccgaccagccttggaaaggtcactgaaaaatcttcaattggactatgttgacctctatcttattcattttccagtgtctgtaaagccaggtgaggaagtgatcccaaaagatgaaaatggaaaaatactatttgacacagtggatctctgtgccacatgggaggccatggagaagtgtaaagatgcaggattggccaagtccatcggggtgtccaacttcaaccacaggctgctggagatgatcctcaacaagccagggctcaagtacaagcctgtctgcaaccaggtggaatgtcatccttacttcaaccagagaaaactgctggatttctgcaagtcaaaagacattgttctggttgcctatagtgctctgggatcccatcgagaagaaccatgggtggacccgaactccccggtgctcttggaggacccagtcctttgtgccttggcaaaaaagcacaagcgaaccccagccctgattgccctgcgctaccagctgcagcgtggggttgtggtcctggccaagagctacaatgagcagcgcatcagacagaacgtgcaggtgtttgaattccagttgacttcagaggagatgaaagccatagatggcctaaacagaaatgtgcgatatttgacccttgatatttttgctggcccccctaattatccattttctgatgaatattaacatggagggcattgcatgaggtctgccagaaggccctgcgtgtggatggtgacacagaggatggctctatgctggtgactggacacatcgcctctggttaaatctctcctgcttggcgacttcagtaagctacagctaagcccatcggccggaaaagaaagacaataattttgtttttcattttgaaaaaattaaatgctctctcctaaagattcttcacct

SEQ ID NO: 286023 - DNA, 1305 bp, Homo sapiens
cagatacacagcaaatggatatagtcaattatcgtcgatggttgtgaatcatgatgtgaatggtcactgcatgcctgctcctgctgattagagcgactaattcgccctgctcgagagattccgtaaacagctatagatcctacgtacgagagtccgccaagattgaggctggtatcaacgcccggtgttcccccatattgagtgctaggaccagatggttgagcgcataatctgcgagagcctacgggtagaatctaggacccatctccatgagcataagaattgcatgaatggcaccatgtcttcatagatacgaagatcctatatcatatcagtctacagatgctggttggatgcggacatccctgattcgtaccagacgtatctgagtccggaggcataaccttggaaaggtcactgaaaaatcttcaattggactatgttgacctctatcttattcattttccagtgtctgtaaagccaggtgaggaagtgatcccaaaagatgaaaatggaaaaatactatttgacacagtggatctctgtgccacatgggaggccatggagaagtgtaaagatgcaggattggccaagtccatcggggtgtccaacttcaaccacaggctgctggagatgatcctcaacaagccagggctcaagtacaagcctgtctgcaaccaggtggaatgtcatccttacttcaaccagagaaaactgctggatttctgcaagtcaaaagacattgttctggttgcctatagtgctctgggatcccatcgagaagaaccatgggtggacccgaactccccggtgctcttggaggacccagtcctttgtgccttggcaaaaaagcacaagcgaaccccagccctgattgccctgcgctaccagctgcagcgtggggttgtggtcctggccaagagctacaatgagcagcgcatcagacagaacgtgcaggtgtttgaattccagttgacttcagaggagatgaaagccatagatggcctaaacagaaatgtgcgatatttgacccttgatatttttgctggcccccctaattatccattttctgatgaatattaacatggagggcattgcatgaggtctgccagaaggccctgcgtgtggatggtgacacagaggatggctctatgctggtgactggacacatcgcctctggttaaatctctcctgcttggcgacttcagtaagctacagctaagcccatcggccggaaaagaaagacaataattttgtttttcattttgaaaaaattaaatgctctctcctaaagattcttcacct

SEQ ID NO: 286024 - DNA, 1610 bp, Homo sapiens
ccttctctctctctctccctctccctctcctgccagccaagtgaagacatgcttacttccccttcaccttccttcatgatgttaccattggaatgacatactgcatcctatagttataccatccactctgaaatcaatgtgaatttaacttcagttccatacagaaacttcttttccacagatggagtttaagcccaagctggagtgcgatggtgcaatcccaactcactgcaacctctgcctcccaggttcaagctattttcctggcttagcctccggagtagctggaattacagatgtgcgcccccatgaccagtaagaaacggttgaactggatgcaatttttatcacagcttgtgtaagactgcctctgtccctcctctcacatgccattggttaaccagcagacagtgtgctcaggggcgttgccagctcattgctcttatagcctgtgagggaggaagaaacatttgctaaccaggccagtgacagaaatggattcgaaataccagtgtgtgaagctgaatgatggtcacttcatgcctgtcctgggatttggcacctatgcgcctgcagaggttcctaaaagtaaagctctagaggccgtcaaattggcaatagaagccgggttccaccatattgattctgcacatgtttacaataatgaggagcaggttggactggccatccgaagcaagattgcagatggcagtgtgaagagagaagacatattctacacttcaaagctttggagcaattcccatcgaccagagttggtccgaccagccttggaaaggtcactgaaaaatcttcaattggactatgttgacctctatcttattcattttccagtgtctgtaaaggccatggagaagtgtaaagatgcaggattggccaagtccatcggggtgtccaacttcaaccacaggctgctggagatgatcctcaacaagccagggctcaagtacaagcctgtctgcaaccaggtggaatgtcatccttacttcaaccagagaaaactgctggatttctgcaagtcaaaagacattgttctggttgcctatagtgctctgggatcccatcgagaagaaccatgggtggacccgaactccccggtgctcttggaggacccagtcctttgtgccttggcaaaaaagcacaagcgaaccccagccctgattgccctgcgctaccagctgcagcgtggggttgtggtcctggccaagagctacaatgagcagcgcatcagacagaacgtgcaggtgtttgaattccagttgacttcagaggagatgaaagccatagatggcctaaacagaaatgtgcgatatttgacccttgatatttttgctggcccccctaattatccattttctgatgaatattaacatggagggcattgcatgaggtctgccagaaggccctgcgtgtggatggtgacacagaggatggctctatgctggtgactggacacatcgcctctggttaaatctctcctgcttggcgacttcagtaagctacagctaagcccatcggccggaaaagaaagacaataattttgtttttcattttgaaaaaattaaatgctctctcctaaagattcttcacct

SEQ ID NO: 286025 - DNA, 1191 bp, Homo sapiens
ccttctctctctctctccctctccctctcctgccagccaagtgaagacatgcttacttccccttcaccttccttcatgatgttaccattggaatgacatactgcatcctatagttataccatccactctgaaatcaatgtgaatttaacttcagttccatacagaaacttcttttccacaggtaagaaacggttgaactggatgcaatttttatcacagcttgtgtaagactgcctctgtccctcctctcacatgccattggttaaccagcagacagtgtgctcaggggcgttgccagctcattgctcttatagcctgtgagggaggaagaaacatttgctaaccaggccagtgacagaaatggattcgaaataccagtgtgtgaagctgaatgatggtcacttcatgcctgtcctgggatttggcacctatgcgcctgcagaggccatggagaagtgtaaagatgcaggattggccaagtccatcggggtgtccaacttcaaccacaggctgctggagatgatcctcaacaagccagggctcaagtacaagcctgtctgcaaccaggtggaatgtcatccttacttcaaccagagaaaactgctggatttctgcaagtcaaaagacattgttctggttgcctatagtgctctgggatcccatcgagaagaaccatgggtggacccgaactccccggtgctcttggaggacccagtcctttgtgccttggcaaaaaagcacaagcgaaccccagccctgattgccctgcgctaccagctgcagcgtggggttgtggtcctggccaagagctacaatgagcagcgcatcagacagaacgtgcaggtgtttgaattccagttgacttcagaggagatgaaagccatagatggcctaaacagaaatgtgcgatatttgacccttgatatttttgctggcccccctaattatccattttctgatgaatattaacatggagggcattgcatgaggtctgccagaaggccctgcgtgtggatggtgacacagaggatggctctatgctggtgactggacacatcgcctctggttaaatctctcctgcttggcgacttcagtaagctacagctaagcccatcggccggaaaagaaagacaataattttgtttttcattttgaaaaaattaaatgctctctcctaaagattcttcacct

SEQ ID NO: 286026 - DNA, 1525 bp, Homo sapiens
ccttctctctctctctccctctccctctcctgccagccaagtgaagacatgcttacttccccttcaccttccttcatgatgacagtgtgctcaggggcgttgccagctcattgctcttatagcctgtgagggaggaagaaacatttgctaaccaggccagtgacagaaatggattcgaaataccagtgtgtgaagctgaatgatggtcacttcatgcctgtcctgggatttggcacctatgcgcctgcagaggttcctaaaagtaaagctctagaggccgtcaaattggcaatagaagccgggttccaccatattgattctgcacatgtttacaataatgaggagcaggttggactggccatccgaagcaagattgcagatggcagtgtgaagagagaagacatattctacacttcaaagctttggagcaattcccatcgaccagagttggtccgaccagccttggaaaggtcactgaaaaatcttcaattggactatgttgacctctatcttattcattttccagtgtctgtaaagccaggtgaggaagtgatcccaaaagatgaaaatggaaaaatactatttgacacagtggatctctgtgccacatgggaggccatggagaagtgtaaagatgcaggattggccaagtccatcggggtgtccaacttcaaccacaggctgctggagatgatcctcaacaagccagggctcaagtacaagcctgtctgcaaccaggtggaatgtcatccttacttcaaccagagaaaactgctggatttctgcaagtcaaaagacattgttctggttgcctatagtgctctgggatcccatcgagaagaaccatgggtggacccgaactccccggtgctcttggaggacccagtcctttgtgccttggcaagggttgtggtcctggccaagagctacaatgagcagcgcatcagacagaacgtgcaggtgtttgaattccagttgacttcagaggagatgaaagccatagatggcctaaacagaaatgtgcgatatttgacccttgatatttttgctggcccccctaattatccattttctgatgaatattaacatggagggcattgcatgaggtctgccagaaggccctgcgtgtggatggtgacacagaggatggctctatgctggtgactggacacatcgcctctggttaaatctctcctgcttggcgacttcagtaagctacagctaagcccatcggccggaaaagaaagacaataattttgtttttcattttgaaaaaattaaatgctctctcctaaagattcttcacctaaaaaaaaaacaacaacattgtgccgccgcgcccagcccccacaaaaaagttaaaaaaaccataggtgggggccgcggccccacagcccaggtaaccgtgggcccacacgtcccagaaaaacccggccacgaaaaagggcgggtccccaaaaaaacccggggaacgcgtcagacaacccaagaggcggggcaagggccaagaggccagggccacaac

SEQ ID NO: 286027 - DNA, 669 bp, Homo sapiens
gatcatctccagctgcctgcggttgaagttggacaccccgatggagtggaatgtcatccttacttcaaccagagaaaactgctggatttctgcaagtcaaaagacattgttctggttgcctatagtgctctgggatcccatcgagaagaaccatgggtggacccgaactccccggtgctcttggaggacccagtcctttgtgccttggcaaaaaagcacaagcgaaccccagccctgattgccctgcgctaccagctgcagcgtggggttgtggtcctggccaagagctacaatgagcagcgcatcagacagaacgtgcaggtgtttgaattccagttgacttcagaggagatgaaagccatagatggcctaaacagaaatgtgcgatatttgacccttgatatttttgctggcccccctaattatccattttctgatgaatattaacatggagggcattgcatgaggtctgccagaaggccctgcgtgtggatggtgacacagaggatggctctatgctggtgactggacacatcgcctctggttaaatctctcctgcttggcgacttcagtaagctacagctaagcccatcggccggaaaagaaagacaataattttgtttttcattttgaaaaaattaaatgctctctcctaaagattcttcacct

SEQ ID NO: 286028 - DNA, 1422 bp, Homo sapiens
ccttctctctctctctccctctccctctcctgccagccaagtgaagacatgcttacttccccttcaccttccttcatgatgttaccattggaatgacatactgcatcctatagttataccatccactctgaaatcaatgtgaatttaacttcagttccatacagaaacttcttttccacagatggagtttaagcccaagctggagtgcgatggtgcaatcccaactcactgcaacctctgcctcccaggttcaagctattttcctggcttagcctccggagtagctggaattacagatgtgcgcccccatgaccagtaagaaacggttgaactggatgcaatttttatcacagcttgtgtaagactgcctctgtccctcctctcacatgccattggttaaccagcagacagtgtgctcaggggcgttgccagctcattgctcttatagcctgtgagggaggaagaaacatttgctaaccaggccagtgacagaaatggattcgaaataccagtgtgtgaagctgaatgatggtcacttcatgcctgtcctgggatttggcacctatgcgcctgcagaggttcctaaaagtaaagctctagaggccgtcaaattggcaatagaagccgggttccaccatattgattctgcacatgtttacaataatgaggagcaggttggactggccatccgaagcaagattgcagatggcagtgtgaagagagaagacatattctacacttcaaagctttggagcaattcccatcgaccagagttggtccgaccagccttggaaaggtcactgaaaaatcttcaattggactatgttgacctctatcttattcattttccagtgtctgtaaaggtaggcagcttgtgtgatcaaattaatttcacttttgttctcagcataaatattgttttcatggagatttgaactaagctttttcttaggaggacatagggattttaacatggaagaagagccctaaacataactcctaattcctttctatggaacagaaagcaattttgaatccatacttccgtgattgcatgtctacaagaaaagagagtgcagaatcctcaaagcctctgcctcaaaaacttgaggaaatgacaatcatctccttgaaggcacaaggtcttatttatgattcctgatttcacctcttgggatgttcacagacacagagtttcatgaagctgtggtgtccagaaaacctgctgcacatagggtgcacaatgagtttccatcttcttgcctcttttcaaggggcaagaactcagtccgggaatgtcttaaactacaaaccttcatgggaaaccttgttgcttctgcttcctctcttttcacactggaggttttatttttgcttagccatgaattcttgtgtcattcataacttttgtcttaaggtact

SEQ ID NO: 286029 - DNA, 992 bp, Homo sapiens
ccttctctctctctctccctctccctctcctgccagccaagtgaagacatgcttacttccccttcaccttccttcatgatgttaccattggaatgacatactgcatcctatagttataccatccactctgaaatcaatgtgaatttaacttcagttccatacagaaacttcttttccacaggtaagaaacggttgaactggatgcaatttttatcacagcttgtgtaagactgcctctgtccctcctctcacatgccattggttaaccagcagacagtgtgctcaggggcgttgccagctcattgctcttatagcctgtgagggaggaagaaacatttgctaaccaggccagtgacagaaatggattcgaaataccagtgtgtgaagctgaatgatggtcacttcatgcctgtcctgggatttggcacctatgcgcctgcagaggtaacaataatatttttagtgttgagagttcaaaggagctagagtaagtggaagctgaccaggttgtcaggcttgtgttcccatgttactctgcatgactcccctttaaacgtcagtctttgttctgcaatgccgtcttgtcacagggtcatctactgcttatttgtggcactgttttgtcttctgtttatgtttatttcacagcttgtcagagtctataaaactcagcagaaagaacacggcttgcctgctccctctcttgaagattgattgcaatgggagtggtttctctgtttctttgtatagtcgaacagatatttacttcttccaagaagatacaattcagaggaatttttatggcaaaagttagtggagacggggtggatgaaatctgttgggagagtatcactgttctgatgggcggccttgagcaccacactgtaatactagacctggcctaaagagaatttcccatgtactattctcacctctgggaaaattacctgaaataataaaatatcctcattttaagaaaaaaaaaaaaaaac

SEQ ID NO: 286030 - DNA, 542 bp, Homo sapiens
gagagaacggataagaaagatgaggtaggatacatctgtttcctatcttcttagtacaagtatggaaaatgcaccattggatcaaaaacttaggaactttacaaaggtagtttttgtgagcagcgaggaaaaagaaatgacaggcatacaaaagagagaagtggaggagaagaattgggggtaaggaggactgggatttctttccttgcctgtacattaatctctccactttcctaaggaggaaacagaaattctcactcttgcaatcactatcttcttccccaatttttctgttttattttctcccttttaagaaccacggctagctagtttgattgtcacgtctagacagttgttgctttcacagttctatgttacatttatcttgctcttcagtcgactacacaaatgatacctcacaattcctttttcccaggccatggagaagtgtaaagatgcaggattggccaagtccatcggggtgtccaacttcaaccacaggctgctggagatgatcctcaacaagccagggctcaagtaca

SEQ ID NO: 286031 - DNA, 344 bp, Homo sapiens
gagttcactcacagctgacttggggtgagggaagaatttgcatttctgacgagatcccaggtgatgttgaggctgctgttcgggggcctcgcttgagaagctccggtgcagagtggacgccttagtctgtttagggagccgcctaacaaactgtatcgccagcctcagggcctcagcctttctgcctttccttccagggtggacccgaactccccggtgctcttggaggacccagtcctttgtgccttggcaaaaaagcacaagcgaaccccagccctgattgccctgcgctaccagctgcagcgtggggttgtggtcctggccaagagctacaatgagcagcg

SEQ ID NO: 286032 - DNA, 281 bp, Homo sapiens
ataatattctcagttcaaatttaatgctctacattattcagcttcttttactttggtgattttaatattaatgtaacttttggattatctgatgcttttccatcttgctcgtctgcaggtggaatgtcatccttacttcaaccagagaaaactgctggatttctgcaagtcaaaagacattgttctggttgcctatagtgctctgggatcccatcgagaagaaccatggtaataagagatacaggaagtttacctaaaacactggtttgataaaaaaaatt

SEQ ID NO: 286033 - DNA, 1379 bp, Homo sapiens
taatttacttgtcttggctattttttgtatgctatgtaagatataaattaatttttcctttggaaaactttcagtatcattgaaagctagtattatttagctttcaacatttattctttattttgttcccccaaacctacctgtctctctctctcctctttctttggttccctaatttaatgttaccaacaactcatggatattaatttcaattagtttgaatgctatttgatactctggtctttgagagaaggcctacataagtcaagccactcctgccggcagcctggcagctgtgttttactgatgtcttttagagacagacatcctgtgtgtgactaaatgtccaaaggggatctatagttaactctatttttaaaagttactgaggtacttcatcataaaaacaacaataaaaatacttcttttaggctgtttttttaggttaagtctacctaaaaaatgatgggtccaggttgatttgtttgttggttttgtgcacacagatattgtacaaagagaacttgagcaaggggactcccctacctgtcactcctgagatggagcgagtcaaactcaatcaagaaaactttagctcggtatttgggagaaagctctttaactccatattaaaaaataataatttctacaaaacagaacatctcactgttcatccctttataataatcaatttaacaaaatctttttttaatcacatcaactgaatccttctggttttccagatctcctactcaccatttgattctaacaaacattttatactttctataatagtcccttaaaactttttctttccttctcttttcatctttatgttgttgggactgttgaagttaattgatttccagaaaagaaaaaccaaacactaaagctcttatttacttggaactctttttatctgatgtttctgggttagagatgcaagaaaagatactggacttgaagccacatatagaaatggtggctcttccttaggaacagggatcatcttaacatagaccctattcagataaacaatagcaccaagaaagaaaattgctccatattgaaaccaaaagaaatcttatttggggccaggcgtggtggctcacacctgtcatctcagcactttgggaggtcgaggcaggcagatcacttgagcccaggaggtcgagaccagcctagccaacatggtgaaattccatctctgctaaaaatagaaaaaattagccaagcgtggtggcacatgcctgtagtctcagctacttgggaggctgaggtgggaggttcatctgaaccctaggaagtcaaggctgcagtgagccgtgattgtgccactgtactccagcctaggcaacaggagtgagaccctgtttcaa

SEQ ID NO: 286034 - DNA, 706 bp, Homo sapiens
tttaaagatacaggattttaattttcttcacataatataggacaaataaagaaaacaaagcaatgttgaaatcttaacaagatgtttactctttcttcatagctccaataccagtgtgaccttaaaaacagtaaaggaaaaattacagttgttcaagacacgccagaaatactgcgtgtaaaagaaaatcagaagaatttcagctcggtatatttactatttattttgcatttaatgctaacctagtcatttcactctcctctttaaaaatatactagccttatattgatacacacaattaacatctaacctcctcagtaatactagcagtgatttgctaaaatccccaatactttgctccaaaatcatctccagagaccatttgaaataactttaaatctgctaacaacgtaacttttatttttaaattttttaatcccagggcagtaacatgtgttgtcttgctccaagaagatggatttctttttgacattgtgatttcttttgttatccctcccccaaataactgactgagtttgcatttctttaatggattttgtgttacatatggggagggttttgttgttaatcaacatttcctggctcttctcatcctgtgttagtatggtataccacaatcttagaagaaatcttaagatctggaaagatccatgttgtaaaactggtctgagtcactgatacggac

SEQ ID NO: 286035 - DNA, 20830 bp, Homo sapiens
  misc_feature (16881)..(16881): n is a, c, g, or t
gtgataaaactacaaagcagaatacgaagaagacagaggcaaaggcttcttccctcagaccataactcaagaatatgggggtctcgcagtaatttatgctctttgcttttgtcttttcatagttttccttgtatagtttgtcacttagggcatctcctgctgccttcagctgcctaagctgtgggttctctgaagcaggaagcacattataatctgcttttcctttattcttttcatagtcttctttgtattttgctgctgaggaaatttatttggtagattgaaggtttgaacgagagctacagaaacgaaagaaaaagtctgtataagccaatggtgttcgggaagaaaataaccccattgccttgagtttgtaggtgccactactactctgaaaaatggcagatgacgaagactatgaggaggtggtggagtactacacagaagaagtggtttacgaagaggtgccgggagagacaataacaaaaatttatgagactacgacaacaaggacatctgactatgagcaatcagaaacttccaaaccagctctggcacagccagcactggcacagccagcatcagcaaagccggtggagaggaggaaggtcatccggaagaaagtggatccttcaaagttcatgaccccctacattgcacacagtcagaaaatgcaggatctttttagcccaaataaatacaaggagaagtttgagaaaacaaaaggacagccatacgccagcacaacagatactccagaacttcgcagaatcaaaaaagtacaagatcaactcagtgaggttaagtatcgaatggatggtgatgttgctaagactatatgtcacgtagatgaaaaagcaaaggatattgaacatgcaaagaaagtgtcgcagcaagtcagtaaggttttatacaagcagaactgggaagacaccaaggataagtacctgcttcctcctgatgcccctgaacttgtccaggccgttaagaacaccgccatgttcagcaagaaactgtacactgaagactgggaagcagacaaaagtttgttttacccctataatgatagcccggaactgaggagagttgcccaggcccagaaagctctcagtgatgttgcctacaaaaaaggtctcgctgaacagcaagctcaattcacgcctctggccgatcctccagatatagaatttgccaagaaagtaaccaatcaagtgagcaagcaaaaatacaaagaagactatgaaaataaaatcaaaggcaaatggagtgagacaccttgctttgaagttgcaaatgccagaatgaatgctgataacattagcacaaggaaataccaggaagattttgaaaacatgaaagaccagatctacttcatgcagaccgaaacaccagagtataaaatgaataaaaaagctggtgtggcagctagcaaggtaaaatacaaagaagactatgaaaagaataaaggaaaagcagattataatgtgcttcctgcttcagagaacccacagcttaggcagctgaaggcagcaggagatgccctaagtgacaaactatacaaggaaaactatgaaaagacaaaagcaaagagcataaattactgcgagacccccaaattcaagctcgatactgttctgcagaacttcagtagtgataaaaaatataaagattcctacttaaaagatattttgggacattatgtaggcagcttcgaggatccataccattcacactgcatgaaagtcacagctcaaaacagtgataaaaactacaaagcagaatacgaagaagacagaggcaaaggcttcttccctcagaccataactcaagaatatgaagcaattaagaaactagatcagtgtaaagaccacacctacaaagtccatccagataagacaaaattcacccaagttacagactctcctgttctgctacaagcccaagtcaattccaaacaactgagtgacttaaattacaaagcaaaacatgaaagtgaaaagttcaagtgccatatcccccctgatactcctgcttttatccagcacaaagtcaatgcctataacttgagtgataatctttataagcaagactgggagaagagcaaagccaaaaagtttgacattaaagtggatgccattcccctgctggcagccaaagccaacaccaagaacaccagcgatgtgatgtacaagaaagactatgaaaaaaacaaagggaaaatgattggagtcctcagcattaatgacgatcccaagatgctgcactccttgaaggtggccaaaaaccagagtgatagattatacaaggaaaactatgagaagacaaaggcaaagagtatgaattactgtgagaccccaaaatatcaacttgatactcagctgaagaacttcagtgaggctagatataaagacttatatgtaaaggatgttttgggacattatgtaggcagcatggaggacccatatcacacacactgcatgaaagttgcagctcaaaacagtgataaaagttacaaagcagaatatgaagaagataaaggaaaatgctatttccctcagacaataacacaagaatatgacgcaatcaagaagctggaccagtgtaaagatcatacctacaaagttcatccagataagaccaaattcacggcagtcactgattctcctgtactgttgcaagcccagctcaacacgaaacagcttagtgatctgaattacaaagcaaaacatgaaggtgagaggttcaagtgccatataccagcagatgctccacagtttatccaacacagagtcaatgcctataatctgagtgataatgtttataagcaagactgggagaagagcaaagccaagaagtttgacattaaagtggacgccattcccctgttggcagccaaagccaacaccaagaacaccagcgatgtgatgtacaagaaagactatgaaaagagcaaagggaaaatgattggagccctcagcattaatgacgatccaaagatgctgcactccttgaagacagccaaaaaccagagtgatcgcgaatatcgaaaagattatgaaaagtcaaaaactatctacacggcacctcttgatatgctccaagtcactcaagctaagaaatctcaggcaattgccagcgacgttgattataagcacatcttacacagttacagctacccccctgatagcatcaatgtggaccttgccaagaaggcatatgcgctgcagagcgatgttgaatacaaagctgactacaatagctggatgaaaggttgtggctgggtgccttttgggtccttagaaatggaaaaggcaaagcgagcttcagacatcctcaatgagaaaaaatatcgccaacatccagacaccctcaagtttacctcgattgaagatgctccaattacagtacagtctaaaattaaccaggcccagaggagtgatatcgcttacaaagccaaaggagaggaaattattcacaattacaacctgccaccagacctgccccagttcatccaggctaaagttaatgcctacaatatcagtgagaatatgtacaaagcagacttgaaagacttgagcaagaagggatatgacctgagaactgatgcgattcccatcagagctgccaaagctgccaggcaggcggcgagtgacgttcagtacaaaaaagactatgaaaaggctaaagggaaaatggttggcttccaaagtcttcaagatgaccctaaactggttcattatatgaacgtggccaagatacaatcagatcgggagtataaaaaagactatgagaagacaaagtccaaatacaacacgccccatgatatgttcaatgtcgtggcggctaagaaagcccaggatgtggtcagcaatgtcaactataagcattctctccatcattacacctacttgcctgacgccatggacctggagctgtctaagaacatgatgcagatacagagtgataacgtctacaaggaagactacaacaactggatgaaaggcattggctggattcctattggcagtctcgacgtcgaaaaagttaaaaaggccggtgatgctctgaatgaaaagaagtacaggcaacatccagacaccctcaaatttaccagcattgtggactccccagttatggtccaggcaaaacagaacacgaagcaagtcagtgatatcttatacaaggctaaaggagaagatgtgaaacataaatacaccatgagtcctgatcttcctcagtttctccaggccaagtgcaatgcttacagtataagtgacgtctgttataaacgggattggcatgacttaatacgcaagggcaacaatgtgctgggcgatgctattcccatcactgcagccaaggcatcgagaaacattgccagtgattataaatacaaggaagcttatgagaagtcaaagggaaagcatgtgggtttcagaagcctccaggatgatcccaagctggtccactatatgaatgtggcaaagctgcagtctgatcgtgaatacaagaagaactatgagaacaccaaaaccagctaccatacccctggggacatggttacgatcacagctgcaaagatggcccaggatgtcgctaccaatgtcaactacaaacagccattgcatcattacacatacctacctgacgccatgagtcttgagcatacgaggaatgtcaatcaaattcagagtgataatgtgtataaagacgagtataacagcttcttgaagggcatcggatggatccctattggttccctggaggtggagaaggtcaagaaagcaggcgatgcattaaatgagaggaagtatcgacagcacccagataccgtcaagttcacaagtgtgcctgattccatgggcatgatgttggctcagcataacacaaagcagctaagtgatttgaactacaaggtagagggagagaaactgaagcacaagtatactattgaccctgaattgcctcagtttattcaagccaaagtcaacgccctcaacatgagtgatgctcattataaagcagattggaagaaaaccattcgcaagggctatgatttgagaccagatgccatcccaattgttgctgcaaaaagttcaaggaatattgctagtgattgcaaatataaggaggcctacgagaaagccaaaggcaagcaagttggatttctcagtcttcaggatgatcctaaactggttcactacatgaatgtggccaaaatccagtctgatcgtgagtacaaaaagggctatgaagccagcaagaccaagtaccacacacctctggatatggtcagtgtgacagctgcaaagaaatctcaggaggttgccaccaacgccaactacagacagtcataccaccactacactctcctgcccgatgccttgaatgtggagcactccaggaatgccatgcagattcagagtgataatctgtacaaatctgacttcaccaattggatgaaagggatcggctgggtgcccatagagtccctggaggtggagaaggcaaagaaagcaggagagattcttagtgagaagaagtatcgccagcaccccgagaagctgaagttcacttacgccatggacacaatggaacaggcacttaacaagagtaacaaactgaacatggacaagaggctctacactgaaaaatggaacaaggacaagaccaccattcatgtcatgcctgacacaccggatattttactctccagagtaaaccaaatcaccatgagtgataaactgtacaaagctggctgggaagaggaaaagaagaaaggatatgacctgaggcctgatgccattgcaataaaggctgcaagagcctctagagacattgccagtgattacaaatacaagaaagcctatgaacaagccaaagggaaacacattggcttccggagcctggaagatgaccccaagctggtgcacttcatgcaagtggccaagatgcagtcagaccgggaatacaagaagggatatgagaaatccaagacctccttccacaccccggtggacatgctcagtgtggtggcagccaagaagtctcaggaagtggccaccaatgccaactacaggaacgtgatccatacctacaacatgcttcctgatgccatgagctttgaattggccaaaaatatgatgcagattcaaagtgataatcagtacaaggctgactatgctgacttcatgaagggcattggatggctccctctgggctccctggaagcagagaaaaacaagaaagccatggagattattagtgaaaagaagtaccgccagcacccagacactttgaagtattccacactcatggactcgatgaacatggttttggcccagaataatgcaaaaattatgaacgaacatctctacaaacaagcatgggaggctgacaaaaccaaagtccacatcatgcctgatatcccccagattattttggcaaaggcaaatgcaattaatataagtgataaactctacaaactttccttggaagagtctaaaaagaaaggctatgatctcagacctgatgcaattcctatcaaagctgccaaggcttccagagatattgcaagtgattataaatacaagtacaattatgaaaaagggaaggggaaaatggttggtttccgcagtctcgaggatgatcccaaattagtccattccatgcaagtggctaagatgcaatctgatcgggagtacaagaaaaactatgagaacacaaagaccagctaccacacccctgccgacatgctcagtgtcacggctgcaaaggatgcccaagccaacatcaccaacactaactacaagcacctgattcacaagtacatcctccttccagatgcaatgaacattgagctgaccaggaatatgaatcgcatacagagtgataatgaatataagcaagattacaatgaatggtacaaagggcttggctggagtccagcaggttctctggaagtggagaaggccaagaaagcaactgaatatgccagtgatcagaaataccgccagcacccgagcaacttccagtttaagaagctgactgattccatggacatggtgcttgccaagcagaatgcacataccatgaacaagcatttatacaccattgattggaataaagataagaccaagattcatgtgatgcctgatacaccagatattttacaagccaagcagaatcaaacactgtatagtcagaaactctataaacttggatgggaagaagctttgaagaaaggctatgatctcccagttgatgcaatttctgtacagctagctaaagcttcaagagacattgctagtgattataaatacaaacaaggctaccgaaagcaacttggccaccatgttggattccggagtctgcaagatgacccaaaacttgtgttgtccatgaatgtagccaaaatgcagagtgaaagagaatacaagaaggactttgagaagtggaaaactaagttctccagcccagtggacatgttgggagtggtactggccaagaagtgtcaggagttggttagtgacgtggactacaagaactacctgcatcagtggacatgtctgcctgatcagaacgatgttgtgcaagctaagaaagtttatgaactgcaaagtgagaatctatataaatctgaccttgagtggctgagaggcataggatggagtcccttgggttctttagaggcagaaaagaacaagcgggcttcggaaatcatcagtgagaagaaatatcgtcagcctccagacagaaacaagttcaccagcattcctgatgccatggatatagttctggcaaagacaaatgccaaaaataggagtgatagactttatagagaagcttgggacaaagacaagactcagatccacatcatgcctgatacacctgacattgttctggctaaagcaaacttaatcaacacaagtgataaactctaccgaatgggttatgaggagctgaagagaaaaggttacgatcttcctgttgatgccataccaatcaaagcagcaaaagcctcccgggaaattgccagtgaatacaagtacaaggaaggctttcgcaagcagctcggccaccacattggtgcccggaacattgaagatgaccccaagatgatgtggtccatgcatgtggccaagatccagagtgacagggagtacaagaaggactttgagaagtggaagaccaagttcagcagcccagtggacatgctgggggtggtgttggcctataagtgccagaccttagtcagcgacgtggactacaagaactacctgcaccagtggacatgcctgcccgaccagagcgatgtcatccatgctcggcaggcctatgacctccagagcgataatttgtacaagtcagaccttcagtggctaaaaggcattggctggatgactagtggttctctcgaggatgagaaaaataaacgagccacccagattttgagtgaccatgtttaccgtcagcacccagatcaatttaagttttccagccttatggattccataccaatggttttggcaaaaaacaatgctattaccatgaatcatcgcctctatacagaagcttgggataaagataaaaccactgtccacattatgccagatacccctgaagttttattagctaaacaaaacaaagtaaattacagtgagaaattgtataagcttggcctagaagaagccaagaggaaaggttatgacatgcgggtagatgccattcctatcaaggcagccaaggcctccagagatattgcaagtgaattcaagtacaaagaaggctatcgtaagcagctcggccaccacattggtgcccgagctatacgtgatgaccccaagatgatgtggtccatgcacgtggccaagatccagagtgacagggagtacaagaaggactttgagaagtggaagaccaagttcagcagcccagtggacatgctgggggtggtgctggccaagaagtgccagaccttagtcagcgatgtggactacaagaactacctgcaccagtggacatgcctgcccgaccagagcgacgtcatccatgctcggcaggcctatgacctccagagcgataatatgtacaagtctgatctccagtggatgagaggcattggctgggtgtccattggctctttggatgtggaaaaatgcaaaagggcaactgaaattttgagtgataaaatctatcgccagcctccagacagattcaaatttaccagtgtgactgactctctggaacaagtgctggccaagaacaatgctctcaacatgaataagcgtttatacacagaggcctgggacaaagacaagactcaaattcacataatgcctgatacaccagagattatgttggcaaggcagaacaaaatcaactacagtgagactctatacaaacttgccaatgaagaagcaaaaaagaaaggctacgacttgcgaagtgacgccatccccatcgtggctgccaaggcctccagggacgttatcagtgattacaaatacaaagatggttaccgcaagcagctcggccaccacattggagcccggaacattgaagatgaccccaagatgatgtggtccatgcatgtggccaagatccagagtgacagggagtataagaaggactttgagaagtggaagaccaagttcagcagcccagtggacatgctgggagtggtgttagccaagaagtgccagaccttagtcagcgatgtggactacaagaactacctgcacgagtggacgtgcctgcccgaccagaatgatgtcatccatgctcggcaggcctatgacctccagagcgataacatttacaaatctgatctccagtggctgagaggcattggctgggtccccattgggtctatggatgtggtcaagtgcaagagagctgctgaaatactgagtgataacatctaccgccagcctccggacaagctgaaatttaccagtgtgactgactctctagagcaggtgctggccaagaacaatgctctcaatatgaacaagcgcttatacacagaagcctgggacaaagacaagacccaagtccatattatgcctgatacacctgaaatcatgttggcaagacaaaataaaataaattatagtgagagcctctatcgtcaggccatggaagaagccaagaaagaaggctatgacttgagaagtgatgccattcccattgtggctgccaaggcctctcgggatattgccagtgattacaaatacaaagaagcatatcgtaagcagttgggtcaccacattggcgcccgagcagtacacgatgaccccaagataatgtggtccctccacattgccaaagtgcagagtgaccgtgagtacaagaaagattttgagaaatacaagacaaggtacagcagcccagtggacatgcttggtatcgttttggccaagaagtgtcagaccttggtcagcgatgtggactataaacatcctctgcatgaatgcatctgcctgcccgaccagaatgacatcattcatgcacggaaagcctatgacctccagagtgacaatttgtataagtcagaccttgaatggatgaaaggcattggctgggttccgattgattccttggaagttgttagggccaagagagctggagaattacttagtgatactatctaccgtcagcgtccagaaacgctgaaatttaccagtataacggacactccggagcaggtgctggcaaaaaacaatgctttaaacatgaataagcgcttatatactgaagcctgggacaatgacaagaaaactattcatgtcatgcctgatacaccagaaatcatgttagccaaactcaaccgaataaactacagtgataaactctataaacttgctttggaagagtccaagaaggaaggctatgacttgcgtctggatgccattccaatccaagcagccaaggcttcaagagatattgctagtgattacaagtacaaggaaggctaccgcaaacagcttggccaccatattggggcccggaacattaaggatgacccgaagatgatgtggtccatccatgtggccaagatccagagtgacagggagtacaagaaggagtttgagaagtggaagaccaagttcagcagcccagtggacatgctgggggtggtgctggccaagaagtgtcagatccttgtaagcgacatagactacaagcatcccctgcatgaatggacctgcctgcctgatcagaatgacgtcattcaggctcggaaggcctatgacctgcagagtgatgctatttacaaatctgatcttgagtggctgagaggcataggatgggttcccattggctctgtagaggtcgagaaagtgaagagagctggagaaatcctgagtgacaggaagtatcgccagcctgcagaccagctcaaattcacatgcattaccgacactccggaaattgtcctagcaaagaataatgccctgacaatgagcaagcatttatacacagaagcttgggatgctgacaaaacctccatccacgtgatgccagacaccccagatatcctgctggccaagagtaattctgccaatatcagccaaaaactttacaccaagggatgggatgaatcaaagatgaaggactatgatctgagagcagatgctatttccatcaaaagtgccaaggcctccagggacatcgccagtgactacaaatacaaggaagcctatgagaaacagaaaggccaccacattggagcccagagcattgaagatgatcccaagattatgtgtgccatacatgcagaaaaaattcaaagtgaaagggagtacaagaaggaattccaaaagtggaaaaccaagttctctagcccagtggacatgttaagcatcttgctggccaagaaatgtcagactttggtcactgacatttattatcgcaattacctgcatgaatggacatgcatgccggatcaaaacgacattatccaagcaaaaaaggcctatgacctgcagagtgatgccctctacaaggctgacttggagtggttgcgtggcattggctggatgccccaagggtctcctgaagtgttgagagtcaaaaacgcccagaatatcttttgtgacagtgtctatcggacgcctgtggtgaaccttaagtacacaagcattgttgacacacctgaagtggtccttgctaaatcaaatgctgaaaatattagtattccaaagtacagagaggtttgggacaaggataaaacttcaatacacataatgccagatactccagaaattaatctcgctagagcaaatgctcttaatgtgagcaataaactttaccgtgagggctgggatgaaatgaaggcgggctgtgatgtccggctggatgccatccccatccaggctgccaaggcctccagggagattgccagtgactataaatataagcttgaccatgagaagcagaagggacactacgtgggcaccctcacagccagggatgacaacaagatccgctgggccctcatagctgacaagctccagaatgaacgagagtaccggctggactgggccaaatggaaggccaagatccagagccctgtggacatgctttccatcctgcactctaaaaattcccaggctctggtcagtgacatggattaccgcaattacctgcaccagtggacctgcatgcccgaccagaacgatgtgattcaggccaagaaggcctacgaactgcagagcgataatgtttacaaggctgacttggaatggttgcgtggaattgggtggatgccaaatgactccgtgtccgtcaatcatgccaaacatgccgcggacatcttcagtgagaaaaaatatcgcacaaaaatagaaactctcaactttacgcctgtggatgacagagttgattatgtgacagcgaaacaaagtggcgagatcctcgatgatattaaataccggaaagactggaatgccaccaaatcaaagtacaccctcacagaaacccccctgctgcacactgcccaggaggctgctaggatactggaccagtatctctacaaggaaggctgggagagacaaaaagccacaggttacattttgcctccagatgctgtgccatttgttcatgcccatcactgcaatgacgttcagagtgagctgaaatacaaagctgaacatgtgaagcaaaaaggtcattatgttggtgtcccgacgatgagagatgatcctaagctggtttggtttgagcatgcaggccagattcagaatgagagactatacaaagaggactatcacaaaacaaaggccaaaatcaatatacctgctgatatggtgtcagtcttggccgccaagcaggggcagacccttgtcagtgatattgattatcgtaattacttgcaccaatggatgtgtcatcctgaccagaacgatgttattcaggcaagaaaggcctatgacctacagagtgataatgtctacagagctgacctggagtggctccgaggcattggctggatcccactggattctgtggaccatgtaagggttactaagaaccaggaaatgatgagtcagatcaaatataagaaaaatgcccttgaaaactatcctaactttacaagtgtggtggatcctccagagattgttttagccaagattaattctgtcaatcaaagtgatgtaaaatataaagaaacatttaataaagcaaagggcaaatatacgttttcaccagatacaccacatatctcccactccaaagacatgggaaaactctacagtactatactgtataaaggggcgtgggagggcaccaaggcctatggctacaccctggatgagcgctacattcccattgttggagccaagcatgctgatctggtgaacagtgagcttaaatacaaagagacatatgagaagcagaaaggtcactacctggctggaaaagtgatcggtgaattccctggtgtggttcactgtctggatttccaaaagatgaggagtgcgttgaactacagaaaacattatgaggataccaaagcaaatgttcatatccccaatgacatgatgaatcacgtgctggctaaaaggtgccagtacatcctcagtgacctggagtatcgacactatttccaccagtggacgtctcttctggaagaacccaatgttatacgcgtccgaaacgcccaggagatcttgagtgataatgtgtataaagatgacctgaattggttgaaaggcattggttgctacgtttgggatacaccccaaatcctccatgccaagaaatcatacgaccttcagagtcagctacaatatacagcagcaggtaaagaaaatctacaaaactataatctggtcacagacacgcccctctatgtgactgctgttcagagtggcattaatgccagtgaggtaaaatataaagaaaattatcatcagattaaggacaaatacacaacagttctagaaacagtggattatgacagaaccagaaacctgaagaatctttacagcagtaacctgtacaaggaggcctgggatagagtgaaagccaccagctacatcctgccttccagcaccttgtccctgacacacgccaagaaccagaagcatctggccagccatatcaaatatcgggaagaatatgaaaagttcaaagctctttatacgttaccaagaagtgttgacgatgatccgaacacagcacggtgcctccgagttggcaagcttaacatcgatcgcctgtacagatcagtttatgaaaagaacaagatgaaaatccacatcgtgcccgacatggtagagatggttactgccaaggattcccagaagaaagtcagtgagattgattaccgcctgcgcctccacgaatggatttgccaccccgacttgcaagtcaatgatcacgtcaggaaagtcacagatcagatcagcgatattgtatacaaggatgacctcaactggctgaaaggcattggttgctacgtctgggacactcctgaaatcctccatgccaagcatgcttatgatctacgtgatgatatcaagtataaagctcacatgttgaaaacaaggaatgactacaagcttgtcacagatacaccagtctacgtgcaggctgtcaaaagtgggaaacagctaagtgacgctgtctaccactatgactatgtgcacagtgtcagaggcaaagtggctccaactaccaaaaccgtggatctggaccgggcccttcatgcatacaagctccagagttcgaatctatacaaaaccagcctgcgcaccctgcccactggatatagacttccaggtgacactcctcacttcaaacacatcaaggacacccgttacatgagcagttatttcaagtacaaagaagcctatgaacacaccaaggcatatgggtatacacttggccccaaagatgttccatttgtccacgtccggagagtcaacaatgttaccagcgagagactgtatcgggaattgtaccacaaactgaaagacaagatccatacaactcccgatacccctgagatccgccaagtcaagaagacacaagaggctgtcagtgagttgatctacaaatcagacttcttcaagatgcagggccacatgatctctctgccatacacaccccaagtgatccattgccgctatgtgggagacatcaccagtgatattaaatacaaagaggacttgcaggtcctgaagggatttggctgcttcctgtatgacactcctgacatggtccgctcccggcacctgcggaagctctggtctaattacctatacactgataaggcaaggaagatgcgagacaaatacaaagtggtgcttgacactccagaatacagaaaagtgcaagaactgaagacacatctgagtgagctggtctacagagctgcaggcaagaagcagaagtcaatctttacttcagttcctgatactcctgatcttttaagagccaagcgagggcagaagcttcagagtcagtatctgtatgttgaacttgccaccaaagagagaccccatcatcacgctggaaaccagaccacagccttgaagcatgctaaagacgtgaaggacatggtcagtgagaaaaagtacaagattcaatatgaaaagatgaaagacaagtacactccggttccagatacgccaatcctcatcagagccaagagggcttactggaatgccagtgatctacgctacaaagaaacatttcaaaagaccaaagggaaataccacacggtgaaagatgccctagacattgtctatcatcgcaaagtcacagatgacatcagtaaaataaaatacaaggagaactacatgagccagttgggtatctggaggtccattcctgatcgtccagagcatttccaccaccgagcagtcactgacacagtcagtgatgtaaaatataaagaagacttgacttggcttaaaggcattggttgctatgcctatgatacccctgatttcactctggctgaaaagaacaagactctctacagcaagtataagtataaagaagtatttgaaaggacaaagtcagatttcaagtatgttgccgactctccgatcaataggcatttcaagtatgcaactcaattgatgaatgagaaaaaatacagagctgattatgagcagcggaaagataaataccacctggtagtcgatgagcctagacatctgctggctaagacccgcaggcgaccagatcagtcagatcaaatacaggaaaaactatgaaaaatcaaaggacaaatttacctcaattgtggatactccagaacacctgcgtactacaaaagtcaacaaacaaatcagcgatatcctttataaattggaatacaacaaggccaaacccagaggctacaccacaatccacgacacncccatgttgctgcatgtccgcaaggttaaagatgaagtcagtgatctgaaatacaaagaagtataccaaagaaataaatccaactgcaccattgagccagatgctgttcatatcaaagcagccaaggacgcctacaaagtcaacaccaatctggactataagaaacagtacgaagccaacaaagcccactggaagtggactcctgaccgaccggacttcctccaggctgccaagtcatccctgcagcaaagcgattttgaatataagctggaccgggagttcctcaagggttgcaagctttctgtcactgatgacaaaaacacggtgctcgccctcaggaatactttaatagaaagtgatctgaaatacaaagagaaacatgtcaaggaaagaggaacctgccatgccgtacctgacacgcctcagatcctgctggcgaagactgtcagcaacctggtgtctgagaacaagtacaaggaccatgtcaagaagcacttggcacagggctcatacacaacactaccagagacccgggacactgttcacgtcaaggaagtgaccaagcatgtcagtgatacaaattacaaaaagaagtttgtcaaggagaaaggaaaatccaactactccatcatgctggagccaccagaggtgaaacatgctatggaagtggccaagaagcaaagtgatgtcgcttacagaaaagatgccaaagagaacctgcattacaccacagtggctgatcgaccagacatcaagaaggccacacaggcagccaaacaggccagtgaggtggagtacagagccaagcaccgcaaggaaggcagccatggcttaagcatgctcggtcgcccagacatagaaatggccaagaaggcagccaagctgagcagccaggttaaataccgagaaaatttcgataaagaaaagggcaagacaccaaaatacaatccaaaagacagccagctctacaaagtcatgaaagatgctaataatcttgcaagtgaggttaaatacaaggctgacctgaagaaacttcacaaacccgtgactgacatgaaggagtctctgatcatgaatcatgtcctgaatacaagccaacttgccagttcttaccagtacaagaagaagtatgagaagagtaaaggccactaccacaccatacccgataatctggagcagcttcacctaaaagaggccacagaattacagagtatagtgaaatacaaagaaaagtatgaaaaggaacgaggaaaacccatgctggactttgaaacaccaacgtacatcactgccaaagagtctcagcagatgcagagtgggaaagaatataggaaagattatgaagagtccattaaaggcagaaacctgactggcctggaggtcacgccagctttgttacatgtcaaatatgcaactaaaatagcaagcgagaaagagtacaggaaagatctagaggaaagcatccgtgggaagggcctcactgaaatggaagatacacctgacatgctaagagcaaagaatgccactcaaatcctcaatgagaaagaatataagcgagacctggaactggaagtcaaaggaagaggcctgaatgccatggccaatgaaactccggattttatgagggccaggaatgctactgatattgccagtcagattaagtataagcaatcagcagaaatggagaaagccaatttcacttctgtggttgatactccagagatcattcatgcccaacaagtcaagaatctttcaagccagaaaaagtacaaggaagatgctgagaagtccatgtcgtattatgagactgttttggacaccccagagatacagagagtccgggagaaccaaaagaacttcagccttctccaataccagtgtgaccttaaaaacagtaaaggaaaaattacagttgttcaagacacgccagaaatactgcgtgtaaaagaaaatcagaagaatttcagctcggttttatataaagaggatgtctcaccaggaacggctatcggaaagacacctgagatgatgagagtgaaacaaacacaggaccacattagctcggtgaagtataaggaagcaataggacaaggaactccaatccctgacctgcctgaagtgaaacgtgtgaaggagacgcagaagcacattagctcggttatgtacaaagaaaacttgggaacaggcattccaaccactgtgactccagagattgagagagtcaaacgcaatcaagagaactttagctcggttttgtacaaagaaaatttggggaaaggaatcccaacacctatcactccagagatggagagagtcaaacgcaatcaagagaactttagctcggtgttatacaaagaaaacatgggcaagggaactcctttacctgtcactcccgagatggagcgagtcaaacacaatcaagaaaatattagctcggtgttgtacaaagaaaatgtggggaaagccaccgcaacccctgtcactcctgagatgcagagagtcaaacgcaatcaagaaaacattagctcggtgttatacaaagagaacctggggaaagcaacccccacaccctttactcctgagatggaaagagtgaaacgcaatcaagaaaactttagctcggtattgtacaaagagaacatgagaaaagcaactccgacacctgttactccagagatggagagagctaagcgcaaccaagaaaacattagctcggttctttattctgatagtttccggaaacaaatacaaggcaaagctgcctatgtattggatacccccgagatgagacgggtgagggagacccaacggcacatctcaacggtgaaatatcatgaagactttgagaaacacaagggttgcttcacaccagtggtgacagatcctatcactgaacgagtaaagaagaacatgcaggacttcagtgacattaactaccgaggtattcagaggaaagtggtagaaatggaacaaaaacggaatgaccaagatcaggagactattacaggtttacgtgtctggcgtactaatcctggttcggtttttgactatgatccagcagaagacaacatccagtcccgaagcttacacatgattaatgtccaagctcagcgccggagccgggagcagtcacgatctgccagtgcactaagcgtcagtgggggtgaggagaagtctgagcattcagaagcaccagaccaccacctttcgacttacagcgacgggggtgtctttgcagtctcaacagcttacaaacatgcaaaaaccacagagctcccacaacaacgatcatcttcagttgctacccaacagacaacggtatcttccatcccatctcatccatctactgctggaaaaatcttccgtgccatgtatgactatatggctgctgatgcagatgaggtgtccttcaaggatggagatgccatcataaatgttcaagcaattgatgaaggctggatgtatggcactgtgcagaggactggcaggaccggaatgctcccagccaactacgttgaagctatttaggcatttcaaagcatcacacttgtctgcaggacttacagatcctgcagtcaatgtttcggtttagactctccactgttacctaagttctcaagctgcctatggtttttctgtgtcaatgtgatttatggtagtaccatcctttctcctttgggttttaaaataagttgcagaacagacactttaaaagcttctgcaatattatttctgtgcctagagtctttctccattataaacatgttttaacattatttcttttctaaaacagggattttgaatatgccaaacacattaaaggaaaaatagcagagatgttcaccttttccttgctgattgctaatgcttattatttctaattcagttctgaagttataaacttataatcaatacaaaccagcaactaataaaacctctaattctgcaa

SEQ ID NO: 286036 - DNA, 9479 bp, Homo sapiens
  misc_feature (5809)..(5809): n is a, c, g, or t
agagaatataagaaagcttatgagaagtctaaaggaattcacaacacaccgttggacatgatgtcaattgttcaagccaagaaatgccaggtcctggttagcgacattgattatcgcaattatctgcaccagtggacgtgtctgccagatcagaacgatgtgatccaggccaagaaagcctacgacctgcagagcgataacttgtacaagtcagacctggaatggctgaagggtattggatggttgccagagggttctgtggaagtgatgagagtgaagaatgcccagaatctcttgaatgaaaggctgtatcgtataaagcctgaggccctcaaattcaccagcattgttgacaccccggaagtaatccaggcaaagatcaatgctgtacagatcagtgagccattgtatcgcgatgcctgggagaaagagaaggctaatgtgaacgtgccagctgacactcccctgatgctgcaatccaaaatcaatgccctgcagatcagcaataaacgctatcagcaagcttgggaagatgtcaagatgactggttatgacctgcgagcagatgccattgggatccagcatgccaaggcttccagggatattgccagtgactatctgtacaaaactgcttatgagaaacagaaaggccattacattggctgtcgcagcgccaaggaagaccctaaactggtttgggcagcaaatgtgttgaagatgcagaatgacaggctgtacaaaaaggcctacaacgaccacaaagccaagatctccatccctgtggacatggtgtccatcagcgctgccaaagaaggtcaggcactggcaagtgatgtggactatcgccattacctgcaccgctggtcttgctttcccgaccagaatgatgtgatccaagccaggaaagcctacgacctacagagcgacgccctctacaaggctgacttggagtggttgcgtggcattggctggatgccccaagggtctcctgaagtgttgagagtcaaaaacgcccagaatatcttttgtgacagtgtctatcggacgcctgtggtgaaccttaagtacacaagcattgttgacacacctgaagtggtccttgctaaatcaaatgctgaaaatattagtattccaaagtacagagaggtttgggacaaggataaaacttcaatacacataatgccagatactccagaaattaatctcgctagagcaaatgctcttaatgtgagcaataaactttaccgtgagggctgggatgaaatgaaggcgggctgtgatgtccggctggatgccatccccatccaggctgccaaggcctccagggagattgccagtgactataaatataagcttgaccatgagaagcagaagggacactacgtgggcaccctcacagccagggatgacaacaagatccgctgggccctcatagctgacaagctccagaatgaacgagagtaccggctggactgggccaaatggaaggccaagatccagagccctgtggacatgctttccatcctgcactctaaaaattcccaggctctggtcagtgacatggattaccgcaattacctgcaccagtggacctgcatgcccgaccagaacgatgtgattcaggccaagaaggcctacgaactgcagagcgataatgtttacaaggctgacttggaatggttgcgtggaattgggtggatgccaaatgactccgtgtccgtcaatcatgccaaacatgccgcggacatcttcagtgagaaaaaatatcgcacaaaaatagaaactctcaactttacgcctgtggatgacagagttgattatgtgacagcgaaacaaagtggcgagatcctcgatgatattaaataccggaaagactggaatgccaccaaatcaaagtacaccctcacagaaacccccctgctgcacactgcccaggaggctgctaggatactggaccagtatctctacaaggaaggctgggagagacaaaaagccacaggttacattttgcctccagatgctgtgccatttgttcatgcccatcactgcaatgacgttcagagtgagctgaaatacaaagctgaacatgtgaagcaaaaaggtcattatgttggtgtcccgacgatgagagatgatcctaagctggtttggtttgagcatgcaggccagattcagaatgagagactatacaaagaggactatcacaaaacaaaggccaaaatcaatatacctgctgatatggtgtcagtcttggccgccaagcaggggcagacccttgtcagtgatattgattatcgtaattacttgcaccaatggatgtgtcatcctgaccagaacgatgttattcaggcaagaaaggcctatgacctacagagtgataatgtctacagagctgacctggagtggctccgaggcattggctggatcccactggattctgtggaccatgtaagggttactaagaaccaggaaatgatgagtcagatcaaatataagaaaaatgcccttgaaaactatcctaactttacaagtgtggtggatcctccagagattgttttagccaagattaattctgtcaatcaaagtgatgtaaaatataaagaaacatttaataaagcaaagggcaaatatacgttttcaccagatacaccacatatctcccactccaaagacatgggaaaactctacagtactatactgtataaaggggcgtgggagggcaccaaggcctatggctacaccctggatgagcgctacattcccattgttggagccaagcatgctgatctggtgaacagtgagcttaaatacaaagagacatatgagaagcagaaaggtcactacctggctggaaaagtgatcggtgaattccctggtgtggttcactgtctggatttccaaaagatgaggagtgcgttgaactacagaaaacattatgaggataccaaagcaaatgttcatatccccaatgacatgatgaatcacgtgctggctaaaaggtgccagtacatcctcagtgacctggagtatcgacactatttccaccagtggacgtctcttctggaagaacccaatgttatacgcgtccgaaacgcccaggagatcttgagtgataatgtgtataaagatgacctgaattggttgaaaggcattggttgctacgtttgggatacaccccaaatcctccatgccaagaaatcatacgaccttcagagtcagctacaatatacagcagcaggtaaagaaaatctacaaaactataatctggtcacagacacgcccctctatgtgactgctgttcagagtggcattaatgccagtgaggtaaaatataaagaaaattatcatcagattaaggacaaatacacaacagttctagaaacagtggattatgacagaaccagaaacctgaagaatctttacagcagtaacctgtacaaggaggcctgggatagagtgaaagccaccagctacatcctgccttccagcaccttgtccctgacacacgccaagaaccagaagcatctggccagccatatcaaatatcgggaagaatatgaaaagttcaaagctctttatacgttaccaagaagtgttgacgatgatccgaacacagcacggtgcctccgagttggcaagcttaacatcgatcgcctgtacagatcagtttatgaaaagaacaagatgaaaatccacatcgtgcccgacatggtagagatggttactgccaaggattcccagaagaaagtcagtgagattgattaccgcctgcgcctccacgaatggatttgccaccccgacttgcaagtcaatgatcacgtcaggaaagtcacagatcagatcagcgatattgtatacaaggatgacctcaactggctgaaaggcattggttgctacgtctgggacactcctgaaatcctccatgccaagcatgcttatgatctacgtgatgatatcaagtataaagctcacatgttgaaaacaaggaatgactacaagcttgtcacagatacaccagtctacgtgcaggctgtcaaaagtgggaaacagctaagtgacgctgtctaccactatgactatgtgcacagtgtcagaggcaaagtggctccaactaccaaaaccgtggatctggaccgggcccttcatgcatacaagctccagagttcgaatctatacaaaaccagcctgcgcaccctgcccactggatatagacttccaggtgacactcctcacttcaaacacatcaaggacacccgttacatgagcagttatttcaagtacaaagaagcctatgaacacaccaaggcatatgggtatacacttggccccaaagatgttccatttgtccacgtccggagagtcaacaatgttaccagcgagagactgtatcgggaattgtaccacaaactgaaagacaagatccatacaactcccgatacccctgagatccgccaagtcaagaagacacaagaggctgtcagtgagttgatctacaaatcagacttcttcaagatgcagggccacatgatctctctgccatacacaccccaagtgatccattgccgctatgtgggagacatcaccagtgatattaaatacaaagaggacttgcaggtcctgaagggatttggctgcttcctgtatgacactcctgacatggtccgctcccggcacctgcggaagctctggtctaattacctatacactgataaggcaaggaagatgcgagacaaatacaaagtggtgcttgacactccagaatacagaaaagtgcaagaactgaagacacatctgagtgagctggtctacagagctgcaggcaagaagcagaagtcaatctttacttcagttcctgatactcctgatcttttaagagccaagcgagggcagaagcttcagagtcagtatctgtatgttgaacttgccaccaaagagagaccccatcatcacgctggaaaccagaccacagccttgaagcatgctaaagacgtgaaggacatggtcagtgagaaaaagtacaagattcaatatgaaaagatgaaagacaagtacactccggttccagatacgccaatcctcatcagagccaagagggcttactggaatgccagtgatctacgctacaaagaaacatttcaaaagaccaaagggaaataccacacggtgaaagatgccctagacattgtctatcatcgcaaagtcacagatgacatcagtaaaataaaatacaaggagaactacatgagccagttgggtatctggaggtccattcctgatcgtccagagcatttccaccaccgagcagtcactgacacagtcagtgatgtaaaatataaagaagacttgacttggcttaaaggcattggttgctatgcctatgatacccctgatttcactctggctgaaaagaacaagactctctacagcaagtataagtataaagaagtatttgaaaggacaaagtcagatttcaagtatgttgccgactctccgatcaataggcatttcaagtatgcaactcaattgatgaatgagaaaaaatacagagctgattatgagcagcggaaagataaataccacctggtagtcgatgagcctagacatctgctggctaagacccgcaggcgaccagatcagtcagatcaaatacaggaaaaactatgaaaaatcaaaggacaaatttacctcaattgtggatactccagaacacctgcgtactacaaaagtcaacaaacaaatcagcgatatcctttataaattggaatacaacaaggccaaacccagaggctacaccacaatccacgacacncccatgttgctgcatgtccgcaaggttaaagatgaagtcagtgatctgaaatacaaagaagtataccaaagaaataaatccaactgcaccattgagccagatgctgttcatatcaaagcagccaaggacgcctacaaagtcaacaccaatctggactataagaaacagtacgaagccaacaaagcccactggaagtggactcctgaccgaccggacttcctccaggctgccaagtcatccctgcagcaaagcgattttgaatataagctggaccgggagttcctcaagggttgcaagctttctgtcactgatgacaaaaacacggtgctcgccctcaggaatactttaatagaaagtgatctgaaatacaaagagaaacatgtcaaggaaagaggaacctgccatgccgtacctgacacgcctcagatcctgctggcgaagactgtcagcaacctggtgtctgagaacaagtacaaggaccatgtcaagaagcacttggcacagggctcatacacaacactaccagagacccgggacactgttcacgtcaaggaagtgaccaagcatgtcagtgatacaaattacaaaaagaagtttgtcaaggagaaaggaaaatccaactactccatcatgctggagccaccagaggtgaaacatgctatggaagtggccaagaagcaaagtgatgtcgcttacagaaaagatgccaaagagaacctgcattacaccacagtggctgatcgaccagacatcaagaaggccacacaggcagccaaacaggccagtgaggtggagtacagagccaagcaccgcaaggaaggcagccatggcttaagcatgctcggtcgcccagacatagaaatggccaagaaggcagccaagctgagcagccaggttaaataccgagaaaatttcgataaagaaaagggcaagacaccaaaatacaatccaaaagacagccagctctacaaagtcatgaaagatgctaataatcttgcaagtgaggttaaatacaaggctgacctgaagaaacttcacaaacccgtgactgacatgaaggagtctctgatcatgaatcatgtcctgaatacaagccaacttgccagttcttaccagtacaagaagaagtatgagaagagtaaaggccactaccacaccatacccgataatctggagcagcttcacctaaaagaggccacagaattacagagtatagtgaaatacaaagaaaagtatgaaaaggaacgaggaaaacccatgctggactttgaaacaccaacgtacatcactgccaaagagtctcagcagatgcagagtgggaaagaatataggaaagattatgaagagtccattaaaggcagaaacctgactggcctggaggtcacgccagctttgttacatgtcaaatatgcaactaaaatagcaagcgagaaagagtacaggaaagatctagaggaaagcatccgtgggaagggcctcactgaaatggaagatacacctgacatgctaagagcaaagaatgccactcaaatcctcaatgagaaagaatataagcgagacctggaactggaagtcaaaggaagaggcctgaatgccatggccaatgaaactccggattttatgagggccaggaatgctactgatattgccagtcagattaagtataagcaatcagcagaaatggagaaagccaatttcacttctgtggttgatactccagagatcattcatgcccaacaagtcaagaatctttcaagccagaaaaagtacaaggaagatgctgagaagtccatgtcgtattatgagactgttttggacaccccagagatacagagagtccgggagaaccaaaagaacttcagccttctccaataccagtgtgaccttaaaaacagtaaaggaaaaattacagttgttcaagacacgccagaaatactgcgtgtaaaagaaaatcagaagaatttcagctcggttttatataaagaggatgtctcaccaggaacggctatcggaaagacacctgagatgatgagagtgaaacaaacacaggaccacattagctcggtgaagtataaggaagcaataggacaaggaactccaatccctgacctgcctgaagtgaaacgtgtgaaggagacgcagaagcacattagctcggttatgtacaaagaaaacttgggaacaggcattccaaccactgtgactccagagattgagagagtcaaacgcaatcaagagaactttagctcggtgttatacaaagaaaacatgggcaagggaactcctttacctgtcactcccgagatggagcgagtcaaacacaatcaagaaaatattagctcggtgttgtacaaagaaaatgtggggaaagccaccgcaacccctgtcactcctgagatgcagagagtcaaacgcaatcaagaaaacattagctcggttctttattctgatagtttccggaaacaaatacaaggcaaagctgcctatgtattggatacccccgagatgagacgggtgagggagacccaacggcacatctcaacggtgaaatatcatgaagactttgagaaacacaagggttgcttcacaccagtggtgacagatcctatcactgaacgagtaaagaagaacatgcaggacttcagtgacattaactaccgaggtattcagaggaaagtggtagaaatggaacaaaaacggaatgaccaagatcaggagactattacaggtttacgtgtctggcgtactaatcctggttcggtttttgactatgatccagcagaagacaacatccagtcccgaagcttacacatgattaatgtccaagctcagcgccggagccgggagcagtcacgatctgccagtgcactaagcgtcagtgggggtgaggagaagtctgagcattcagaagcaccagaccaccacctttcgacttacagcgacgggggtgtctttgcagtctcaacagcttacaaacatgcaaaaaccacagagctcccacaacaacgatcatcttcagttgctacccaacagacaacggtatcttccatcccatctcatccatctactgctggaaaaatcttccgtgccatgtatgactatatggctgctgatgcagatgaggtgtccttcaaggatggagatgccatcataaatgttcaagcaattgatgaaggctggatgtatggcactgtgcagaggactggcaggaccggaatgctcccagccaactacgttgaagctatttaggcatttcaaagcatcacacttgtctgcaggacttacagatcctgcagtcaatgtttcggtttagactctccactgttacctaagttctcaagctgcctatggtttttctgtgtcaatgtgatttatggtagtaccatcctttctcctttgggttttaaaataagttgcagaacagacactttaaaagcttctgcaatattatttctgtgcctagagtctttctccattataaacatgttttaacattatttcttttctaaaacagggattttgaatatgccaaacacattaaaggaaaaatagcagagatgttcaccttttccttgctgattgctaatgcttattatttctaattcagttctgaagttataaacttataatcaatacaaaccagcaactaataaaacctctaattctgcaa

SEQ ID NO: 286037 - DNA, 2104 bp, Homo sapiens
atcataaaaacacgcctttctcattcaactgaaaaacacactaaaattttaaaagagaaaaatgcaacatcttggaaagtaacgttttaacaccataaaaatttgcacttattcaactgaaaatttacactaaaatagacattaactgtgcttttacattccaaaccatcatactaaacataacaagttaattgccaatgttttccttcccctatactttgaggtagttctacgtaaccaactataacaaatttacttcctaacatcctcaatcttctgctctcctttagttttaagatactttatgacatgggtaatactctgaaatggatgccttctttggatatattttggggttttagtgtctggaggactttgatttctatattagcatattggtttatgaagtctggacataacctaaggaaaataatcacttgttttaaaggacagttctttcaaattccctacaatgtcagatttagagccaaataccatcgaatatgttgatgctgtaattcctagcaaatttcaagaggtcactctcttttcaaaattataccgtgccccttctttgaaaatgagtttcattttcgaagtcaaaacaagtcctttctcttccactggcgggcccttctggtccccagattagcctgttccaaaattggtcatgtgtctcactgggccccttcagttgacccaagcgtccctcaccagctcctatccatctctatctgctggaaaggctttgaggtttcagatttaggacagcaccactcattcatggtctctcctgcatcaggttctttattctgatagtttccggaaacaaatacaaggcaaagctgcctatgtattggatacccccgagatgagacgggtgagggagacccaacggcacatctcaacggtgaaatatcatgaagactttgagaaacacaagggttgcttcacaccagtggtgacagatcctatcactgaacgagtaaagaagaacatgcaggacttcagtgacattaactaccgaggtattcagaggaaagtggtagaaatggaacaaaaacggaatgaccaagatcaggagactattacaggtaactgagcctgggttgggggaggggattaactttaagtgagggggtagaagaacaaaagtagcattacctacatcaagtcaaaacataaaggacttcaatctgtttttctagaggtgcaagaaagctcctattatctcatagtttacaaagctgatttctaccttatctttgttctcctctgaggaaaagacatgacccagaacctaagctggaataagtgtgattcaatcctttggtggttgttaaaattcatgccttggttttcaagttattggaaaactccaagaacacttgttctgatcactggtttccctttcaggtttacgtgtctggcgtactaatcctggttcggtttttgactatgatccagcagaagacaacatccagtcccgaagcttacacatgattaatggtgtgttagctgaaaaaggcttacaacataaacatcaccatttagtatgctagagtcaatgactttcatttgggctctgaagttccttccctccagagttttccattttctgagctgcccatttggcataaaaataccttgttaactagtgagcaaaacttactttctagataagttcaagttagaaaaaattttgtttcactgcctcagtgcatgtctcccattattatcatttctaattttttcttccaaagaaaaaacagtagtaattctattggagaaataatgaaaatacataaaatacataggcaaagggaagagaaaggatttgacctgtaggaacttcctgagctctattgcatcaaggaagtttattcattacacaaagcaggctgcacaacttcattccttcttttcatgttaaaaagcagaatactagcctggaaaagagaatgagaccccttttctacaaacagtaaaaaaaaattagccgcgagtggtgttgtacacctgtagtaccagctgttcagggggctgaagtgggaggatagcttgagcctagaaagttgaagctgcagtgagccgtgattgtacc

SEQ ID NO: 286038 - DNA, 9571 bp, Homo sapiens
  misc_feature (5808)..(5808): n is a, c, g, or t
agagaatataagaaagcttatgagaagtctaaaggaattcacaacacaccgttggacatgatgtcaattgttcaagccaagaaatgccaggtcctggttagcgacattgattatcgcaattatctgcaccagtggacgtgtctgccagatcagaacgatgtgatccaggccaagaaagcctacgacctgcagagcgataacttgtacaagtcagacctggaatggctgaagggtattggatggttgccagagggttctgtggaagtgatgagagtgaagaatgcccagaatctcttgaatgaaaggctgtatcgtataaagcctgaggccctcaaattcaccagcattgttgacaccccggaagtaatccaggcaaagatcaatgctgtacagatcagtgagccattgtatcgcgatgcctgggagaaagagaaggctaatgtgaacgtgccagctgacactcccctgatgctgcaatccaaaatcaatgccctgcagatcagcaataaacgctatcagcaagcttgggaagatgtcaagatgactggttatgacctgcgagcagatgccattgggatccagcatgccaaggcttccagggatattgccagtgactatctgtacaaaactgcttatgagaaacagaaaggccattacattggctgtcgcagcgccaaggaagaccctaaactggtttgggcagcaaatgtgttgaagatgcagaatgacaggctgtacaaaaaggcctacaacgaccacaaagccaagatctccatccctgtggacatggtgtccatcagcgctgccaaagaaggtcaggcactggcaagtgatgtggactatcgccattacctgcaccgctggtcttgctttcccgaccagaatgatgtgatccaagccaggaaagcctacgacctacagagcgacgccctctacaaggctgacttggagtggttgcgtggcattggctggatgccccaagggtctcctgaagtgttgagagtcaaaaacgcccagaatatcttttgtgacagtgtctatcggacgcctgtggtgaaccttaagtacacaagcattgttgacacacctgaagtggtccttgctaaatcaaatgctgaaaatattagtattccaaagtacagagaggtttgggacaaggataaaacttcaatacacataatgccagatactccagaaattaatctcgctagagcaaatgctcttaatgtgagcaataaactttaccgtgagggctgggatgaaatgaaggcgggctgtgatgtccggctggatgccatccccatccaggctgccaaggcctccagggagattgccagtgactataaatataagcttgaccatgagaagcagaagggacactacgtgggcaccctcacagccagggatgacaacaagatccgctgggccctcatagctgacaagctccagaatgaacgagagtaccggctggactgggccaaatggaaggccaagatccagagccctgtggacatgctttccatcctgcactctaaaaattcccaggctctggtcagtgacatggattaccgcaattacctgcaccagtggacctgcatgcccgaccagaacgatgtgattcaggccaagaaggcctacgaactgcagagcgataatgtttacaaggctgacttggaatggttgcgtggaattgggtggatgccaaatgactccgtgtccgtcaatcatgccaaacatgccgcggacatcttcagtgagaaaaaatatcgcacaaaaatagaaactctcaactttacgcctgtggatgacagagttgattatgtgacagcgaaacaaagtggcgagatcctcgatgatattaaataccggaaagactggaatgccaccaaatcaaagtacaccctcacagaaacccccctgctgcacactgcccaggaggctgctaggatactggaccagtatctctacaaggaaggctgggagagacaaaaagccacaggttacattttgcctccagatgctgtgccatttgttcatgcccatcactgcaatgacgttcagagtgagctgaaatacaaagctgaacatgtgaagcaaaaaggtcattatgttggtgtcccgacgatgagagatgatcctaagctggtttggtttgagcatgcaggccagattcagaatgagagactatacaaagaggactatcacaaaacaaaggccaaaatcaatatacctgctgatatggtgtcagtcttggccgccaagcaggggcagacccttgtcagtgatattgattatcgtaattacttgcaccaatggatgtgtcatcctgaccagaacgatgttattcaggcaagaaaggcctatgacctacagagtgataatgtctacagagctgacctggagtggctccgaggcattggctggatcccactggattctgtggaccatgtaagggttactaagaaccaggaaatgatgagtcagatcaaatataagaaaaatgcccttgaaaactatcctaactttacaagtgtggtggatcctccagagattgttttagccaagattaattctgtcaatcaaagtgatgtaaaatataaagaaacatttaataaagcaaagggcaaatatacgttttcaccagatacaccacatatctcccactccaaagacatgggaaaactctacagtactatactgtataaaggggcgtgggagggcaccaaggcctatggctacaccctggatgagcgctacattcccattgttggagccaagcatgctgatctggtgaacagtgagcttaaatacaaagagacatatgagaagcagaaaggtcactacctggctggaaaagtgatcggtgaattccctggtgtggttcactgtctggatttccaaaagatgaggagtgcgttgaactacagaaaacattatgaggataccaaagcaaatgttcatatccccaatgacatgatgaatcacgtgctggctaaaaggtgccagtacatcctcagtgacctggagtatcgacactatttccaccagtggacgtctcttctggaagaacccaatgttatacgcgtccgaaacgcccaggagatcttgagtgataatgtgtataaagatgacctgaattggttgaaaggcattggttgctacgtttgggatacaccccaaatcctccatgccaagaaatcatacgaccttcagagtcagctacaatatacagcagcaggtaaagaaaatctacaaaactataatctggtcacagacacgcccctctatgtgactgctgttcagagtggcattaatgccagtgaggtaaaatataaagaaaattatcatcagattaaggacaaatacacaacagttctagaaacagtggattatgacagaaccagaaacctgaagaatctttacagcagtaacctgtacaaggaggcctgggatagagtgaaagccaccagctacatcctgccttccagcaccttgtccctgacacacgccaagaaccagaagcatctggccagccatatcaaatatcgggaagaatatgaaaagttcaaagctctttatacgttaccaagaagtgttgacgatgatccgaacacagcacggtgcctccgagttggcaagcttaacatcgatcgcctgtacagatcagtttatgaaaagaacaagatgaaaatccacatcgtgcccgacatggtagagatggttactgccaaggattcccagaagaaagtcagtgagattgattaccgcctgcgcctccacgaatggatttgccaccccgacttgcaagtcaatgatcacgtcaggaaagtcacagatcagatcagcgatattgtatacaaggatgacctcaactggctgaaaggcattggttgctacgtctgggacactcctgaaatcctccatgccaagcatgcttatgatctacgtgatgatatcaagtataaagctcacatgttgaaaacaaggaatgactacaagcttgtcacagatacaccagtctacgtgcaggctgtcaaaagtgggaaacagctaagtgacgctgtctaccactatgactatgtgcacagtgtcagaggcaaagtggctccaactaccaaaaccgtggatctggaccgggcccttcatgcatacaagctccagagttcgaatctatacaaaaccagcctgcgcaccctgcccactggatatagacttccaggtgacactcctcacttcaaacacatcaaggacacccgttacatgagcagttatttcaagtacaaagaagcctatgaacacaccaaggcatatgggtatacacttggccccaaagatgttccatttgtccacgtccggagagtcaacaatgttaccagcgagagactgtatcgggaattgtaccacaaactgaaagacaagatccatacaactcccgatacccctgagatccgccaagtcaagaagacacaagaggctgtcagtgagttgatctacaaatcagacttcttcaagatgcagggccacatgatctctctgccatacacaccccaagtgatccattgccgctatgtgggagacatcaccagtgatattaaatacaaagaggacttgcaggtcctgaagggatttggctgcttcctgtatgacactcctgacatggtccgctcccggcacctgcggaagctctggtctaattacctatacactgataaggcaaggaagatgcgagacaaatacaaagtggtgcttgacactccagaatacagaaaagtgcaagaactgaagacacatctgagtgagctggtctacagagctgcaggcaagaagcagaagtcaatctttacttcagttcctgatactcctgatcttttaagagccaagcgagggcagaagcttcagagtcagtatctgtatgttgaacttgccaccaaagagagaccccatcatcacgctggaaaccagaccacagccttgaagcatgctaaagacgtgaaggacatggtcagtgagaaaaagtacaagattcaatatgaaaagatgaaagacaagtacactccggttccagatacgccaatcctcatcagagccaagagggcttactggaatgccagtgatctacgctacaaagaaacatttcaaaagaccaaagggaaataccacacggtgaaagatgccctagacattgtctatcatcgcaaagtcacagatgacatcagtaaaataaaatacaaggagaactacatgagccagttgggtatctggaggtccattcctgatcgtccagagcatttccaccaccgagcagtcactgacacagtcagtgatgtaaaatataaagaagacttgacttggcttaaaggcattggttgctatgcctatgatacccctgatttcactctggctgaaaagaacaagactctctacagcaagtataagtataaagaagtatttgaaaggacaaagtcagatttcaagtatgttgccgactctccgatcaataggcatttcaagtatgcaactcaattgatgaatgagagaaaatataaatctagtgccaagatgtttctgcaacatggatgtaatgaaattctgcgtccagatatgttgactgctctctacaattcgcatatgtggagccagatcaaatacaggaaaaactatgaaaaatcaaaggacaaatttacctcaattgtggatactccagaacacctgcgtactacaaaagtcaacaaacaaatcagcgatatcctttataaattggaatacaacaaggccaaacccagaggctacaccacaatccacgacacncccatgttgctgcatgtccgcaaggttaaagatgaagtcagtgatctgaaatacaaagaagtataccaaagaaataaatccaactgcaccattgagccagatgctgttcatatcaaagcagccaaggacgcctacaaagtcaacaccaatctggactataagaaacagtacgaagccaacaaagcccactggaagtggactcctgaccgaccggacttcctccaggctgccaagtcatccctgcagcaaagcgattttgaatataagctggaccgggagttcctcaagggttgcaagctttctgtcactgatgacaaaaacacggtgctcgccctcaggaatactttaatagaaagtgatctgaaatacaaagagaaacatgtcaaggaaagaggaacctgccatgccgtacctgacacgcctcagatcctgctggcgaagactgtcagcaacctggtgtctgagaacaagtacaaggaccatgtcaagaagcacttggcacagggctcatacacaacactaccagagacccgggacactgttcacgtcaaggaagtgaccaagcatgtcagtgatacaaattacaaaaagaagtttgtcaaggagaaaggaaaatccaactactccatcatgctggagccaccagaggtgaaacatgctatggaagtggccaagaagcaaagtgatgtcgcttacagaaaagatgccaaagagaacctgcattacaccacagtggctgatcgaccagacatcaagaaggccacacaggcagccaaacaggccagtgaggtggagtacagagccaagcaccgcaaggaaggcagccatggcttaagcatgctcggtcgcccagacatagaaatggccaagaaggcagccaagctgagcagccaggttaaataccgagaaaatttcgataaagaaaagggcaagacaccaaaatacaatccaaaagacagccagctctacaaagtcatgaaagatgctaataatcttgcaagtgaggttaaatacaaggctgacctgaagaaacttcacaaacccgtgactgacatgaaggagtctctgatcatgaatcatgtcctgaatacaagccaacttgccagttcttaccagtacaagaagaagtatgagaagagtaaaggccactaccacaccatacccgataatctggagcagcttcacctaaaagaggccacagaattacagagtatagtgaaatacaaagaaaagtatgaaaaggaacgaggaaaacccatgctggactttgaaacaccaacgtacatcactgccaaagagtctcagcagatgcagagtgggaaagaatataggaaagattatgaagagtccattaaaggcagaaacctgactggcctggaggtcacgccagctttgttacatgtcaaatatgcaactaaaatagcaagcgagaaagagtacaggaaagatctagaggaaagcatccgtgggaagggcctcactgaaatggaagatacacctgacatgctaagagcaaagaatgccactcaaatcctcaatgagaaagaatataagcgagacctggaactggaagtcaaaggaagaggcctgaatgccatggccaatgaaactccggattttatgagggccaggaatgctactgatattgccagtcagattaagtataagcaatcagcagaaatggagaaagccaatttcacttctgtggttgatactccagagatcattcatgcccaacaagtcaagaatctttcaagccagaaaaagtacaaggaagatgctgagaagtccatgtcgtattatgagactgttttggacaccccagagatacagagagtccgggagaaccaaaagaacttcagccttctccaataccagtgtgaccttaaaaacagtaaaggaaaaattacagttgttcaagacacgccagaaatactgcgtgtaaaagaaaatcagaagaatttcagctcggttttatataaagaggatgtctcaccaggaacggctatcggaaagacacctgagatgatgagagtgaaacaaacacaggaccacattagctcggtgaagtataaggaagcaataggacaaggaactccaatccctgacctgcctgaagtgaaacgtgtgaaggagacgcagaagcacattagctcggttatgtacaaagaaaacttgggaacaggcattccaaccactgtgactccagagattgagagagtcaaacgcaatcaagagaactttagctcggttttgtacaaagaaaatttggggaaaggaatcccaacacctatcactccagagatggagagagtcaaacgcaatcaagagaactttagctcggtgttgtacaaagaaaatgtggggaaagccaccgcaacccctgtcactcctgagatgcagagagtcaaacgcaatcaagaaaacattagctcggtattgtacaaagagaacatgagaaaagcaactccgacacctgttactccagagatggagagagctaagcgcaaccaagaaaacattagctcggttctttattctgatagtttccggaaacaaatacaaggcaaagctgcctatgtattggatacccccgagatgagacgggtgagggagacccaacggcacatctcaacggtgaaatatcatgaagactttgagaaacacaagggttgcttcacaccagtggtgacagatcctatcactgaacgagtaaagaagaacatgcaggacttcagtgacattaactaccgaggtattcagaggaaagtggtagaaatggaacaaaaacggaatgaccaagatcaggagactattacaggtttacgtgtctggcgtactaatcctggttcggtttttgactatgatccagcagaagacaacatccagtcccgaagcttacacatgattaatgtccaagctcagcgccggagccgggagcagtcacgatctgccagtgcactaagcgtcagtgggggtgaggagaagtctgagcattcagaagcaccagaccaccacctttcgacttacagcgacgggggtgtctttgcagtctcaacagcttacaaacatgcaaaaaccacagagctcccacaacaacgatcatcttcagttgctacccaacagacaacggtatcttccatcccatctcatccatctactgctggaaaaatcttccgtgccatgtatgactatatggctgctgatgcagatgaggtgtccttcaaggatggagatgccatcataaatgttcaagcaattgatgaaggctggatgtatggcactgtgcagaggactggcaggaccggaatgctcccagccaactacgttgaagctatttaggcatttcaaagcatcacacttgtctgcaggacttacagatcctgcagtcaatgtttcggtttagactctccactgttacctaagttctcaagctgcctatggtttttctgtgtcaatgtgatttatggtagtaccatcctttctcctttgggttttaaaataagttgcagaacagacactttaaaagcttctgcaatattatttctgtgcctagagtctttctccattataaacatgttttaacattatttcttttctaaaacagggattttgaatatgccaaacacattaaaggaaaaatagcagagatgttcaccttttccttgctgattgctaatgcttattatttctaattcagttctgaagttataaacttataatcaatacaaaccagcaactaataaaacctctaattctgcaa

SEQ ID NO: 286039 - DNA, 6851 bp, Homo sapiens
  misc_feature (3088)..(3088): n is a, c, g, or t
gtgaacgcagtgaatcgtatcatgtcatagctgttccatgatgtaacaacccggcaccttgccggtcgttaattggaagacgcttaaatacaaagagacatatgagaagcagaaaggtcactacctggctggaaaagtgatcggtgaattccctggtgtggttcactgtctggatttccaaaagatgaggagtgcgttgaactacagaaaacattatgaggataccaaagcaaatgttcatatccccaatgacatgatgaatcacgtgctggctaaaaggtgccagtacatcctcagtgacctggagtatcgacactatttccaccagtggacgtctcttctggaagaacccaatgttatacgcgtccgaaacgcccaggagatcttgagtgataatgtgtataaagatgacctgaattggttgaaaggcattggttgctacgtttgggatacaccccaaatcctccatgccaagaaatcatacgaccttcagagtcagctacaatatacagcagcaggtaaagaaaatctacaaaactataatctggtcacagacacgcccctctatgtgactgctgttcagagtggcattaatgccagtgaggtaaaatataaagaaaattatcatcagattaaggacaaatacacaacagttctagaaacagtggattatgacagaaccagaaacctgaagaatctttacagcagtaacctgtacaaggaggcctgggatagagtgaaagccaccagctacatcctgccttccagcaccttgtccctgacacacgccaagaaccagaagcatctggccagccatatcaaatatcgggaagaatatgaaaagttcaaagctctttatacgttaccaagaagtgttgacgatgatccgaacacagcacggtgcctccgagttggcaagcttaacatcgatcgcctgtacagatcagtttatgaaaagaacaagatgaaaatccacatcgtgcccgacatggtagagatggttactgccaaggattcccagaagaaagtcagtgagattgattaccgcctgcgcctccacgaatggatttgccaccccgacttgcaagtcaatgatcacgtcaggaaagtcacagatcagatcagcgatattgtatacaaggatgacctcaactggctgaaaggcattggttgctacgtctgggacactcctgaaatcctccatgccaagcatgcttatgatctacgtgatgatatcaagtataaagctcacatgttgaaaacaaggaatgactacaagcttgtcacagatacaccagtctacgtgcaggctgtcaaaagtgggaaacagctaagtgacgctgtctaccactatgactatgtgcacagtgtcagaggcaaagtggctccaactaccaaaaccgtggatctggaccgggcccttcatgcatacaagctccagagttcgaatctatacaaaaccagcctgcgcaccctgcccactggatatagacttccaggtgacactcctcacttcaaacacatcaaggacacccgttacatgagcagttatttcaagtacaaagaagcctatgaacacaccaaggcatatgggtatacacttggccccaaagatgttccatttgtccacgtccggagagtcaacaatgttaccagcgagagactgtatcgggaattgtaccacaaactgaaagacaagatccatacaactcccgatacccctgagatccgccaagtcaagaagacacaagaggctgtcagtgagttgatctacaaatcagacttcttcaagatgcagggccacatgatctctctgccatacacaccccaagtgatccattgccgctatgtgggagacatcaccagtgatattaaatacaaagaggacttgcaggtcctgaagggatttggctgcttcctgtatgacactcctgacatggtccgctcccggcacctgcggaagctctggtctaattacctatacactgataaggcaaggaagatgcgagacaaatacaaagtggtgcttgacactccagaatacagaaaagtgcaagaactgaagacacatctgagtgagctggtctacagagctgcaggcaagaagcagaagtcaatctttacttcagttcctgatactcctgatcttttaagagccaagcgagggcagaagcttcagagtcagtatctgtatgttgaacttgccaccaaagagagaccccatcatcacgctggaaaccagaccacagccttgaagcatgctaaagacgtgaaggacatggtcagtgagaaaaagtacaagattcaatatgaaaagatgaaagacaagtacactccggttccagatacgccaatcctcatcagagccaagagggcttactggaatgccagtgatctacgctacaaagaaacatttcaaaagaccaaagggaaataccacacggtgaaagatgccctagacattgtctatcatcgcaaagtcacagatgacatcagtaaaataaaatacaaggagaactacatgagccagttgggtatctggaggtccattcctgatcgtccagagcatttccaccaccgagcagtcactgacacagtcagtgatgtaaaatataaagaagacttgacttggcttaaaggcattggttgctatgcctatgatacccctgatttcactctggctgaaaagaacaagactctctacagcaagtataagtataaagaagtatttgaaaggacaaagtcagatttcaagtatgttgccgactctccgatcaataggcatttcaagtatgcaactcaattgatgaatgagagaaaatataaatctagtgccaagatgtttctgcaacatggatgtaatgaaattctgcgtccagatatgttgactgctctctacaattcgcatatgtggagccagatcaaatacaggaaaaactatgaaaaatcaaaggacaaatttacctcaattgtggatactccagaacacctgcgtactacaaaagtcaacaaacaaatcagcgatatcctttataaattggaatacaacaaggccaaacccagaggctacaccacaatccacgacacncccatgttgctgcatgtccgcaaggttaaagatgaagtcagtgatctgaaatacaaagaagtataccaaagaaataaatccaactgcaccattgagccagatgctgttcatatcaaagcagccaaggacgcctacaaagtcaacaccaatctggactataagaaacagtacgaagccaacaaagcccactggaagtggactcctgaccgaccggacttcctccaggctgccaagtcatccctgcagcaaagcgattttgaatataagctggaccgggagttcctcaagggttgcaagctttctgtcactgatgacaaaaacacggtgctcgccctcaggaatactttaatagaaagtgatctgaaatacaaagagaaacatgtcaaggaaagaggaacctgccatgccgtacctgacacgcctcagatcctgctggcgaagactgtcagcaacctggtgtctgagaacaagtacaaggaccatgtcaagaagcacttggcacagggctcatacacaacactaccagagacccgggacactgttcacgtcaaggaagtgaccaagcatgtcagtgatacaaattacaaaaagaagtttgtcaaggagaaaggaaaatccaactactccatcatgctggagccaccagaggtgaaacatgctatggaagtggccaagaagcaaagtgatgtcgcttacagaaaagatgccaaagagaacctgcattacaccacagtggctgatcgaccagacatcaagaaggccacacaggcagccaaacaggccagtgaggtggagtacagagccaagcaccgcaaggaaggcagccatggcttaagcatgctcggtcgcccagacatagaaatggccaagaaggcagccaagctgagcagccaggttaaataccgagaaaatttcgataaagaaaagggcaagacaccaaaatacaatccaaaagacagccagctctacaaagtcatgaaagatgctaataatcttgcaagtgaggttaaatacaaggctgacctgaagaaacttcacaaacccgtgactgacatgaaggagtctctgatcatgaatcatgtcctgaatacaagccaacttgccagttcttaccagtacaagaagaagtatgagaagagtaaaggccactaccacaccatacccgataatctggagcagcttcacctaaaagaggccacagaattacagagtatagtgaaatacaaagaaaagtatgaaaaggaacgaggaaaacccatgctggactttgaaacaccaacgtacatcactgccaaagagtctcagcagatgcagagtgggaaagaatataggaaagattatgaagagtccattaaaggcagaaacctgactggcctggaggtcacgccagctttgttacatgtcaaatatgcaactaaaatagcaagcgagaaagagtacaggaaagatctagaggaaagcatccgtgggaagggcctcactgaaatggaagatacacctgacatgctaagagcaaagaatgccactcaaatcctcaatgagaaagaatataagcgagacctggaactggaagtcaaaggaagaggcctgaatgccatggccaatgaaactccggattttatgagggccaggaatgctactgatattgccagtcagattaagtataagcaatcagcagaaatggagaaagccaatttcacttctgtggttgatactccagagatcattcatgcccaacaagtcaagaatctttcaagccagaaaaagtacaaggaagatgctgagaagtccatgtcgtattatgagactgttttggacaccccagagatacagagagtccgggagaaccaaaagaacttcagccttctccaataccagtgtgaccttaaaaacagtaaaggaaaaattacagttgttcaagacacgccagaaatactgcgtgtaaaagaaaatcagaagaatttcagctcggttttatataaagaggatgtctcaccaggaacggctatcggaaagacacctgagatgatgagagtgaaacaaacacaggaccacattagctcggtgaagtataaggaagcaataggacaaggaactccaatccctgacctgcctgaagtgaaacgtgtgaaggagacgcagaagcacattagctcggttatgtacaaagaaaacttgggaacaggcattccaaccactgtgactccagagattgagagagtcaaacgcaatcaagagaactttagctcggttttgtacaaagaaaatttggggaaaggaatcccaacacctatcactccagagatggagagagtcaaacgcaatcaagagaactttagctcggtgttgtacaaagaaaatgtggggaaagccaccgcaacccctgtcactcctgagatgcagagagtcaaacgcaatcaagaaaacattagctcggtattgtacaaagagaacatgagaaaagcaactccgacacctgttactccagagatggagagagctaagcgcaaccaagaaaacattagctcggttctttattctgatagtttccggaaacaaatacaaggcaaagctgcctatgtattggatacccccgagatgagacgggtgagggagacccaacggcacatctcaacggtgaaatatcatgaagactttgagaaacacaagggttgcttcacaccagtggtgacagatcctatcactgaacgagtaaagaagaacatgcaggacttcagtgacattaactaccgaggtattcagaggaaagtggtagaaatggaacaaaaacggaatgaccaagatcaggagactattacaggtttacgtgtctggcgtactaatcctggttcggtttttgactatgatccagcagaagacaacatccagtcccgaagcttacacatgattaatgtccaagctcagcgccggagccgggagcagtcacgatctgccagtgcactaagcgtcagtgggggtgaggagaagtctgagcattcagaagcaccagaccaccacctttcgacttacagcgacgggggtgtctttgcagtctcaacagcttacaaacatgcaaaaaccacagagctcccacaacaacgatcatcttcagttgctacccaacagacaacggtatcttccatcccatctcatccatctactgctggaaaaatcttccgtgccatgtatgactatatggctgctgatgcagatgaggtgtccttcaaggatggagatgccatcataaatgttcaagcaattgatgaaggctggatgtatggcactgtgcagaggactggcaggaccggaatgctcccagccaactacgttgaagctatttaggcatttcaaagcatcacacttgtctgcaggacttacagatcctgcagtcaatgtttcggtttagactctccactgttacctaagttctcaagctgcctatggtttttctgtgtcaatgtgatttatggtagtaccatcctttctcctttgggttttaaaataagttgcagaacagacactttaaaagcttctgcaatattatttctgtgcctagagtctttctccattataaacatgttttaacattatttcttttctaaaacagggattttgaatatgccaaacacattaaaggaaaaatagcagagatgttcaccttttccttgctgattgctaatgcttattatttctaattcagttctgaagttataaacttataatcaatacaaaccagcaactaataaaacctctaattctgcaa

SEQ ID NO: 286040 - DNA, 9478 bp, Homo sapiens
  misc_feature (5808)..(5808): n is a, c, g, or t
agagaatataagaaagcttatgagaagtctaaaggaattcacaacacaccgttggacatgatgtcaattgttcaagccaagaaatgccaggtcctggttagcgacattgattatcgcaattatctgcaccagtggacgtgtctgccagatcagaacgatgtgatccaggccaagaaagcctacgacctgcagagcgataacttgtacaagtcagacctggaatggctgaagggtattggatggttgccagagggttctgtggaagtgatgagagtgaagaatgcccagaatctcttgaatgaaaggctgtatcgtataaagcctgaggccctcaaattcaccagcattgttgacaccccggaagtaatccaggcaaagatcaatgctgtacagatcagtgagccattgtatcgcgatgcctgggagaaagagaaggctaatgtgaacgtgccagctgacactcccctgatgctgcaatccaaaatcaatgccctgcagatcagcaataaacgctatcagcaagcttgggaagatgtcaagatgactggttatgacctgcgagcagatgccattgggatccagcatgccaaggcttccagggatattgccagtgactatctgtacaaaactgcttatgagaaacagaaaggccattacattggctgtcgcagcgccaaggaagaccctaaactggtttgggcagcaaatgtgttgaagatgcagaatgacaggctgtacaaaaaggcctacaacgaccacaaagccaagatctccatccctgtggacatggtgtccatcagcgctgccaaagaaggtcaggcactggcaagtgatgtggactatcgccattacctgcaccgctggtcttgctttcccgaccagaatgatgtgatccaagccaggaaagcctacgacctacagagcgacgccctctacaaggctgacttggagtggttgcgtggcattggctggatgccccaagggtctcctgaagtgttgagagtcaaaaacgcccagaatatcttttgtgacagtgtctatcggacgcctgtggtgaaccttaagtacacaagcattgttgacacacctgaagtggtccttgctaaatcaaatgctgaaaatattagtattccaaagtacagagaggtttgggacaaggataaaacttcaatacacataatgccagatactccagaaattaatctcgctagagcaaatgctcttaatgtgagcaataaactttaccgtgagggctgggatgaaatgaaggcgggctgtgatgtccggctggatgccatccccatccaggctgccaaggcctccagggagattgccagtgactataaatataagcttgaccatgagaagcagaagggacactacgtgggcaccctcacagccagggatgacaacaagatccgctgggccctcatagctgacaagctccagaatgaacgagagtaccggctggactgggccaaatggaaggccaagatccagagccctgtggacatgctttccatcctgcactctaaaaattcccaggctctggtcagtgacatggattaccgcaattacctgcaccagtggacctgcatgcccgaccagaacgatgtgattcaggccaagaaggcctacgaactgcagagcgataatgtttacaaggctgacttggaatggttgcgtggaattgggtggatgccaaatgactccgtgtccgtcaatcatgccaaacatgccgcggacatcttcagtgagaaaaaatatcgcacaaaaatagaaactctcaactttacgcctgtggatgacagagttgattatgtgacagcgaaacaaagtggcgagatcctcgatgatattaaataccggaaagactggaatgccaccaaatcaaagtacaccctcacagaaacccccctgctgcacactgcccaggaggctgctaggatactggaccagtatctctacaaggaaggctgggagagacaaaaagccacaggttacattttgcctccagatgctgtgccatttgttcatgcccatcactgcaatgacgttcagagtgagctgaaatacaaagctgaacatgtgaagcaaaaaggtcattatgttggtgtcccgacgatgagagatgatcctaagctggtttggtttgagcatgcaggccagattcagaatgagagactatacaaagaggactatcacaaaacaaaggccaaaatcaatatacctgctgatatggtgtcagtcttggccgccaagcaggggcagacccttgtcagtgatattgattatcgtaattacttgcaccaatggatgtgtcatcctgaccagaacgatgttattcaggcaagaaaggcctatgacctacagagtgataatgtctacagagctgacctggagtggctccgaggcattggctggatcccactggattctgtggaccatgtaagggttactaagaaccaggaaatgatgagtcagatcaaatataagaaaaatgcccttgaaaactatcctaactttacaagtgtggtggatcctccagagattgttttagccaagattaattctgtcaatcaaagtgatgtaaaatataaagaaacatttaataaagcaaagggcaaatatacgttttcaccagatacaccacatatctcccactccaaagacatgggaaaactctacagtactatactgtataaaggggcgtgggagggcaccaaggcctatggctacaccctggatgagcgctacattcccattgttggagccaagcatgctgatctggtgaacagtgagcttaaatacaaagagacatatgagaagcagaaaggtcactacctggctggaaaagtgatcggtgaattccctggtgtggttcactgtctggatttccaaaagatgaggagtgcgttgaactacagaaaacattatgaggataccaaagcaaatgttcatatccccaatgacatgatgaatcacgtgctggctaaaaggtgccagtacatcctcagtgacctggagtatcgacactatttccaccagtggacgtctcttctggaagaacccaatgttatacgcgtccgaaacgcccaggagatcttgagtgataatgtgtataaagatgacctgaattggttgaaaggcattggttgctacgtttgggatacaccccaaatcctccatgccaagaaatcatacgaccttcagagtcagctacaatatacagcagcaggtaaagaaaatctacaaaactataatctggtcacagacacgcccctctatgtgactgctgttcagagtggcattaatgccagtgaggtaaaatataaagaaaattatcatcagattaaggacaaatacacaacagttctagaaacagtggattatgacagaaccagaaacctgaagaatctttacagcagtaacctgtacaaggaggcctgggatagagtgaaagccaccagctacatcctgccttccagcaccttgtccctgacacacgccaagaaccagaagcatctggccagccatatcaaatatcgggaagaatatgaaaagttcaaagctctttatacgttaccaagaagtgttgacgatgatccgaacacagcacggtgcctccgagttggcaagcttaacatcgatcgcctgtacagatcagtttatgaaaagaacaagatgaaaatccacatcgtgcccgacatggtagagatggttactgccaaggattcccagaagaaagtcagtgagattgattaccgcctgcgcctccacgaatggatttgccaccccgacttgcaagtcaatgatcacgtcaggaaagtcacagatcagatcagcgatattgtatacaaggatgacctcaactggctgaaaggcattggttgctacgtctgggacactcctgaaatcctccatgccaagcatgcttatgatctacgtgatgatatcaagtataaagctcacatgttgaaaacaaggaatgactacaagcttgtcacagatacaccagtctacgtgcaggctgtcaaaagtgggaaacagctaagtgacgctgtctaccactatgactatgtgcacagtgtcagaggcaaagtggctccaactaccaaaaccgtggatctggaccgggcccttcatgcatacaagctccagagttcgaatctatacaaaaccagcctgcgcaccctgcccactggatatagacttccaggtgacactcctcacttcaaacacatcaaggacacccgttacatgagcagttatttcaagtacaaagaagcctatgaacacaccaaggcatatgggtatacacttggccccaaagatgttccatttgtccacgtccggagagtcaacaatgttaccagcgagagactgtatcgggaattgtaccacaaactgaaagacaagatccatacaactcccgatacccctgagatccgccaagtcaagaagacacaagaggctgtcagtgagttgatctacaaatcagacttcttcaagatgcagggccacatgatctctctgccatacacaccccaagtgatccattgccgctatgtgggagacatcaccagtgatattaaatacaaagaggacttgcaggtcctgaagggatttggctgcttcctgtatgacactcctgacatggtccgctcccggcacctgcggaagctctggtctaattacctatacactgataaggcaaggaagatgcgagacaaatacaaagtggtgcttgacactccagaatacagaaaagtgcaagaactgaagacacatctgagtgagctggtctacagagctgcaggcaagaagcagaagtcaatctttacttcagttcctgatactcctgatcttttaagagccaagcgagggcagaagcttcagagtcagtatctgtatgttgaacttgccaccaaagagagaccccatcatcacgctggaaaccagaccacagccttgaagcatgctaaagacgtgaaggacatggtcagtgagaaaaagtacaagattcaatatgaaaagatgaaagacaagtacactccggttccagatacgccaatcctcatcagagccaagagggcttactggaatgccagtgatctacgctacaaagaaacatttcaaaagaccaaagggaaataccacacggtgaaagatgccctagacattgtctatcatcgcaaagtcacagatgacatcagtaaaataaaatacaaggagaactacatgagccagttgggtatctggaggtccattcctgatcgtccagagcatttccaccaccgagcagtcactgacacagtcagtgatgtaaaatataaagaagacttgacttggcttaaaggcattggttgctatgcctatgatacccctgatttcactctggctgaaaagaacaagactctctacagcaagtataagtataaagaagtatttgaaaggacaaagtcagatttcaagtatgttgccgactctccgatcaataggcatttcaagtatgcaactcaattgatgaatgagagaaaatataaatctagtgccaagatgtttctgcaacatggatgtaatgaaattctgcgtccagatatgttgactgctctctacaattcgcatatgtggagccagatcaaatacaggaaaaactatgaaaaatcaaaggacaaatttacctcaattgtggatactccagaacacctgcgtactacaaaagtcaacaaacaaatcagcgatatcctttataaattggaatacaacaaggccaaacccagaggctacaccacaatccacgacacncccatgttgctgcatgtccgcaaggttaaagatgaagtcagtgatctgaaatacaaagaagtataccaaagaaataaatccaactgcaccattgagccagatgctgttcatatcaaagcagccaaggacgcctacaaagtcaacaccaatctggactataagaaacagtacgaagccaacaaagcccactggaagtggactcctgaccgaccggacttcctccaggctgccaagtcatccctgcagcaaagcgattttgaatataagctggaccgggagttcctcaagggttgcaagctttctgtcactgatgacaaaaacacggtgctcgccctcaggaatactttaatagaaagtgatctgaaatacaaagagaaacatgtcaaggaaagaggaacctgccatgccgtacctgacacgcctcagatcctgctggcgaagactgtcagcaacctggtgtctgagaacaagtacaaggaccatgtcaagaagcacttggcacagggctcatacacaacactaccagagacccgggacactgttcacgtcaaggaagtgaccaagcatgtcagtgatacaaattacaaaaagaagtttgtcaaggagaaaggaaaatccaactactccatcatgctggagccaccagaggtgaaacatgctatggaagtggccaagaagcaaagtgatgtcgcttacagaaaagatgccaaagagaacctgcattacaccacagtggctgatcgaccagacatcaagaaggccacacaggcagccaaacaggccagtgaggtggagtacagagccaagcaccgcaaggaaggcagccatggcttaagcatgctcggtcgcccagacatagaaatggccaagaaggcagccaagctgagcagccaggttaaataccgagaaaatttcgataaagaaaagggcaagacaccaaaatacaatccaaaagacagccagctctacaaagtcatgaaagatgctaataatcttgcaagtgaggttaaatacaaggctgacctgaagaaacttcacaaacccgtgactgacatgaaggagtctctgatcatgaatcatgtcctgaatacaagccaacttgccagttcttaccagtacaagaagaagtatgagaagagtaaaggccactaccacaccatacccgataatctggagcagcttcacctaaaagaggccacagaattacagagtatagtgaaatacaaagaaaagtatgaaaaggaacgaggaaaacccatgctggactttgaaacaccaacgtacatcactgccaaagagtctcagcagatgcagagtgggaaagaatataggaaagattatgaagagtccattaaaggcagaaacctgactggcctggaggtcacgccagctttgttacatgtcaaatatgcaactaaaatagcaagcgagaaagagtacaggaaagatctagaggaaagcatccgtgggaagggcctcactgaaatggaagatacacctgacatgctaagagcaaagaatgccactcaaatcctcaatgagaaagaatataagcgagacctggaactggaagtcaaaggaagaggcctgaatgccatggccaatgaaactccggattttatgagggccaggaatgctactgatattgccagtcagattaagtataagcaatcagcagaaatggagaaagccaatttcacttctgtggttgatactccagagatcattcatgcccaacaagtcaagaatctttcaagccagaaaaagtacaaggaagatgctgagaagtccatgtcgtattatgagactgttttggacaccccagagatacagagagtccgggagaaccaaaagaacttcagccttctccaataccagtgtgaccttaaaaacagtaaaggaaaaattacagttgttcaagacacgccagaaatactgcgtgtaaaagaaaatcagaagaatttcagctcggttttatataaagaggatgtctcaccaggaacggctatcggaaagacacctgagatgatgagagtgaaacaaacacaggaccacattagctcggtgaagtataaggaagcaataggacaaggaactccaatccctgacctgcctgaagtgaaacgtgtgaaggagacgcagaagcacattagctcggttatgtacaaagaaaacttgggaacaggcattccaaccactgtgactccagagattgagagagtcaaacgcaatcaagagaactttagctcggtgttatacaaagagaacctggggaaagcaacccccacaccctttactcctgagatggaaagagtgaaacgcaatcaagaaaactttagctcggtattgtacaaagagaacatgagaaaagcaactccgacacctgttactccagagatggagagagctaagcgcaaccaagaaaacattagctcggttctttattctgatagtttccggaaacaaatacaaggcaaagctgcctatgtattggatacccccgagatgagacgggtgagggagacccaacggcacatctcaacggtgaaatatcatgaagactttgagaaacacaagggttgcttcacaccagtggtgacagatcctatcactgaacgagtaaagaagaacatgcaggacttcagtgacattaactaccgaggtattcagaggaaagtggtagaaatggaacaaaaacggaatgaccaagatcaggagactattacaggtttacgtgtctggcgtactaatcctggttcggtttttgactatgatccagcagaagacaacatccagtcccgaagcttacacatgattaatgtccaagctcagcgccggagccgggagcagtcacgatctgccagtgcactaagcgtcagtgggggtgaggagaagtctgagcattcagaagcaccagaccaccacctttcgacttacagcgacgggggtgtctttgcagtctcaacagcttacaaacatgcaaaaaccacagagctcccacaacaacgatcatcttcagttgctacccaacagacaacggtatcttccatcccatctcatccatctactgctggaaaaatcttccgtgccatgtatgactatatggctgctgatgcagatgaggtgtccttcaaggatggagatgccatcataaatgttcaagcaattgatgaaggctggatgtatggcactgtgcagaggactggcaggaccggaatgctcccagccaactacgttgaagctatttaggcatttcaaagcatcacacttgtctgcaggacttacagatcctgcagtcaatgtttcggtttagactctccactgttacctaagttctcaagctgcctatggtttttctgtgtcaatgtgatttatggtagtaccatcctttctcctttgggttttaaaataagttgcagaacagacactttaaaagcttctgcaatattatttctgtgcctagagtctttctccattataaacatgttttaacattatttcttttctaaaacagggattttgaatatgccaaacacattaaaggaaaaatagcagagatgttcaccttttccttgctgattgctaatgcttattatttctaattcagttctgaagttataaacttataatcaatacaaaccagcaactaataaaacctctaattctgcaa

SEQ ID NO: 286041 - DNA, 3086 bp, Homo sapiens
gagcaaggccagtgatcatatatttgaatgcctgttgtcttgtcattcttaattattaatagtgtcttctttactctaaatgtcccagtttggataatagattatatgatcactctatgtacaatgcatattctttggcatttgtgtttctactattccccaattcccaaattgattgatgtccaggaataatttggatgtttgcatttgctgttaggttaaataccgagaaaatttcgataaagaaaagggcaagacaccaaaatacaatccaaaagacagccagctctacaaagtcatgaaagatgctaataatcttgcaagtgaggttaaatacaaggctgacctgaagaaacttcacaaacccgtgactgacatgaaggagtctctgatcatgaatcatgtcctgaatacaagccaacttgccagttcttaccagtacaagaagaagtatgagaagagtaaaggccactaccacaccatacccgataatctggagcagcttcacctaaaagaggccacagaattacagagtatagtgaaatacaaagaaaagtatgaaaaggaacgaggaaaacccatgctggactttgaaacaccaacgtacatcactgccaaagagtctcagcagatgcagagtgggaaagaatataggaaagattatgaagagtccattaaaggcagaaacctgactggcctggaggtcacgccagctttgttacatgtcaaatatgcaactaaaatagcaagcgagaaagagtacaggaaagatctagaggaaagcatccgtgggaagggcctcactgaaatggaagatacacctgacatgctaagagcaaagaatgccactcaaatcctcaatgagaaagaatataagcgagacctggaactggaagtcaaaggaagaggcctgaatgccatggccaatgaaactccggattttatgagggccaggaatgctactgatattgccagtcagattaagtataagcaatcagcagaaatggagaaagccaatttcacttctgtggttgatactccagagatcattcatgcccaacaagtcaagaatctttcaagccagaaaaagtacaaggaagatgctgagaagtccatgtcgtattatgagactgttttggacaccccagagatacagagagtccgggagaaccaaaagaacttcagccttctccaataccagtgtgaccttaaaaacagtaaaggaaaaattacagttgttcaagacacgccagaaatactgcgtgtaaaagaaaatcagaagaatttcagctcggttttatataaagaggatgtctcaccaggaacggctatcggaaagacacctgagatgatgagagtgaaacaaacacaggaccacattagctcggtgaagtataaggaagcaataggacaaggaactccaatccctgacctgcctgaagtgaaacgtgtgaaggagacgcagaagcacattagctcggttatgtacaaagaaaacttgggaacaggcattccaaccactgtgactccagagattgagagagtcaaacgcaatcaagagaactttagctcggttttgtacaaagaaaatttggggaaaggaatcccaacacctatcactccagagatggagagagtcaaacgcaatcaagagaactttagctcggtgttgtacaaagaaaatgtggggaaagccaccgcaacccctgtcactcctgagatgcagagagtcaaacgcaatcaagaaaacattagctcggtattgtacaaagagaacatgagaaaagcaactccgacacctgttactccagagatggagagagctaagcgcaaccaagaaaacattagctcggttctttattctgatagtttccggaaacaaatacaaggcaaagctgcctatgtattggatacccccgagatgagacgggtgagggagacccaacggcacatctcaacggtgaaatatcatgaagactttgagaaacacaagggttgcttcacaccagtggtgacagatcctatcactgaacgagtaaagaagaacatgcaggacttcagtgacattaactaccgaggtattcagaggaaagtggtagaaatggaacaaaaacggaatgaccaagatcaggagactattacaggtttacgtgtctggcgtactaatcctggttcggtttttgactatgatccagcagaagacaacatccagtcccgaagcttacacatgattaatgtccaagctcagcgccggagccgggagcagtcacgatctgccagtgcactaagcgtcagtgggggtgaggagaagtctgagcattcagaagcaccagaccaccacctttcgacttacagcgacgggggtgtctttgcagtctcaacagcttacaaacatgcaaaaaccacagagctcccacaacaacgatcatcttcagttgctacccaacagacaacggtatcttccatcccatctcatccatctactgctggaaaaatcttccgtgccatgtatgactatatggctgctgatgcagatgaggtgtccttcaaggatggagatgccatcataaatgttcaagcaattgatgaaggctggatgtatggcactgtgcagaggactggcaggaccggaatgctcccagccaactacgttgaagctatttaggcatttcaaagcatcacacttgtctgcaggacttacagatcctgcagtcaatgtttcggtttagactctccactgttacctaagttctcaagctgcctatggtttttctgtgtcaatgtgatttatggtagtaccatcctttctcctttgggttttaaaataagttgcagaacagacactttaaaagcttctgcaatattatttctgtgcctagagtctttctccattataaacatgttttaacattatttcttttctaaaacagggattttgaatatgccaaacacattaaaggaaaaatagcagagatgttcaccttttccttgctgattgctaatgcttattatttctaattcagttctgaagttataaacttataatcaatacaaaccagcaactaataaaacctctaattctgcaa

SEQ ID NO: 286042 - DNA, 2037 bp, Homo sapiens
tttaaagatacaggattttaattttcttcacataatataggacaaataaagaaaacaaagcaatgttgaaatcttaacaagatgtttactctttcttcatagctccaataccagtgtgaccttaaaaactgggaacatcgtctagtgtcttgttttcacaaaagccatgtgtcctagtctttctccaggaactgctgggttttcttttcttctgtgttaacactgtcctgattctgaatgcccaggttttatataaagaggatgtctcaccaggaacggctatcggaaagacacctgagatgatgagagtgaaacaaacacaggaccacattagctcggtgaagtataaggaagcaataggacaaggaactccaatccctgacctgcctgaagtgaaacgtgtgaaggagacgcagaagcacattagctcggttatgtacaaagaaaacttgggaacaggcattccaaccactgtgactccagagattgagagagtcaaacgcaatcaagagaactttagctcggttttgtacaaagaaaatttggggaaaggaatcccaacacctatcactccagagatggagagagtcaaacgcaatcaagagaactttagctcggtgttgtacaaagaaaatgtggggaaagccaccgcaacccctgtcactcctgagatgcagagagtcaaacgcaatcaagaaaacattagctcggtattgtacaaagagaacatgagaaaagcaactccgacacctgttactccagagatggagagagctaagcgcaaccaagaaaacattagctcggttctttattctgatagtttccggaaacaaatacaaggcaaagctgcctatgtattggatacccccgagatgagacgggtgagggagacccaacggcacatctcaacggtgaaatatcatgaagactttgagaaacacaagggttgcttcacaccagtggtgacagatcctatcactgaacgagtaaagaagaacatgcaggacttcagtgacattaactaccgaggtattcagaggaaagtggtagaaatggaacaaaaacggaatgaccaagatcaggagactattacaggtttacgtgtctggcgtactaatcctggttcggtttttgactatgatccagcagaagacaacatccagtcccgaagcttacacatgattaatgtccaagctcagcgccggagccgggagcagtcacgatctgccagtgcactaagcgtcagtgggggtgaggagaagtctgagcattcagaagcaccagaccaccacctttcgacttacagcgacgggggtgtctttgcagtctcaacagcttacaaacatgcaaaaaccacagagctcccacaacaacgatcatcttcagttgctacccaacagacaacggtatcttccatcccatctcatccatctactgctggaaaaatcttccgtgccatgtatgactatatggctgctgatgcagatgaggtgtccttcaaggatggagatgccatcataaatgttcaagcaattgatgaaggctggatgtatggcactgtgcagaggactggcaggaccggaatgctcccagccaactacgttgaagctatttaggcatttcaaagcatcacacttgtctgcaggacttacagatcctgcagtcaatgtttcggtttagactctccactgttacctaagttctcaagctgcctatggtttttctgtgtcaatgtgatttatggtagtaccatcctttctcctttgggttttaaaataagttgcagaacagacactttaaaagcttctgcaatattatttctgtgcctagagtctttctccattataaacatgttttaacattatttcttttctaaaacagggattttgaatatgccaaacacattaaaggaaaaatagcagagatgttcaccttttccttgctgattgctaatgcttattatttctaattcagttctgaagttataaacttataatcaatacaaaccagcaactaataaaacctctaattctgcaa

SEQ ID NO: 286043 - DNA, 1978 bp, Homo sapiens
aatcttttttttaaaataatgagtttttcagtttgtgtggataacaccactgagttctaactgtctcaaatcctcatataattgtttaggaggcatggtactcacaaaaaaggaaaaaaaaaaataacatggataactctgacagcctttccccagcagctgaggtccctgcttctctagagggtgcagattccccatcccaacaacttccactaaagtaaagtagtcggtggcattttgtcagcatataacttctggctccttggacaactgtgttttgtcttaacaaggaagctgaccttacccttaaaacctttcaacaaatgaaatgttactcatggttgtttttctggttgctttcttatcgcacaggtgttatacaaagaaaacatgggcaagggaacccctctacctgtcactcctgagatggagagagtcaaacacaatcaagaaaatattagctcggtgttatacaaagaaaacatgggcaagggaactcctttacctgtcactcccgagatggagcgagtcaaacacaatcaagaaaatattagctcggtgttgtacaaagaaaatgtggggaaagccaccgcaacccctgtcactcctgagatgcagagagtcaaacgcaatcaagaaaacattagctcggtattgtacaaagagaacatgagaaaagcaactccgacacctgttactccagagatggagagagctaagcgcaaccaagaaaacattagctcggttctttattctgatagtttccggaaacaaatacaaggcaaagctgcctatgtattggatacccccgagatgagacgggtgagggagacccaacggcacatctcaacggtgaaatatcatgaagactttgagaaacacaagggttgcttcacaccagtggtgacagatcctatcactgaacgagtaaagaagaacatgcaggacttcagtgacattaactaccgaggtattcagaggaaagtggtagaaatggaacaaaaacggaatgaccaagatcaggagactattacaggtttacgtgtctggcgtactaatcctggttcggtttttgactatgatccagcagaagacaacatccagtcccgaagcttacacatgattaatgtccaagctcagcgccggagccgggagcagtcacgatctgccagtgcactaagcgtcagtgggggtgaggagaagtctgagcattcagaagcaccagaccaccacctttcgacttacagcgacgggggtgtctttgcagtctcaacagcttacaaacatgcaaaaaccacagagctcccacaacaacgatcatcttcagttgctacccaacagacaacggtatcttccatcccatctcatccatctactgctggaaaaatcttccgtgccatgtatgactatatggctgctgatgcagatgaggtgtccttcaaggatggagatgccatcataaatgttcaagcaattgatgaaggctggatgtatggcactgtgcagaggactggcaggaccggaatgctcccagccaactacgttgaagctatttaggcatttcaaagcatcacacttgtctgcaggacttacagatcctgcagtcaatgtttcggtttagactctccactgttacctaagttctcaagctgcctatggtttttctgtgtcaatgtgatttatggtagtaccatcctttctcctttgggttttaaaataagttgcagaacagacactttaaaagcttctgcaatattatttctgtgcctagagtctttctccattataaacatgttttaacattatttcttttctaaaacagggattttgaatatgccaaacacattaaaggaaaaatagcagagatgttcaccttttccttgctgattgctaatgcttattatttctaattcagttctgaagttataaacttataatcaatacaaaccagcaactaataaaacctctaattctgcaa

SEQ ID NO: 286044 - DNA, 1977 bp, Homo sapiens
agctcactgtgactcccgagagggacacagtccaacgcggtcagttaacacctgtatcctcggcttgttgtctaaagaagatacttggggcgatagaggtaatcgctaaggactatcactccagaagatgggcacgagtggaacgcgatcgtgataacttaagtcccggatggtatacatgagaatcactctggtggactcgtgatcttccagggcgctccatcgacgtcctgtagatgtcagagtagatcgcaccgacatgagaaaaccttagctcggtgttatacaaagaaaacatgggcaagggaacccctttacctgtcactcccgagatggaaagagtcaaacacaatcaagaaaatattagctcggtgttatacaaagaaaacatgggcaagggaacccctctacctgtcactcctgagatggagagagtcaaacacaatcaagaaaatattagctcggtgttatacaaagaaaacatgggcaagggaactcctttacctgtcactcccgagatggagcgagtcaaacacaatcaagaaaatattagctcggtgttgtacaaagaaaatgtggggaaagccaccgcaacccctgtcactcctgagatgcagagagtcaaacgcaatcaagaaaacattagctcggtattgtacaaagagaacatgagaaaagcaactccgacacctgttactccagagatggagagagctaagcgcaaccaagaaaacattagctcggttctttattctgatagtttccggaaacaaatacaaggcaaagctgcctatgtattggatacccccgagatgagacgggtgagggagacccaacggcacatctcaacggtgaaatatcatgaagactttgagaaacacaagggttgcttcacaccagtggtgacagatcctatcactgaacgagtaaagaagaacatgcaggacttcagtgacattaactaccgaggtattcagaggaaagtggtagaaatggaacaaaaacggaatgaccaagatcaggagactattacaggtttacgtgtctggcgtactaatcctggttcggtttttgactatgatccagcagaagacaacatccagtcccgaagcttacacatgattaatgtccaagctcagcgccggagccgggagcagtcacgatctgccagtgcactaagcgtcagtgggggtgaggagaagtctgagcattcagaagcaccagaccaccacctttcgacttacagcgacgggggtgtctttgcagtctcaacagcttacaaacatgcaaaaaccacagagctcccacaacaacgatcatcttcagttgctacccaacagacaacggtatcttccatcccatctcatccatctactgctggaaaaatcttccgtgccatgtatgactatatggctgctgatgcagatgaggtgtccttcaaggatggagatgccatcataaatgttcaagcaattgatgaaggctggatgtatggcactgtgcagaggactggcaggaccggaatgctcccagccaactacgttgaagctatttaggcatttcaaagcatcacacttgtctgcaggacttacagatcctgcagtcaatgtttcggtttagactctccactgttacctaagttctcaagctgcctatggtttttctgtgtcaatgtgatttatggtagtaccatcctttctcctttgggttttaaaataagttgcagaacagacactttaaaagcttctgcaatattatttctgtgcctagagtctttctccattataaacatgttttaacattatttcttttctaaaacagggattttgaatatgccaaacacattaaaggaaaaatagcagagatgttcaccttttccttgctgattgctaatgcttattatttctaattcagttctgaagttataaacttataatcaatacaaaccagcaactaataaaacctctaattctgcaa

SEQ ID NO: 286045 - DNA, 2071 bp, Homo sapiens
aatcttttttttaaaataatgagtttttcagtttgtgtggataacaccactgagttctaactgtctcaaatcctcatataattgtttaggaggcatggtactcacaaaaaaggaaaaaaaaaaataacatggataactctgacagcctttccccagcagctgaggtccctgcttctctagagggtgcagattccccatcccaacaacttccactaaagtaaagtagtcggtggcattttgtcagcatataacttctggctccttggacaactgtgttttgtcttaacaaggaagctgaccttacccttaaaacctttcaacaaatgaaatgttactcatggttgtttttctggttgctttcttatcgcacaggtgttatacaaagaaaacatgggcaagggaacccctctacctgtcactcctgagatggagagagtcaaacacaatcaagaaaatattagctcggtgttatacaaagaaaacatgggcaagggaactcctttacctgtcactcccgagatggagcgagtcaaacacaatcaagaaaatattagctcggtgttgtacaaagaaaatgtggggaaagccaccgcaacccctgtcactcctgagatgcagagagtcaaacgcaatcaagaaaacattagctcggtgttatacaaagagaacctggggaaagcaacccccacaccctttactcctgagatggaaagagtgaaacgcaatcaagaaaactttagctcggtattgtacaaagagaacatgagaaaagcaactccgacacctgttactccagagatggagagagctaagcgcaaccaagaaaacattagctcggttctttattctgatagtttccggaaacaaatacaaggcaaagctgcctatgtattggatacccccgagatgagacgggtgagggagacccaacggcacatctcaacggtgaaatatcatgaagactttgagaaacacaagggttgcttcacaccagtggtgacagatcctatcactgaacgagtaaagaagaacatgcaggacttcagtgacattaactaccgaggtattcagaggaaagtggtagaaatggaacaaaaacggaatgaccaagatcaggagactattacaggtttacgtgtctggcgtactaatcctggttcggtttttgactatgatccagcagaagacaacatccagtcccgaagcttacacatgattaatgtccaagctcagcgccggagccgggagcagtcacgatctgccagtgcactaagcgtcagtgggggtgaggagaagtctgagcattcagaagcaccagaccaccacctttcgacttacagcgacgggggtgtctttgcagtctcaacagcttacaaacatgcaaaaaccacagagctcccacaacaacgatcatcttcagttgctacccaacagacaacggtatcttccatcccatctcatccatctactgctggaaaaatcttccgtgccatgtatgactatatggctgctgatgcagatgaggtgtccttcaaggatggagatgccatcataaatgttcaagcaattgatgaaggctggatgtatggcactgtgcagaggactggcaggaccggaatgctcccagccaactacgttgaagctatttaggcatttcaaagcatcacacttgtctgcaggacttacagatcctgcagtcaatgtttcggtttagactctccactgttacctaagttctcaagctgcctatggtttttctgtgtcaatgtgatttatggtagtaccatcctttctcctttgggttttaaaataagttgcagaacagacactttaaaagcttctgcaatattatttctgtgcctagagtctttctccattataaacatgttttaacattatttcttttctaaaacagggattttgaatatgccaaacacattaaaggaaaaatagcagagatgttcaccttttccttgctgattgctaatgcttattatttctaattcagttctgaagttataaacttataatcaatacaaaccagcaactaataaaacctctaattctgcaa

SEQ ID NO: 286046 - DNA, 2036 bp, Homo sapiens
atcataaaaacacgcctttctcattcaactgaaaaacacactaaaattttaaaagagaaaaatgcaacatcttggaaagtaacgttttaacaccataaaaatttgcacttattcaactgaaaatttacactaaaatagacattaactgtgcttttacattccaaaccatcatactaaacataacaagttaattgccaatgttttccttcccctatactttgaggtagttctacgtaaccaactataacaaatttacttcctaacatcctcaatcttctgctctcctttagttttaagatactttatgacatgggtaatactctgaaatggatgccttctttggatatattttggggttttagtgtctggaggactttgatttctatattagcatattggtttatgaagtctggacataacctaaggaaaataatcacttgttttaaaggacagttctttcaaattccctacaatgtcagatttagagccaaataccatcgaatatgttgatgctgtaattcctagcaaatttcaagaggtcactctcttttcaaaattataccgtgccccttctttgaaaatgagtttcattttcgaagtcaaaacaagtcctttctcttccactggcgggcccttctggtccccagattagcctgttccaaaattggtcatgtgtctcactgggccccttcagttgacccaagcgtccctcaccagctcctatccatctctatctgctggaaaggctttgaggtttcagatttaggacagcaccactcattcatggtctctcctgcatcaggttctttattctgatagtttccggaaacaaatacaaggcaaagctgcctatgtattggatacccccgagatgagacgggtgagggagacccaacggcacatctcaacggtgaaatatcatgaagactttgagaaacacaagggttgcttcacaccagtggtgacagatcctatcactgaacgagtaaagaagaacatgcaggacttcagtgacattaactaccgaggtattcagaggaaagtggtagaaatggaacaaaaacggaatgaccaagatcaggagactattacaggtttacgtgtctggcgtactaatcctggttcggtttttgactatgatccagcagaagacaacatccagtcccgaagcttacacatgattaatgtccaagctcagcgccggagccgggagcagtcacgatctgccagtgcactaagcgtcagtgggggtgaggagaagtctgagcattcagaagcaccagaccaccacctttcgacttacagcgacgggggtgtctttgcagtctcaacagcttacaaacatgcaaaaaccacagagctcccacaacaacgatcatcttcagttgctacccaacagacaacggtatcttccatcccatctcatccatctactgctggaaaaatcttccgtgccatgtatgactatatggctgctgatgcagatgaggtgtccttcaaggatggagatgccatcataaatgttcaagcaattgatgaaggctggatgtatggcactgtgcagaggactggcaggaccggaatgctcccagccaactacgttgaagctatttaggcatttcaaagcatcacacttgtctgcaggacttacagatcctgcagtcaatgtttcggtttagactctccactgttacctaagttctcaagctgcctatggtttttctgtgtcaatgtgatttatggtagtaccatcctttctcctttgggttttaaaataagttgcagaacagacactttaaaagcttctgcaatattatttctgtgcctagagtctttctccattataaacatgttttaacattatttcttttctaaaacagggattttgaatatgccaaacacattaaaggaaaaatagcagagatgttcaccttttccttgctgattgctaatgcttattatttctaattcagttctgaagttataaacttataatcaatacaaaccagcaactaataaaacctctaattctgcaa

SEQ ID NO: 286047 - DNA, 9639 bp, Homo sapiens
  misc_feature (5808)..(5808): n is a, c, g, or t
agagaatataagaaagcttatgagaagtctaaaggaattcacaacacaccgttggacatgatgtcaattgttcaagccaagaaatgccaggtcctggttagcgacattgattatcgcaattatctgcaccagtggacgtgtctgccagatcagaacgatgtgatccaggccaagaaagcctacgacctgcagagcgataacttgtacaagtcagacctggaatggctgaagggtattggatggttgccagagggttctgtggaagtgatgagagtgaagaatgcccagaatctcttgaatgaaaggctgtatcgtataaagcctgaggccctcaaattcaccagcattgttgacaccccggaagtaatccaggcaaagatcaatgctgtacagatcagtgagccattgtatcgcgatgcctgggagaaagagaaggctaatgtgaacgtgccagctgacactcccctgatgctgcaatccaaaatcaatgccctgcagatcagcaataaacgctatcagcaagcttgggaagatgtcaagatgactggttatgacctgcgagcagatgccattgggatccagcatgccaaggcttccagggatattgccagtgactatctgtacaaaactgcttatgagaaacagaaaggccattacattggctgtcgcagcgccaaggaagaccctaaactggtttgggcagcaaatgtgttgaagatgcagaatgacaggctgtacaaaaaggcctacaacgaccacaaagccaagatctccatccctgtggacatggtgtccatcagcgctgccaaagaaggtcaggcactggcaagtgatgtggactatcgccattacctgcaccgctggtcttgctttcccgaccagaatgatgtgatccaagccaggaaagcctacgacctacagagcgacgccctctacaaggctgacttggagtggttgcgtggcattggctggatgccccaagggtctcctgaagtgttgagagtcaaaaacgcccagaatatcttttgtgacagtgtctatcggacgcctgtggtgaaccttaagtacacaagcattgttgacacacctgaagtggtccttgctaaatcaaatgctgaaaatattagtattccaaagtacagagaggtttgggacaaggataaaacttcaatacacataatgccagatactccagaaattaatctcgctagagcaaatgctcttaatgtgagcaataaactttaccgtgagggctgggatgaaatgaaggcgggctgtgatgtccggctggatgccatccccatccaggctgccaaggcctccagggagattgccagtgactataaatataagcttgaccatgagaagcagaagggacactacgtgggcaccctcacagccagggatgacaacaagatccgctgggccctcatagctgacaagctccagaatgaacgagagtaccggctggactgggccaaatggaaggccaagatccagagccctgtggacatgctttccatcctgcactctaaaaattcccaggctctggtcagtgacatggattaccgcaattacctgcaccagtggacctgcatgcccgaccagaacgatgtgattcaggccaagaaggcctacgaactgcagagcgataatgtttacaaggctgacttggaatggttgcgtggaattgggtggatgccaaatgactccgtgtccgtcaatcatgccaaacatgccgcggacatcttcagtgagaaaaaatatcgcacaaaaatagaaactctcaactttacgcctgtggatgacagagttgattatgtgacagcgaaacaaagtggcgagatcctcgatgatattaaataccggaaagactggaatgccaccaaatcaaagtacaccctcacagaaacccccctgctgcacactgcccaggaggctgctaggatactggaccagtatctctacaaggaaggctgggagagacaaaaagccacaggttacattttgcctccagatgctgtgccatttgttcatgcccatcactgcaatgacgttcagagtgagctgaaatacaaagctgaacatgtgaagcaaaaaggtcattatgttggtgtcccgacgatgagagatgatcctaagctggtttggtttgagcatgcaggccagattcagaatgagagactatacaaagaggactatcacaaaacaaaggccaaaatcaatatacctgctgatatggtgtcagtcttggccgccaagcaggggcagacccttgtcagtgatattgattatcgtaattacttgcaccaatggatgtgtcatcctgaccagaacgatgttattcaggcaagaaaggcctatgacctacagagtgataatgtctacagagctgacctggagtggctccgaggcattggctggatcccactggattctgtggaccatgtaagggttactaagaaccaggaaatgatgagtcagatcaaatataagaaaaatgcccttgaaaactatcctaactttacaagtgtggtggatcctccagagattgttttagccaagattaattctgtcaatcaaagtgatgtaaaatataaagaaacatttaataaagcaaagggcaaatatacgttttcaccagatacaccacatatctcccactccaaagacatgggaaaactctacagtactatactgtataaaggggcgtgggagggcaccaaggcctatggctacaccctggatgagcgctacattcccattgttggagccaagcatgctgatctggtgaacagtgagcttaaatacaaagagacatatgagaagcagaaaggtcactacctggctggaaaagtgatcggtgaattccctggtgtggttcactgtctggatttccaaaagatgaggagtgcgttgaactacagaaaacattatgaggataccaaagcaaatgttcatatccccaatgacatgatgaatcacgtgctggctaaaaggtgccagtacatcctcagtgacctggagtatcgacactatttccaccagtggacgtctcttctggaagaacccaatgttatacgcgtccgaaacgcccaggagatcttgagtgataatgtgtataaagatgacctgaattggttgaaaggcattggttgctacgtttgggatacaccccaaatcctccatgccaagaaatcatacgaccttcagagtcagctacaatatacagcagcaggtaaagaaaatctacaaaactataatctggtcacagacacgcccctctatgtgactgctgttcagagtggcattaatgccagtgaggtaaaatataaagaaaattatcatcagattaaggacaaatacacaacagttctagaaacagtggattatgacagaaccagaaacctgaagaatctttacagcagtaacctgtacaaggaggcctgggatagagtgaaagccaccagctacatcctgccttccagcaccttgtccctgacacacgccaagaaccagaagcatctggccagccatatcaaatatcgggaagaatatgaaaagttcaaagctctttatacgttaccaagaagtgttgacgatgatccgaacacagcacggtgcctccgagttggcaagcttaacatcgatcgcctgtacagatcagtttatgaaaagaacaagatgaaaatccacatcgtgcccgacatggtagagatggttactgccaaggattcccagaagaaagtcagtgagattgattaccgcctgcgcctccacgaatggatttgccaccccgacttgcaagtcaatgatcacgtcaggaaagtcacagatcagatcagcgatattgtatacaaggatgacctcaactggctgaaaggcattggttgctacgtctgggacactcctgaaatcctccatgccaagcatgcttatgatctacgtgatgatatcaagtataaagctcacatgttgaaaacaaggaatgactacaagcttgtcacagatacaccagtctacgtgcaggctgtcaaaagtgggaaacagctaagtgacgctgtctaccactatgactatgtgcacagtgtcagaggcaaagtggctccaactaccaaaaccgtggatctggaccgggcccttcatgcatacaagctccagagttcgaatctatacaaaaccagcctgcgcaccctgcccactggatatagacttccaggtgacactcctcacttcaaacacatcaaggacacccgttacatgagcagttatttcaagtacaaagaagcctatgaacacaccaaggcatatgggtatacacttggccccaaagatgttccatttgtccacgtccggagagtcaacaatgttaccagcgagagactgtatcgggaattgtaccacaaactgaaagacaagatccatacaactcccgatacccctgagatccgccaagtcaagaagacacaagaggctgtcagtgagttgatctacaaatcagacttcttcaagatgcagggccacatgatctctctgccatacacaccccaagtgatccattgccgctatgtgggagacatcaccagtgatattaaatacaaagaggacttgcaggtcctgaagggatttggctgcttcctgtatgacactcctgacatggtccgctcccggcacctgcggaagctctggtctaattacctatacactgataaggcaaggaagatgcgagacaaatacaaagtggtgcttgacactccagaatacagaaaagtgcaagaactgaagacacatctgagtgagctggtctacagagctgcaggcaagaagcagaagtcaatctttacttcagttcctgatactcctgatcttttaagagccaagcgagggcagaagcttcagagtcagtatctgtatgttgaacttgccaccaaagagagaccccatcatcacgctggaaaccagaccacagccttgaagcatgctaaagacgtgaaggacatggtcagtgagaaaaagtacaagattcaatatgaaaagatgaaagacaagtacactccggttccagatacgccaatcctcatcagagccaagagggcttactggaatgccagtgatctacgctacaaagaaacatttcaaaagaccaaagggaaataccacacggtgaaagatgccctagacattgtctatcatcgcaaagtcacagatgacatcagtaaaataaaatacaaggagaactacatgagccagttgggtatctggaggtccattcctgatcgtccagagcatttccaccaccgagcagtcactgacacagtcagtgatgtaaaatataaagaagacttgacttggcttaaaggcattggttgctatgcctatgatacccctgatttcactctggctgaaaagaacaagactctctacagcaagtataagtataaagaagtatttgaaaggacaaagtcagatttcaagtatgttgccgactctccgatcaataggcatttcaagtatgcaactcaattgatgaatgagagaaaatataaatctagtgccaagatgtttctgcaacatggatgtaatgaaattctgcgtccagatatgttgactgctctctacaattcgcatatgtggagccagatcaaatacaggaaaaactatgaaaaatcaaaggacaaatttacctcaattgtggatactccagaacacctgcgtactacaaaagtcaacaaacaaatcagcgatatcctttataaattggaatacaacaaggccaaacccagaggctacaccacaatccacgacacncccatgttgctgcatgtccgcaaggttaaagatgaagtcagtgatctgaaatacaaagaagtataccaaagaaataaatccaactgcaccattgagccagatgctgttcatatcaaagcagccaaggacgcctacaaagtcaacaccaatctggactataagaaacagtacgaagccaacaaagcccactggaagtggactcctgaccgaccggacttcctccaggctgccaagtcatccctgcagcaaagcgattttgaatataagctggaccgggagttcctcaagggttgcaagctttctgtcactgatgacaaaaacacggtgctcgccctcaggaatactttaatagaaagtgatctgaaatacaaagagaaacatgtcaaggaaagaggaacctgccatgccgtacctgacacgcctcagatcctgctggcgaagactgtcagcaacctggtgtctgagaacaagtacaaggaccatgtcaagaagcacttggcacagggctcatacacaacactaccagagacccgggacactgttcacgtcaaggaagtgaccaagcatgtcagtgatacaaattacaaaaagaagtttgtcaaggagaaaggaaaatccaactactccatcatgctggagccaccagaggtgaaacatgctatggaagtggccaagaagcaaagtgatgtcgcttacagaaaagatgccaaagagaacctgcattacaccacagtggctgatcgaccagacatcaagaaggccacacaggcagccaaacaggccagtgaggtggagtacagagccaagcaccgcaaggaaggcagccatggcttaagcatgctcggtcgcccagacatagaaatggccaagaaggcagccaagctgagcagccaggttaaataccgagaaaatttcgataaagaaaagggcaagacaccaaaatacaatccaaaagacagccagctctacaaagtcatgaaagatgctaataatcttgcaagtgaggttaaatacaaggctgacctgaagaaacttcacaaacccgtgactgacatgaaggagtctctgatcatgaatcatgtcctgaatacaagccaacttgccagttcttaccagtacaagaagaagtatgagaagagtaaaggccactaccacaccatacccgataatctggagcagcttcacctaaaagaggccacagaattacagagtatagtgaaatacaaagaaaagtatgaaaaggaacgaggaaaacccatgctggactttgaaacaccaacgtacatcactgccaaagagtctcagcagatgcagagtgggaaagaatataggaaagattatgaagagtccattaaaggcagaaacctgactggcctggaggtcacgccagctttgttacatgtcaaatatgcaactaaaatagcaagcgagaaagagtacaggaaagatctagaggaaagcatccgtgggaagggcctcactgaaatggaagatacacctgacatgctaagagcaaagaatgccactcaaatcctcaatgagaaagaatataagcgagacctggaactggaagtcaaaggaagaggcctgaatgccatggccaatgaaactccggattttatgagggccaggaatgctactgatattgccagtcagattaagtataagcaatcagcagaaatggagaaagccaatttcacttctgtggttgatactccagagatcattcatgcccaacaagtcaagaatctttcaagccagaaaaagtacaaggaagatgctgagaagtccatgtcgtattatgagactgttttggacaccccagagatacagagagtccgggagaaccaaaagaacttcagccttctccaataccagtgtgaccttaaaaacagtaaaggaaaaattacagttgttcaagacacgccagaaatactgcgtgtaaaagaaaatcagaagaatttcagctcggttttatataaagaggatgtctcaccaggaacggctatcggaaagacacctgagatgatgagagtgaaacaaacacaggaccacattagctcggtgaagtataaggaagcaataggacaaggaactccaatccctgacctgcctgaagtgaaacgtgtgaaggagacgcagaagcacattagctcggttatgtacaaagaaaacttgggaacaggcattccaaccactgtgactccagagattgagagagtcaaacgcaatcaagagaactttagctcggttttgtacaaagaaaatttggggaaaggaatcccaacacctatcactccagagatggagagagtcaaacgcaatcaagagaactttagctcggtgttgtacaaagaaaatgtggggaaagccaccgcaacccctgtcactcctgagatgcagagagtcaaacgcaatcaagaaaacattagctcggtattgtacaaagagaacatgagaaaagcaactccgacacctgttactccagagatggagagagctaagcgcaaccaagaaaacattagctcggttctttattctgatagtttccggaaacaaatacaaggcaaagctgcctatgtattggatacccccgagatgagacgggtgagggagacccaacggcacatctcaacggtgaaatatcatgaagactttgagaaacacaagggttgcttcacaccagtggtgacagatcctatcactgaacgagtaaagaagaacatgcaggacttcagtgacattaactaccgaggtattcagaggaaagtggtagaaatggaacaaaaacggaatgaccaagatcaggagactattacaggtaactgagcctgggttgggggaggggattaactttaagtgagggggtagaagaacaaaagtagcattacctacatcaagtcaaaacataaaggacttcaatctgtttttctagaggtgcaagaaagctcctattatctcatagtttacaaagctgatttctaccttatctttgttctcctctgaggaaaagacatgacccagaacctaagctggaataagtgtgattcaatcctttggtggttgttaaaattcatgccttggttttcaagttattggaaaactccaagaacacttgttctgatcactggtttccctttcaggtttacgtgtctggcgtactaatcctggttcggtttttgactatgatccagcagaagacaacatccagtcccgaagcttacacatgattaatggtgtgttagctgaaaaaggcttacaacataaacatcaccatttagtatgctagagtcaatgactttcatttgggctctgaagttccttccctccagagttttccattttctgagctgcccatttggcataaaaataccttgttaactagtgagcaaaacttactttctagataagttcaagttagaaaaaattttgtttcactgcctcagtgcatgtctcccattattatcatttctaattttttcttccaaagaaaaaacagtagtaattctattggagaaataatgaaaatacataaaatacataggcaaagggaagagaaaggatttgacctgtaggaacttcctgagctctattgcatcaaggaagtttattcattacacaaagcaggctgcacaacttcattccttcttttcatgttaaaaagcagaatactagcctggaaaagagaatgagaccccttttctacaaacagtaaaaaaaaattagccgcgagtggtgttgtacacctgtagtaccagctgttcagggggctgaagtgggaggatagcttgagcctagaaagttgaagctgcagtgagccgtgattgtacc

SEQ ID NO: 286048 - DNA, 8687 bp, Homo sapiens
  misc_feature (5808)..(5808): n is a, c, g, or t
agagaatataagaaagcttatgagaagtctaaaggaattcacaacacaccgttggacatgatgtcaattgttcaagccaagaaatgccaggtcctggttagcgacattgattatcgcaattatctgcaccagtggacgtgtctgccagatcagaacgatgtgatccaggccaagaaagcctacgacctgcagagcgataacttgtacaagtcagacctggaatggctgaagggtattggatggttgccagagggttctgtggaagtgatgagagtgaagaatgcccagaatctcttgaatgaaaggctgtatcgtataaagcctgaggccctcaaattcaccagcattgttgacaccccggaagtaatccaggcaaagatcaatgctgtacagatcagtgagccattgtatcgcgatgcctgggagaaagagaaggctaatgtgaacgtgccagctgacactcccctgatgctgcaatccaaaatcaatgccctgcagatcagcaataaacgctatcagcaagcttgggaagatgtcaagatgactggttatgacctgcgagcagatgccattgggatccagcatgccaaggcttccagggatattgccagtgactatctgtacaaaactgcttatgagaaacagaaaggccattacattggctgtcgcagcgccaaggaagaccctaaactggtttgggcagcaaatgtgttgaagatgcagaatgacaggctgtacaaaaaggcctacaacgaccacaaagccaagatctccatccctgtggacatggtgtccatcagcgctgccaaagaaggtcaggcactggcaagtgatgtggactatcgccattacctgcaccgctggtcttgctttcccgaccagaatgatgtgatccaagccaggaaagcctacgacctacagagcgacgccctctacaaggctgacttggagtggttgcgtggcattggctggatgccccaagggtctcctgaagtgttgagagtcaaaaacgcccagaatatcttttgtgacagtgtctatcggacgcctgtggtgaaccttaagtacacaagcattgttgacacacctgaagtggtccttgctaaatcaaatgctgaaaatattagtattccaaagtacagagaggtttgggacaaggataaaacttcaatacacataatgccagatactccagaaattaatctcgctagagcaaatgctcttaatgtgagcaataaactttaccgtgagggctgggatgaaatgaaggcgggctgtgatgtccggctggatgccatccccatccaggctgccaaggcctccagggagattgccagtgactataaatataagcttgaccatgagaagcagaagggacactacgtgggcaccctcacagccagggatgacaacaagatccgctgggccctcatagctgacaagctccagaatgaacgagagtaccggctggactgggccaaatggaaggccaagatccagagccctgtggacatgctttccatcctgcactctaaaaattcccaggctctggtcagtgacatggattaccgcaattacctgcaccagtggacctgcatgcccgaccagaacgatgtgattcaggccaagaaggcctacgaactgcagagcgataatgtttacaaggctgacttggaatggttgcgtggaattgggtggatgccaaatgactccgtgtccgtcaatcatgccaaacatgccgcggacatcttcagtgagaaaaaatatcgcacaaaaatagaaactctcaactttacgcctgtggatgacagagttgattatgtgacagcgaaacaaagtggcgagatcctcgatgatattaaataccggaaagactggaatgccaccaaatcaaagtacaccctcacagaaacccccctgctgcacactgcccaggaggctgctaggatactggaccagtatctctacaaggaaggctgggagagacaaaaagccacaggttacattttgcctccagatgctgtgccatttgttcatgcccatcactgcaatgacgttcagagtgagctgaaatacaaagctgaacatgtgaagcaaaaaggtcattatgttggtgtcccgacgatgagagatgatcctaagctggtttggtttgagcatgcaggccagattcagaatgagagactatacaaagaggactatcacaaaacaaaggccaaaatcaatatacctgctgatatggtgtcagtcttggccgccaagcaggggcagacccttgtcagtgatattgattatcgtaattacttgcaccaatggatgtgtcatcctgaccagaacgatgttattcaggcaagaaaggcctatgacctacagagtgataatgtctacagagctgacctggagtggctccgaggcattggctggatcccactggattctgtggaccatgtaagggttactaagaaccaggaaatgatgagtcagatcaaatataagaaaaatgcccttgaaaactatcctaactttacaagtgtggtggatcctccagagattgttttagccaagattaattctgtcaatcaaagtgatgtaaaatataaagaaacatttaataaagcaaagggcaaatatacgttttcaccagatacaccacatatctcccactccaaagacatgggaaaactctacagtactatactgtataaaggggcgtgggagggcaccaaggcctatggctacaccctggatgagcgctacattcccattgttggagccaagcatgctgatctggtgaacagtgagcttaaatacaaagagacatatgagaagcagaaaggtcactacctggctggaaaagtgatcggtgaattccctggtgtggttcactgtctggatttccaaaagatgaggagtgcgttgaactacagaaaacattatgaggataccaaagcaaatgttcatatccccaatgacatgatgaatcacgtgctggctaaaaggtgccagtacatcctcagtgacctggagtatcgacactatttccaccagtggacgtctcttctggaagaacccaatgttatacgcgtccgaaacgcccaggagatcttgagtgataatgtgtataaagatgacctgaattggttgaaaggcattggttgctacgtttgggatacaccccaaatcctccatgccaagaaatcatacgaccttcagagtcagctacaatatacagcagcaggtaaagaaaatctacaaaactataatctggtcacagacacgcccctctatgtgactgctgttcagagtggcattaatgccagtgaggtaaaatataaagaaaattatcatcagattaaggacaaatacacaacagttctagaaacagtggattatgacagaaccagaaacctgaagaatctttacagcagtaacctgtacaaggaggcctgggatagagtgaaagccaccagctacatcctgccttccagcaccttgtccctgacacacgccaagaaccagaagcatctggccagccatatcaaatatcgggaagaatatgaaaagttcaaagctctttatacgttaccaagaagtgttgacgatgatccgaacacagcacggtgcctccgagttggcaagcttaacatcgatcgcctgtacagatcagtttatgaaaagaacaagatgaaaatccacatcgtgcccgacatggtagagatggttactgccaaggattcccagaagaaagtcagtgagattgattaccgcctgcgcctccacgaatggatttgccaccccgacttgcaagtcaatgatcacgtcaggaaagtcacagatcagatcagcgatattgtatacaaggatgacctcaactggctgaaaggcattggttgctacgtctgggacactcctgaaatcctccatgccaagcatgcttatgatctacgtgatgatatcaagtataaagctcacatgttgaaaacaaggaatgactacaagcttgtcacagatacaccagtctacgtgcaggctgtcaaaagtgggaaacagctaagtgacgctgtctaccactatgactatgtgcacagtgtcagaggcaaagtggctccaactaccaaaaccgtggatctggaccgggcccttcatgcatacaagctccagagttcgaatctatacaaaaccagcctgcgcaccctgcccactggatatagacttccaggtgacactcctcacttcaaacacatcaaggacacccgttacatgagcagttatttcaagtacaaagaagcctatgaacacaccaaggcatatgggtatacacttggccccaaagatgttccatttgtccacgtccggagagtcaacaatgttaccagcgagagactgtatcgggaattgtaccacaaactgaaagacaagatccatacaactcccgatacccctgagatccgccaagtcaagaagacacaagaggctgtcagtgagttgatctacaaatcagacttcttcaagatgcagggccacatgatctctctgccatacacaccccaagtgatccattgccgctatgtgggagacatcaccagtgatattaaatacaaagaggacttgcaggtcctgaagggatttggctgcttcctgtatgacactcctgacatggtccgctcccggcacctgcggaagctctggtctaattacctatacactgataaggcaaggaagatgcgagacaaatacaaagtggtgcttgacactccagaatacagaaaagtgcaagaactgaagacacatctgagtgagctggtctacagagctgcaggcaagaagcagaagtcaatctttacttcagttcctgatactcctgatcttttaagagccaagcgagggcagaagcttcagagtcagtatctgtatgttgaacttgccaccaaagagagaccccatcatcacgctggaaaccagaccacagccttgaagcatgctaaagacgtgaaggacatggtcagtgagaaaaagtacaagattcaatatgaaaagatgaaagacaagtacactccggttccagatacgccaatcctcatcagagccaagagggcttactggaatgccagtgatctacgctacaaagaaacatttcaaaagaccaaagggaaataccacacggtgaaagatgccctagacattgtctatcatcgcaaagtcacagatgacatcagtaaaataaaatacaaggagaactacatgagccagttgggtatctggaggtccattcctgatcgtccagagcatttccaccaccgagcagtcactgacacagtcagtgatgtaaaatataaagaagacttgacttggcttaaaggcattggttgctatgcctatgatacccctgatttcactctggctgaaaagaacaagactctctacagcaagtataagtataaagaagtatttgaaaggacaaagtcagatttcaagtatgttgccgactctccgatcaataggcatttcaagtatgcaactcaattgatgaatgagagaaaatataaatctagtgccaagatgtttctgcaacatggatgtaatgaaattctgcgtccagatatgttgactgctctctacaattcgcatatgtggagccagatcaaatacaggaaaaactatgaaaaatcaaaggacaaatttacctcaattgtggatactccagaacacctgcgtactacaaaagtcaacaaacaaatcagcgatatcctttataaattggaatacaacaaggccaaacccagaggctacaccacaatccacgacacncccatgttgctgcatgtccgcaaggttaaagatgaagtcagtgatctgaaatacaaagaagtataccaaagaaataaatccaactgcaccattgagccagatgctgttcatatcaaagcagccaaggacgcctacaaagtcaacaccaatctggactataagaaacagtacgaagccaacaaagcccactggaagtggactcctgaccgaccggacttcctccaggctgccaagtcatccctgcagcaaagcgattttgaatataagctggaccgggagttcctcaagggttgcaagctttctgtcactgatgacaaaaacacggtgctcgccctcaggaatactttaatagaaagtgatctgaaatacaaagagaaacatgtcaaggaaagaggaacctgccatgccgtacctgacacgcctcagatcctgctggcgaagactgtcagcaacctggtgtctgagaacaagtacaaggaccatgtcaagaagcacttggcacagggctcatacacaacactaccagagacccgggacactgttcacgtcaaggaagtgaccaagcatgtcagtgatacaaattacaaaaagaagtttgtcaaggagaaaggaaaatccaactactccatcatgctggagccaccagaggtgaaacatgctatggaagtggccaagaagcaaagtgatgtcgcttacagaaaagatgccaaagagaacctgcattacaccacagtggctgatcgaccagacatcaagaaggccacacaggcagccaaacaggccagtgaggtggagtacagagccaagcaccgcaaggaaggcagccatggcttaagcatgctcggtcgcccagacatagaaatggccaagaaggcagccaagctgagcagccaggttaaataccgagaaaatttcgataaagaaaagggcaagacaccaaaatacaatccaaaagacagccagctctacaaagtcatgaaagatgctaataatcttgcaagtgaggttaaatacaaggctgacctgaagaaacttcacaaacccgtgactgacatgaaggagtctctgatcatgaatcatgtcctgaatacaagccaacttgccagttcttaccagtacaagaagaagtatgagaagagtaaaggccactaccacaccatacccgataatctggagcagcttcacctaaaagaggccacagaattacagagtatagtgaaatacaaagaaaagtatgaaaaggaacgaggaaaacccatgctggactttgaaacaccaacgtacatcactgccaaagagtctcagcagatgcagagtgggaaagaatataggaaagattatgaagagtccattaaaggcagaaacctgactggcctggaggtcacgccagctttgttacatgtcaaatatgcaactaaaatagcaagcgagaaagagtacaggaaagatctagaggaaagcatccgtgggaagggcctcactgaaatggaagatacacctgacatgctaagagcaaagaatgccactcaaatcctcaatgagaaagaatataagcgagacctggaactggaagtcaaaggaagaggcctgaatgccatggccaatgaaactccggattttatgagggccaggaatgctactgatattgccagtcagattaagtataagcaatcagcagaaatggagaaagccaatttcacttctgtggttgatactccagagatcattcatgcccaacaagtcaagaatctttcaagccagaaaaagtacaaggaagatgctgagaagtccatgtcgtattatgagactgttttggacaccccagagatacagagagtccgggagaaccaaaagaacttcagccttctccaataccagtgtgaccttaaaaacagtaaaggaaaaattacagttgttcaagacacgccagaaatactgcgtgtaaaagaaaatcagaagaatttcagctcggttttatataaagaggatgtctcaccaggaacggctatcggaaagacacctgagatgatgagagtgaaacaaacacaggaccacattagctcggtgaagtataaggaagcaataggacaaggaactccaatccctgacctgcctgaagtgaaacgtgtgaaggagacgcagaagcacattagctcggttatgtacaaagaaaacttgggaacaggcattccaaccactgtgactccagagattgagagagtcaaacgcaatcaagagaactttagctcggttttgtacaaagaaaatttggggaaaggaatcccaacacctatcactccagagatggagagagtcaaacgcaatcaagagaactttagctcggtatttcttagggggccaaaaaaaaaaaaatcccttaattttatttaaaataataacaccttacaaatgtaaaattactaaattcatataatgaaaataatgataccaaatattacctcagttttcaacccaaatctaatttagtatttagttctggtgtgaaattttaactgtgttttctctaaaacatagatatttatcactttctttaaaaacctgtaatactctgttttcttcctccattcctcctttaataacagtaggtgtttctaactggtgtaacacagtcaaaagtaaaatctaacaccctttcaaaaggacaatgttaattagaattttatttgtatttattgtggctgtttaatgtattctttatgtttgcagcttttaagtttttttttttttatgtttagatgtttatttatttttccataagtttgggaggtacaggtggtatttggttactaagttctttagtggtgacttgtgagattttggtgcacccatcacccaagcagtatacactgcaccatatt

SEQ ID NO: 286049 - DNA, 8278 bp, Homo sapiens
  misc_feature (5808)..(5808): n is a, c, g, or t
agagaatataagaaagcttatgagaagtctaaaggaattcacaacacaccgttggacatgatgtcaattgttcaagccaagaaatgccaggtcctggttagcgacattgattatcgcaattatctgcaccagtggacgtgtctgccagatcagaacgatgtgatccaggccaagaaagcctacgacctgcagagcgataacttgtacaagtcagacctggaatggctgaagggtattggatggttgccagagggttctgtggaagtgatgagagtgaagaatgcccagaatctcttgaatgaaaggctgtatcgtataaagcctgaggccctcaaattcaccagcattgttgacaccccggaagtaatccaggcaaagatcaatgctgtacagatcagtgagccattgtatcgcgatgcctgggagaaagagaaggctaatgtgaacgtgccagctgacactcccctgatgctgcaatccaaaatcaatgccctgcagatcagcaataaacgctatcagcaagcttgggaagatgtcaagatgactggttatgacctgcgagcagatgccattgggatccagcatgccaaggcttccagggatattgccagtgactatctgtacaaaactgcttatgagaaacagaaaggccattacattggctgtcgcagcgccaaggaagaccctaaactggtttgggcagcaaatgtgttgaagatgcagaatgacaggctgtacaaaaaggcctacaacgaccacaaagccaagatctccatccctgtggacatggtgtccatcagcgctgccaaagaaggtcaggcactggcaagtgatgtggactatcgccattacctgcaccgctggtcttgctttcccgaccagaatgatgtgatccaagccaggaaagcctacgacctacagagcgacgccctctacaaggctgacttggagtggttgcgtggcattggctggatgccccaagggtctcctgaagtgttgagagtcaaaaacgcccagaatatcttttgtgacagtgtctatcggacgcctgtggtgaaccttaagtacacaagcattgttgacacacctgaagtggtccttgctaaatcaaatgctgaaaatattagtattccaaagtacagagaggtttgggacaaggataaaacttcaatacacataatgccagatactccagaaattaatctcgctagagcaaatgctcttaatgtgagcaataaactttaccgtgagggctgggatgaaatgaaggcgggctgtgatgtccggctggatgccatccccatccaggctgccaaggcctccagggagattgccagtgactataaatataagcttgaccatgagaagcagaagggacactacgtgggcaccctcacagccagggatgacaacaagatccgctgggccctcatagctgacaagctccagaatgaacgagagtaccggctggactgggccaaatggaaggccaagatccagagccctgtggacatgctttccatcctgcactctaaaaattcccaggctctggtcagtgacatggattaccgcaattacctgcaccagtggacctgcatgcccgaccagaacgatgtgattcaggccaagaaggcctacgaactgcagagcgataatgtttacaaggctgacttggaatggttgcgtggaattgggtggatgccaaatgactccgtgtccgtcaatcatgccaaacatgccgcggacatcttcagtgagaaaaaatatcgcacaaaaatagaaactctcaactttacgcctgtggatgacagagttgattatgtgacagcgaaacaaagtggcgagatcctcgatgatattaaataccggaaagactggaatgccaccaaatcaaagtacaccctcacagaaacccccctgctgcacactgcccaggaggctgctaggatactggaccagtatctctacaaggaaggctgggagagacaaaaagccacaggttacattttgcctccagatgctgtgccatttgttcatgcccatcactgcaatgacgttcagagtgagctgaaatacaaagctgaacatgtgaagcaaaaaggtcattatgttggtgtcccgacgatgagagatgatcctaagctggtttggtttgagcatgcaggccagattcagaatgagagactatacaaagaggactatcacaaaacaaaggccaaaatcaatatacctgctgatatggtgtcagtcttggccgccaagcaggggcagacccttgtcagtgatattgattatcgtaattacttgcaccaatggatgtgtcatcctgaccagaacgatgttattcaggcaagaaaggcctatgacctacagagtgataatgtctacagagctgacctggagtggctccgaggcattggctggatcccactggattctgtggaccatgtaagggttactaagaaccaggaaatgatgagtcagatcaaatataagaaaaatgcccttgaaaactatcctaactttacaagtgtggtggatcctccagagattgttttagccaagattaattctgtcaatcaaagtgatgtaaaatataaagaaacatttaataaagcaaagggcaaatatacgttttcaccagatacaccacatatctcccactccaaagacatgggaaaactctacagtactatactgtataaaggggcgtgggagggcaccaaggcctatggctacaccctggatgagcgctacattcccattgttggagccaagcatgctgatctggtgaacagtgagcttaaatacaaagagacatatgagaagcagaaaggtcactacctggctggaaaagtgatcggtgaattccctggtgtggttcactgtctggatttccaaaagatgaggagtgcgttgaactacagaaaacattatgaggataccaaagcaaatgttcatatccccaatgacatgatgaatcacgtgctggctaaaaggtgccagtacatcctcagtgacctggagtatcgacactatttccaccagtggacgtctcttctggaagaacccaatgttatacgcgtccgaaacgcccaggagatcttgagtgataatgtgtataaagatgacctgaattggttgaaaggcattggttgctacgtttgggatacaccccaaatcctccatgccaagaaatcatacgaccttcagagtcagctacaatatacagcagcaggtaaagaaaatctacaaaactataatctggtcacagacacgcccctctatgtgactgctgttcagagtggcattaatgccagtgaggtaaaatataaagaaaattatcatcagattaaggacaaatacacaacagttctagaaacagtggattatgacagaaccagaaacctgaagaatctttacagcagtaacctgtacaaggaggcctgggatagagtgaaagccaccagctacatcctgccttccagcaccttgtccctgacacacgccaagaaccagaagcatctggccagccatatcaaatatcgggaagaatatgaaaagttcaaagctctttatacgttaccaagaagtgttgacgatgatccgaacacagcacggtgcctccgagttggcaagcttaacatcgatcgcctgtacagatcagtttatgaaaagaacaagatgaaaatccacatcgtgcccgacatggtagagatggttactgccaaggattcccagaagaaagtcagtgagattgattaccgcctgcgcctccacgaatggatttgccaccccgacttgcaagtcaatgatcacgtcaggaaagtcacagatcagatcagcgatattgtatacaaggatgacctcaactggctgaaaggcattggttgctacgtctgggacactcctgaaatcctccatgccaagcatgcttatgatctacgtgatgatatcaagtataaagctcacatgttgaaaacaaggaatgactacaagcttgtcacagatacaccagtctacgtgcaggctgtcaaaagtgggaaacagctaagtgacgctgtctaccactatgactatgtgcacagtgtcagaggcaaagtggctccaactaccaaaaccgtggatctggaccgggcccttcatgcatacaagctccagagttcgaatctatacaaaaccagcctgcgcaccctgcccactggatatagacttccaggtgacactcctcacttcaaacacatcaaggacacccgttacatgagcagttatttcaagtacaaagaagcctatgaacacaccaaggcatatgggtatacacttggccccaaagatgttccatttgtccacgtccggagagtcaacaatgttaccagcgagagactgtatcgggaattgtaccacaaactgaaagacaagatccatacaactcccgatacccctgagatccgccaagtcaagaagacacaagaggctgtcagtgagttgatctacaaatcagacttcttcaagatgcagggccacatgatctctctgccatacacaccccaagtgatccattgccgctatgtgggagacatcaccagtgatattaaatacaaagaggacttgcaggtcctgaagggatttggctgcttcctgtatgacactcctgacatggtccgctcccggcacctgcggaagctctggtctaattacctatacactgataaggcaaggaagatgcgagacaaatacaaagtggtgcttgacactccagaatacagaaaagtgcaagaactgaagacacatctgagtgagctggtctacagagctgcaggcaagaagcagaagtcaatctttacttcagttcctgatactcctgatcttttaagagccaagcgagggcagaagcttcagagtcagtatctgtatgttgaacttgccaccaaagagagaccccatcatcacgctggaaaccagaccacagccttgaagcatgctaaagacgtgaaggacatggtcagtgagaaaaagtacaagattcaatatgaaaagatgaaagacaagtacactccggttccagatacgccaatcctcatcagagccaagagggcttactggaatgccagtgatctacgctacaaagaaacatttcaaaagaccaaagggaaataccacacggtgaaagatgccctagacattgtctatcatcgcaaagtcacagatgacatcagtaaaataaaatacaaggagaactacatgagccagttgggtatctggaggtccattcctgatcgtccagagcatttccaccaccgagcagtcactgacacagtcagtgatgtaaaatataaagaagacttgacttggcttaaaggcattggttgctatgcctatgatacccctgatttcactctggctgaaaagaacaagactctctacagcaagtataagtataaagaagtatttgaaaggacaaagtcagatttcaagtatgttgccgactctccgatcaataggcatttcaagtatgcaactcaattgatgaatgagagaaaatataaatctagtgccaagatgtttctgcaacatggatgtaatgaaattctgcgtccagatatgttgactgctctctacaattcgcatatgtggagccagatcaaatacaggaaaaactatgaaaaatcaaaggacaaatttacctcaattgtggatactccagaacacctgcgtactacaaaagtcaacaaacaaatcagcgatatcctttataaattggaatacaacaaggccaaacccagaggctacaccacaatccacgacacncccatgttgctgcatgtccgcaaggttaaagatgaagtcagtgatctgaaatacaaagaagtataccaaagaaataaatccaactgcaccattgagccagatgctgttcatatcaaagcagccaaggacgcctacaaagtcaacaccaatctggactataagaaacagtacgaagccaacaaagcccactggaagtggactcctgaccgaccggacttcctccaggctgccaagtcatccctgcagcaaagcgattttgaatataagctggaccgggagttcctcaagggttgcaagctttctgtcactgatgacaaaaacacggtgctcgccctcaggaatactttaatagaaagtgatctgaaatacaaagagaaacatgtcaaggaaagaggaacctgccatgccgtacctgacacgcctcagatcctgctggcgaagactgtcagcaacctggtgtctgagaacaagtacaaggaccatgtcaagaagcacttggcacagggctcatacacaacactaccagagacccgggacactgttcacgtcaaggaagtgaccaagcatgtcagtgatacaaattacaaaaagaagtttgtcaaggagaaaggaaaatccaactactccatcatgctggagccaccagaggtgaaacatgctatggaagtggccaagaagcaaagtgatgtcgcttacagaaaagatgccaaagagaacctgcattacaccacagtggctgatcgaccagacatcaagaaggccacacaggcagccaaacaggccagtgaggtggagtacagagccaagcaccgcaaggaaggcagccatggcttaagcatgctcggtcgcccagacatagaaatggccaagaaggcagccaagctgagcagccaggttaaataccgagaaaatttcgataaagaaaagggcaagacaccaaaatacaatccaaaagacagccagctctacaaagtcatgaaagatgctaataatcttgcaagtgaggttaaatacaaggctgacctgaagaaacttcacaaacccgtgactgacatgaaggagtctctgatcatgaatcatgtcctgaatacaagccaacttgccagttcttaccagtacaagaagaagtatgagaagagtaaaggccactaccacaccatacccgataatctggagcagcttcacctaaaagaggccacagaattacagagtatagtgaaatacaaagaaaagtatgaaaaggaacgaggaaaacccatgctggactttgaaacaccaacgtacatcactgccaaagagtctcagcagatgcagagtgggaaagaatataggaaagattatgaagagtccattaaaggcagaaacctgactggcctggaggtcacgccagctttgttacatgtcaaatatgcaactaaaatagcaagcgagaaagagtacaggaaagatctagaggaaagcatccgtgggaagggcctcactgaaatggaagatacacctgacatgctaagagcaaagaatgccactcaaatcctcaatgagaaagaatataagcgagacctggaactggaagtcaaaggaagaggcctgaatgccatggccaatgaaactccggattttatgagggccaggaatgctactgatattgccagtcagattaagtataagcaatcagcagaaatggagaaagccaatttcacttctgtggttgatactccagagatcattcatgcccaacaagtcaagaatctttcaagccagaaaaagtacaaggaagatgctgagaagtccatgtcgtattatgagactgttttggacaccccagagatacagagagtccgggagaaccaaaagaacttcagccttctccaataccagtgtgaccttaaaaacagtaaaggaaaaattacagttgttcaagacacgccagaaatactgcgtgtaaaagaaaatcagaagaatttcagctcggtatatttactatttattttgcatttaatgctaacctagtcatttcactctcctctttaaaaatatactagccttatattgatacacacaattaacatctaacctcctcagtaatactagcagtgatttgctaaaatccccaatactttgctccaaaatcatctccagagaccatttgaaataactttaaatctgctaacaacgtaacttttatttttaaattttttaatcccagggcagtaacatgtgttgtcttgctccaagaagatggatttctttttgacattgtgatttcttttgttatccctcccccaaataactgactgagtttgcatttctttaatggattttgtgttacatatggggagggttttgttgttaatcaacatttcctggctcttctcatcctgtgttagtatggtataccacaatcttagaagaaatcttaagatctggaaagatccatgttgtaaaactggtctgagtcactgatacggac

SEQ ID NO: 286050 - DNA, 7827 bp, Homo sapiens
  misc_feature (5808)..(5808): n is a, c, g, or t
agagaatataagaaagcttatgagaagtctaaaggaattcacaacacaccgttggacatgatgtcaattgttcaagccaagaaatgccaggtcctggttagcgacattgattatcgcaattatctgcaccagtggacgtgtctgccagatcagaacgatgtgatccaggccaagaaagcctacgacctgcagagcgataacttgtacaagtcagacctggaatggctgaagggtattggatggttgccagagggttctgtggaagtgatgagagtgaagaatgcccagaatctcttgaatgaaaggctgtatcgtataaagcctgaggccctcaaattcaccagcattgttgacaccccggaagtaatccaggcaaagatcaatgctgtacagatcagtgagccattgtatcgcgatgcctgggagaaagagaaggctaatgtgaacgtgccagctgacactcccctgatgctgcaatccaaaatcaatgccctgcagatcagcaataaacgctatcagcaagcttgggaagatgtcaagatgactggttatgacctgcgagcagatgccattgggatccagcatgccaaggcttccagggatattgccagtgactatctgtacaaaactgcttatgagaaacagaaaggccattacattggctgtcgcagcgccaaggaagaccctaaactggtttgggcagcaaatgtgttgaagatgcagaatgacaggctgtacaaaaaggcctacaacgaccacaaagccaagatctccatccctgtggacatggtgtccatcagcgctgccaaagaaggtcaggcactggcaagtgatgtggactatcgccattacctgcaccgctggtcttgctttcccgaccagaatgatgtgatccaagccaggaaagcctacgacctacagagcgacgccctctacaaggctgacttggagtggttgcgtggcattggctggatgccccaagggtctcctgaagtgttgagagtcaaaaacgcccagaatatcttttgtgacagtgtctatcggacgcctgtggtgaaccttaagtacacaagcattgttgacacacctgaagtggtccttgctaaatcaaatgctgaaaatattagtattccaaagtacagagaggtttgggacaaggataaaacttcaatacacataatgccagatactccagaaattaatctcgctagagcaaatgctcttaatgtgagcaataaactttaccgtgagggctgggatgaaatgaaggcgggctgtgatgtccggctggatgccatccccatccaggctgccaaggcctccagggagattgccagtgactataaatataagcttgaccatgagaagcagaagggacactacgtgggcaccctcacagccagggatgacaacaagatccgctgggccctcatagctgacaagctccagaatgaacgagagtaccggctggactgggccaaatggaaggccaagatccagagccctgtggacatgctttccatcctgcactctaaaaattcccaggctctggtcagtgacatggattaccgcaattacctgcaccagtggacctgcatgcccgaccagaacgatgtgattcaggccaagaaggcctacgaactgcagagcgataatgtttacaaggctgacttggaatggttgcgtggaattgggtggatgccaaatgactccgtgtccgtcaatcatgccaaacatgccgcggacatcttcagtgagaaaaaatatcgcacaaaaatagaaactctcaactttacgcctgtggatgacagagttgattatgtgacagcgaaacaaagtggcgagatcctcgatgatattaaataccggaaagactggaatgccaccaaatcaaagtacaccctcacagaaacccccctgctgcacactgcccaggaggctgctaggatactggaccagtatctctacaaggaaggctgggagagacaaaaagccacaggttacattttgcctccagatgctgtgccatttgttcatgcccatcactgcaatgacgttcagagtgagctgaaatacaaagctgaacatgtgaagcaaaaaggtcattatgttggtgtcccgacgatgagagatgatcctaagctggtttggtttgagcatgcaggccagattcagaatgagagactatacaaagaggactatcacaaaacaaaggccaaaatcaatatacctgctgatatggtgtcagtcttggccgccaagcaggggcagacccttgtcagtgatattgattatcgtaattacttgcaccaatggatgtgtcatcctgaccagaacgatgttattcaggcaagaaaggcctatgacctacagagtgataatgtctacagagctgacctggagtggctccgaggcattggctggatcccactggattctgtggaccatgtaagggttactaagaaccaggaaatgatgagtcagatcaaatataagaaaaatgcccttgaaaactatcctaactttacaagtgtggtggatcctccagagattgttttagccaagattaattctgtcaatcaaagtgatgtaaaatataaagaaacatttaataaagcaaagggcaaatatacgttttcaccagatacaccacatatctcccactccaaagacatgggaaaactctacagtactatactgtataaaggggcgtgggagggcaccaaggcctatggctacaccctggatgagcgctacattcccattgttggagccaagcatgctgatctggtgaacagtgagcttaaatacaaagagacatatgagaagcagaaaggtcactacctggctggaaaagtgatcggtgaattccctggtgtggttcactgtctggatttccaaaagatgaggagtgcgttgaactacagaaaacattatgaggataccaaagcaaatgttcatatccccaatgacatgatgaatcacgtgctggctaaaaggtgccagtacatcctcagtgacctggagtatcgacactatttccaccagtggacgtctcttctggaagaacccaatgttatacgcgtccgaaacgcccaggagatcttgagtgataatgtgtataaagatgacctgaattggttgaaaggcattggttgctacgtttgggatacaccccaaatcctccatgccaagaaatcatacgaccttcagagtcagctacaatatacagcagcaggtaaagaaaatctacaaaactataatctggtcacagacacgcccctctatgtgactgctgttcagagtggcattaatgccagtgaggtaaaatataaagaaaattatcatcagattaaggacaaatacacaacagttctagaaacagtggattatgacagaaccagaaacctgaagaatctttacagcagtaacctgtacaaggaggcctgggatagagtgaaagccaccagctacatcctgccttccagcaccttgtccctgacacacgccaagaaccagaagcatctggccagccatatcaaatatcgggaagaatatgaaaagttcaaagctctttatacgttaccaagaagtgttgacgatgatccgaacacagcacggtgcctccgagttggcaagcttaacatcgatcgcctgtacagatcagtttatgaaaagaacaagatgaaaatccacatcgtgcccgacatggtagagatggttactgccaaggattcccagaagaaagtcagtgagattgattaccgcctgcgcctccacgaatggatttgccaccccgacttgcaagtcaatgatcacgtcaggaaagtcacagatcagatcagcgatattgtatacaaggatgacctcaactggctgaaaggcattggttgctacgtctgggacactcctgaaatcctccatgccaagcatgcttatgatctacgtgatgatatcaagtataaagctcacatgttgaaaacaaggaatgactacaagcttgtcacagatacaccagtctacgtgcaggctgtcaaaagtgggaaacagctaagtgacgctgtctaccactatgactatgtgcacagtgtcagaggcaaagtggctccaactaccaaaaccgtggatctggaccgggcccttcatgcatacaagctccagagttcgaatctatacaaaaccagcctgcgcaccctgcccactggatatagacttccaggtgacactcctcacttcaaacacatcaaggacacccgttacatgagcagttatttcaagtacaaagaagcctatgaacacaccaaggcatatgggtatacacttggccccaaagatgttccatttgtccacgtccggagagtcaacaatgttaccagcgagagactgtatcgggaattgtaccacaaactgaaagacaagatccatacaactcccgatacccctgagatccgccaagtcaagaagacacaagaggctgtcagtgagttgatctacaaatcagacttcttcaagatgcagggccacatgatctctctgccatacacaccccaagtgatccattgccgctatgtgggagacatcaccagtgatattaaatacaaagaggacttgcaggtcctgaagggatttggctgcttcctgtatgacactcctgacatggtccgctcccggcacctgcggaagctctggtctaattacctatacactgataaggcaaggaagatgcgagacaaatacaaagtggtgcttgacactccagaatacagaaaagtgcaagaactgaagacacatctgagtgagctggtctacagagctgcaggcaagaagcagaagtcaatctttacttcagttcctgatactcctgatcttttaagagccaagcgagggcagaagcttcagagtcagtatctgtatgttgaacttgccaccaaagagagaccccatcatcacgctggaaaccagaccacagccttgaagcatgctaaagacgtgaaggacatggtcagtgagaaaaagtacaagattcaatatgaaaagatgaaagacaagtacactccggttccagatacgccaatcctcatcagagccaagagggcttactggaatgccagtgatctacgctacaaagaaacatttcaaaagaccaaagggaaataccacacggtgaaagatgccctagacattgtctatcatcgcaaagtcacagatgacatcagtaaaataaaatacaaggagaactacatgagccagttgggtatctggaggtccattcctgatcgtccagagcatttccaccaccgagcagtcactgacacagtcagtgatgtaaaatataaagaagacttgacttggcttaaaggcattggttgctatgcctatgatacccctgatttcactctggctgaaaagaacaagactctctacagcaagtataagtataaagaagtatttgaaaggacaaagtcagatttcaagtatgttgccgactctccgatcaataggcatttcaagtatgcaactcaattgatgaatgagagaaaatataaatctagtgccaagatgtttctgcaacatggatgtaatgaaattctgcgtccagatatgttgactgctctctacaattcgcatatgtggagccagatcaaatacaggaaaaactatgaaaaatcaaaggacaaatttacctcaattgtggatactccagaacacctgcgtactacaaaagtcaacaaacaaatcagcgatatcctttataaattggaatacaacaaggccaaacccagaggctacaccacaatccacgacacncccatgttgctgcatgtccgcaaggttaaagatgaagtcagtgatctgaaatacaaagaagtataccaaagaaataaatccaactgcaccattgagccagatgctgttcatatcaaagcagccaaggacgcctacaaagtcaacaccaatctggactataagaaacagtacgaagccaacaaagcccactggaagtggactcctgaccgaccggacttcctccaggctgccaagtcatccctgcagcaaagcgattttgaatataagctggaccgggagttcctcaagggttgcaagctttctgtcactgatgacaaaaacacggtgctcgccctcaggaatactttaatagaaagtgatctgaaatacaaagagaaacatgtcaaggaaagaggaacctgccatgccgtacctgacacgcctcagatcctgctggcgaagactgtcagcaacctggtgtctgagaacaagtacaaggaccatgtcaagaagcacttggcacagggctcatacacaacactaccagagacccgggacactgttcacgtcaaggaagtgaccaagcatgtcagtgatacaaattacaaaaagaagtttgtcaaggagaaaggaaaatccaactactccatcatgctggagccaccagaggtgaaacatgctatggaagtggccaagaagcaaagtgatgtcgcttacagaaaagatgccaaagagaacctgcattacaccacagtggctgatcgaccagacatcaagaaggccacacaggcagccaaacaggccagtgaggtggagtacagagccaagcaccgcaaggaaggcagccatggcttaagcatgctcggtcgcccagacatagaaatggccaagaaggcagccaagctgagcagccaggttaaataccgagaaaatttcgataaagaaaagggcaagacaccaaaatacaatccaaaagacagccagctctacaaagtcatgaaagatgctaataatcttgcaagtgaggttaaatacaaggctgacctgaagaaacttcacaaacccgtgactgacatgaaggagtctctgatcatgaatcatgtcctgaatacaagccaacttgccagttcttaccagtacaagaagaagtatgagaagagtaaaggccactaccacaccatacccgataatctggagcagcttcacctaaaagaggccacagaattacagagtatagtgaaatacaaagaaaagtatgaaaaggaacgaggaaaacccatgctggactttgaaacaccaacgtacatcactgccaaagagtctcagcagatgcagagtgggaaagaatataggaaagattatgaagagtccattaaaggcagaaacctgactggcctggaggtcacgccagctttgttacatgtcaaatatgcaactaaaatagcaagcgagaaagagtacaggaaagatctagaggaaagcatccgtgggaagggcctcactgaaatggaagatacacctgacatgctaagagcaaagaatgccactcaaatcctcaatgagaaagaatataagcgagacctggaactggaagtcaaaggaagaggcctgaatgccatggccaatgaaactccggattttatgagggccaggaatgctactgatattgccagtcagattaagtataagcaatcagcagaaatggagaaagccaatttcacttctgtggttgatactccagagatcattcatgcccaacaagtcaagaatctttcaagccagaaaaagtacaaggaagatgctgagaagtccatgtcgtattatgagactgttttggacaccccagagatacagagagtccgggagaaccaaaagaacttcagccttctccaataccagtgtgaccttaaaaagaaaaatagcagagatgttcaccttttccttgctgattgctaatgcttattatttctaattcagttctgaagttataaacttataatcaatacaaaccagcaactaataaaacctctaattctgcaa

SEQ ID NO: 286051 - DNA, 1287 bp, Homo sapiens
  misc_feature (1225)..(1225): n is a, c, g, or t
  misc_feature (1249)..(1249): n is a, c, g, or t
  misc_feature (1277)..(1277): n is a, c, g, or t
aatcttttttttaaaataatgagtttttcagtttgtgtggataacaccactgagttctaactgtctcaaatcctcatataattgtttaggaggcatggtactcacaaaaaaggaaaaaaaaaaataacatggataactctgacagcctttccccagcagctgaggtccctgcttctctagagggtgcagattccccatcccaacaacttccactaaagtaaagtagtcggtggcattttgtcagcatataacttctggctccttggacaactgtgttttgtcttaacaaggaagctgaccttacccttaaaacctttcaacaaatgaaatgttactcatggttgtttttctggttgctttcttatcgcacaggtgttatacaaagaaaacatgggcaagggaacccctctacctgtcactcctgagatggagagagtcaaacacaatcaagaaaatattagctcggtgttatacaaagaaaacatgggcaagggaactcctttacctgtcactcccgagatggagcgagtcaaacacaatcaagaaaatattagctcggtgttgtacaaagaaaatgtggggaaagccaccgcaacccctgtcactcctgagatgcagagagtcaaacgcaatcaagaaaacattagctcggtgttatacaaagagaacctggggaaagcaacccccacaccctttactcctgagatggaaagagtgaaacgcaatcaagaaaactttagctcggtattgtacaaagagaacatgagaaaagcaactccgacacctgttactccagagatggagagagctaagcgcaaccaagaaaacattagctcggttctttattctgatagtttccggaaacaaatacaaggcaaagctgcctatgtattggatacccccgagatgagacgggtgagggagacccaacggcacatctcaacggtgaaatatcatgaagactttgagaaacacaagggttgcttcacaccagtggtgacagatcctatcactgaacgagtaaagaagaacatgcaggacttcagtgacattaactaccgaggtattcagaggaaagtggtagaaatggaacaaaaacggaatgaccaagatcaggagactattacaggtttacgtgtctggcgtactaatcctggttcggtttttgactatgatccagcagaagacaacatccagtcccgaagcttacacatgattaatggtnccaaggcttcaagaggccccgganccccgggaagcaagtcaccgaatcttgnccagtggcac

SEQ ID NO: 286052 - DNA, 310 bp, Homo sapiens
gtgggtattttcttaggaaagacagggagtagagactagggatgaatgttaatcattcggtctctaatacatatgttttggggtatttttttttctttagttgatctacaaatcagacttcttcaagatgcagggccacatgatctctctgccatacacaccccaagtgatccattgccgctatgtgggagacatcaccagtgatgtaagcatctcgtaggggtctttctggagtagtcttaccaagacgcaggcttgctttcagcagttaaaacaaccagtggtctttgaacagccttttctgataagc

SEQ ID NO: 286053 - DNA, 381 bp, Homo sapiens
ttagaataataaaaactttattaataacaaaaattttattaagtaatacagtattgtcttggtttgcttattaattttaagcaaaaactctaataaaagggaataatacagattttatatcaaatttgagtaacttacgtgaaaagattccagaaatctttgccctaacatgaaagggttttggatcaaatccaaaagaaaatttaaaagttgcatagtgggactagcaacatgaaaattgtgaagtaattttattatttttgtttctttccacagccaaagtacagagaggtttgggacaaggataaaacttcaatacacataatgccagatactccagaaattaatctcgctagagcaaatgctcttaatgtgagcaat

SEQ ID NO: 286054 - DNA, 335 bp, Homo sapiens
ctcactttgatttccattagtgctgttccatttcctatttacgtgatttcctttcttcccccataacacacaggttaaatacaaggctgacctgaagaaacttcacaaacccgtgactgacatgaaggagtctctgatcatgaatcatgtcctgaatacaagccaacttgccagttctgtaagctcagtcatttgctccagaaacagcttgttttacccatttggaactaaattctttctgagcccagatgcatcttcttctctgctactgataccctagatttattacaaaactgttctcatttgagtgtattcttccaaatgacaacattaat

SEQ ID NO: 286055 - DNA, 546 bp, Homo sapiens
gagcccccagaagcccagagcagtcaggtcacacgacgggcaggaaggagtaccagcaaatactttttattgagcatacaggtattacgctgggtctttacatatctcctccaaataagtgagtccaaatggcaggtaactcgaaaggtgagaaattcaagtcagctttgaaagacacattgcatttaaaggaaaaacggtattcgcagatgataatacaggatggagtggatcagaaaacacactgaggctactgatcattcccatttgccaactcactgcagttggcaagaaaactctgtgactccatgagatgggaaattacaccagcagtcaaggtagcaaggtaatagtttcggctaagttttgctgcataacaaactgcctcaaatagtggtttatatctctaacgtgggcaaggtgggtgattcttctgctagtttctcctgggcatattcatgtggcttcattcagcacaggttgctacgctgggcggtccaagatagccttattcatgctctggcaggtgctgcctggctgctaggg

SEQ ID NO: 286056 - DNA, 1002 bp, Homo sapiens
cgttccatccaggtgcggcagcctcaggcagagattaagaaatgagtcgtggaaaagggggctagcggctggttactaggagacgggacgctcggctcgggcgtctaggcgctgcgtgggcgtgcgcctgcgcggcgcggatgggccaggaaggggtccctcctaggtgccctgtaaggcaggcaggtagacgtacgcgtcgctccgtgcgtaggagcgcgcgcacggcttgtagaccccgcgagaaggaaggtcgagccagattgaagatctcaaacagacaaatcatggcttggaagaatatgttaggaaactcttggatagtaaggaggtggtaagcagtcaagtagatgatttaaccagccacaatgagcatctttgtaaagaattgattaaaattgaccaactagcagagcaactcgaaaaagagaaaaattttgtggtggattccgccaacaaggaacttgaagaagccaagattgatctcatttgccagcaaaataatattatagtattggaagatacaataaaaaggcttaaatctacttgattcctttgtcaagactttggaagcagacaaagatcactataagagtgaagctcaacatttgagaaagatgatgcgaagtaggtctaaaagtccaagacgcccatcaccaactgcccggggtgcaaactgtgatgtagaacttttgaagacaacaacaagagatcgtgaagaacttaaatgcatgctggaaaaatatgagcgccatttggcagaaattcagggtaatgtcaaggttcttaaatctgagagagacaagatcttccttctttatgaacaggccggagaaataccgattcgccgagaatgtgaaagtgtagaggcttaatcacacggcattgcatctcgggagggagagaaaaatgtgtatgatagagatgccgacggattaaggagaaatggcaaaggttaggaggctcgaaaaggggggtctctaaaaaagttggaaaggctcg

SEQ ID NO: 286057 - DNA, 712 bp, Homo sapiens
acggcgggccgaggagcccggggagggacccggagctccaggttaccaccaaagaatatgattttggtctaggggctccagtttctgaagctgaaaactaccagaatactctccagctagaacaagaagtgagaaaccaagatagattcatctcgacactgaaattacaggttgcgtttagttacaacatattttcctgacttaatttggggtgggagcctattttgaaacaagaagatagagaataaataactactaattcagagctcatttaaatgttatgggtctaaaatcattcaatttttatcttaaccattttgataaacatagagtcagagtcagtgagtgcaaactacgtgtcaagtgttgtgtcagatgttttcaggtatacagtttttacttaatcatccccaacttgcgaaaaagtgatgccgtttccatttatagatgtggaagctgaagttctaagaggttaaataattatgacacttgagtaacaagtgacagaactacgatttctccaaactcccgtgttagccgggatttgaactcaattctctgaacttcaagttcagtattgttcctgttctcctgatgcttgacatgtaatatagctattaataaaggctattaaaagagatttctttttccaggaagatagagtagacttacttttttttattcctcctgctaagtacagctaaaaactctg

SEQ ID NO: 286058 - DNA, 739 bp, Homo sapiens
tgcgcgcgatgctgccccgccccctgagggccggccccctgaagcgcaagagaaggaggggcgcgcagggatcgcgcctagtctctccgcctgcggagccgtggggtcccggcagcccgcaggagtgctaagtaagggtccttcagggcgggaaccaggttccaggcagggacgcaggctacgttcgaataaaagtaccgaaggtcataaggccccagttcagatgggacttccccgcgtgacagcacagagataacggccagccctgggcgaaggttaccaccaaagaatatgattttggtctaggggctccagtttctgaagctgaaaactaccagaatactctccagctagaacaagaagtgagaaaccaagatagattcatctcgacactgaaattacagattgaagatctcaaacagacaaatcatggcttggaagaatatgttaggaaactcttggatagtaaggaggtggtaagcagtcaagtagatgatttaaccagccacaatgagcatctttgtaaagaattgattaaaattgaccaactagcagagcaactcgaaaaagagaaaaattttgtggtggattccgccaacaaggaacttgaagaagccaagagatatctacaaactaatagatacatttattttcgtctattttcacatatgtaattgatttcaatacccattaaaaaagatttttaccaaactaaaaatagaactgccatgtgatccag

SEQ ID NO: 286059 - DNA, 497 bp, Homo sapiens
tgcgcgcgatgctgccccgccccctgagggccggccccctgaagcgcaagagaaggaggggcgcgcagggatcgcgcctagtctctccgcctgcggagccgtggggtcccggcagcccgcaggagtgctaagtaagggtccttcagggcgggaaccaggttccaggcagggacgcaggctacgttcgaataaaagtaccgaaggtcataaggccccagttcagatgggacttccccgcgtgacagcacagagataacggccagccctgggcgaagatgataatacaggatggagtggatcagaaaacacactgaggctactgatcattcccatttgccaactcactgcagttggcaagaaaactctgtgactccatgagatgggaaattacaccagcagtcaaggtagcaagatttggaacttgaagatgaatttttcttcctcatcaaaggaatatctaatactgccttcaaatgaataaaattgagtttattcta

SEQ ID NO: 286060 - DNA, 360 bp, Homo sapiens
tgcgcgcgatgctgccccgccccctgagggccggccccctgaagcgcaagagaaggaggggcgcgcagggatcgcgcctagtctctccgcctgcggagccgtggggtcccggcagcccgcaggagtgctaagtaagggtccttcagggcgggaaccaggttccaggcagggacgcaggctacgttcgaataaaagtaccgaaggtcataaggccccagttcagatgggacttccccgcgtgacagcacagagataacggccagccctgggcgaagatttggaacttgaagatgaatttttcttcctcatcaaaggaatatctaatactgccttcaaatgaataaaattgagtttattcta

SEQ ID NO: 286061 - DNA, 431 bp, Homo sapiens
gagcccccagaagcccagagcagtcaggtcacacgacgggcaggaaggagtaccagcaaatactttttattgagcatacaggtattacgctgggtctttacatatctcctccaaataagtgagtccaaatggcaggtaactcgaaaggtgagaaattcaagtcagctttgaaagacacattgcatttaaaggaaaaacggtattcgcagatgataatacaggatggagtggatcagaaaacacactgaggctactgatcattcccatttgccaactcactgcagttggcaagaaaactctgtgactccatgagatgggaaattacaccagcagtcaaggtagcaagatttggaacttgaagatgaatttttcttcctcatcaaaggaatatctaatactgccttcaaatgaataaaattgagtttattcta

SEQ ID NO: 286062 - DNA, 353 bp, Homo sapiens
tgcgcgcgatgctgccccgccccctgagggccggccccctgaagcgcaagagaaggaggggcgcgcagggatcgcgcctagtctctccgcctgcggagccgtggggtcccggcagcccgcaggagtgctaaatgataatacaggatggagtggatcagaaaacacactgaggctactgatcattcccatttgccaactcactgcagttggcaagaaaactctgtgactccatgagatgggaaattacaccagcagtcaaggtagcaagatttggaacttgaagatgaatttttcttcctcatcaaaggaatatctaatactgccttcaaatgaataaaattgagtttattcta

SEQ ID NO: 286063 - DNA, 3662 bp, Homo sapiens
caggtatctaacctatctttgtatttttggaatttaatatagttcctgacataatcattgttcaatgggtctaatttttttttcctttaaaggcatttggatacctttgtgatagaaaaggcccttttcttcatccattgatggtttgatagtgggctgggaaggaaagctgtgttcctccacattaggcagcaaatacttgattgatttgatatttagcttagtcaaattgaagatctcaaacagacaaatcatggcttggaagaatatgttaggaaactcttggatagtaaggaggtggtaagcagtcaagtagatgatttaaccagccacaatgagcatctttgtaaagaattgattaaaattgaccaactagcagagcaactcgaaaaagagaaaaattttgtggtggattccgccaacaaggaacttgaagaagccaagattgatctcatttgccagcaaaataatattatagtattggaagatacaataaaaaggcttaaatctataattttagatactgaaaaagcacaaaataaatctccttctagacttgattcctttgtcaagactttggaagcagacaaagatcactataagagtgaagctcaacatttgagaaagatgatgcgaagtaggtctaaaagtccaagacgcccatcaccaactgcccggggtgcaaactgtgatgtagaacttttgaagacaacaacaagagatcgtgaagaacttaaatgcatgctggaaaaatatgagcgccatttggcagaaattcagggtaatgtcaaggttcttaaatctgagagagacaagatcttccttctttatgaacaggcacaggaagaaattacccgacttcgacgagaaatgatgaaaagctgtaagagtcctaaatcaacaacggcacatgctattctccggcgagtggagactgaaagagatgtagcctttactgatttacgaagaatgaccacagaacgagatagtctaagggagaggctaaagattgctcaagagacagcatttaatgagaaggctcacctggaacaaaggatagaggagctggagtgtacagttcataatcttgatgatgaacgtatggagcaaatgtcaaatatgactttgatgaaggaaaccataagcactgtggaaaaagaaatgaaatcactagcaagaaaggcaatggataccgaaagtgaacttggcagacaaaaagcagagaataattctttgagacttttgtatgaaaacacagaaaaagatctttctgatactcagcgacaccttgctaagaaaaaatatgagctacagcttactcaggagaaaattatgtgcttggatgaaaaaattgataactttacaaggcaaaatattgcacagcgagaagaaatcagcattcttggtggaaccctcaatgatctggctaaagaaaaggaatgcctgcaagcatgtttggataaaaaatctgagaatattgcatcccttggagagagtttggcaatgaaagaaaagaccatttcaggcatgaagaatatcattgctgagatggaacaggcatcaagacagtgtactgaggccctaattgtgtgtgaacaagacgtttccagaatgcgtcggcaattggatgagacaaatgatgagctggcccagatcgccagggaaagagatatcttggctcatgacaatgacaatctccaggaacagtttgctaaagctaaacaagaaaaccaggcactgtccaaaaaattgaatgacactcataatgaacttaatgacataaaacagaaggttcaagatactaatttggaggttaacaagctgaagaatatattaaagtctgaagaatctgagaaccggcaaatgatggaacaacttcgaaaagccaatgaagatgctgaaaactgggaaaataaagcccgtcaatcagaggcagataacaataccctcaaactggaacttatcactgctgaggcagagggtaacagattaaaagaaaaagtagattccctcaacagagaggttgagcaacacttaaatgcagaaaggtcttacaagtcccagatttctaccttacataaatctgttgtaaaaatggaagaggagcttcagaaggttcagtttgaaaaagtgtccgctcttgcagatttgtcttctactagggaactctgtattaaacttgactcaagcaaagaacttcttaatcgacagctggttgctaaagatcaagaaatagaaatgagggagaatgagttagattctgctcattctgaaattgaactcctgaggagtcagatggcaaatgagagaatctccatgcagaatctagaagctttgctggtggccaatcgagacaaagaatatcagtctcagatagcacttcaagaaaaagaatctgaaattcagcttcttaaagaacacctttgtttggcagaaaataaaatggccatccagagtagagatgtggcccagttcagaaatgttgtcacacaattggaagctgatttagacattaccaaaagacaactaggaacagagcgctttgaaagggagagggccgtacaagaacttcgccgccaaaattattcaagtaatgcttatcatatgagttctacaatgaagccaaatacaaaatgtcattcaccagaacgtgctcaccatcgatctcctgaccgaggcctagatcgatcattagaagagaatctttgctacagagatttctgacacctgaaatgattcttcacatccctgagaaaggtcaaagttacaaactgatttttttttttttgctacatgagtgcatttatcttttaaatgcttggcaatgttaaatgtatttattaactttgtgtctctgaatctctgttctaatgtgccatgttgcagtgatctgagatgacttataaaaacaaaaatgtatatggctctttctatccatgcagtgatagtgagtgtaaaatctgcttacttcactattgaacactattctgttcactatctggagtaaataaagaagcttattaaaacagggaaaagtgtttttacaaaactgctttcctttcctttcttggtatctcaaataattggttggttaattttttttctttgtgatttgtgttttcatggctggaaaatctgtgccaaaatgggtacaacttactgatactggtctgggatctgatattccattttggaaccaaccttacatgaattccatgccataatctgatattgaagcagcagaaagtaggagtgttgtcagggttttaaaacctatagtattgtaccactcaaagactaagtaacatacatattctacaattgtgtttactactactgcttttagaaaggtaggtgatggtatatctgtcaagaatgtaagattttattaaaaatctttatttttaataagttttctttcaagtactgcaatcaacttaattgcgattttattttattgtctgtggcagctgtctgtaatctggagtaataagataagtgatgtttccttcctcccccaatttcctaaatctcttaccttatctatccataggctttgatgtaatgttcatattagagcctgaatgctactgtattttactgatataaactatttgtattcttgccattttaataaaaaaaggcttgtcattaatagtatt

SEQ ID NO: 286064 - DNA, 3917 bp, Homo sapiens
cgttccatccaggtgcggcagcctcaggcagagattaagaaatgagtcgtggaaaagggggctagcggctggttactaggagacgggacgctcggctcgggcgtctaggcgctgcgtgggcgtgcgcctgcgcggcgcggatgggccaggaaggggtccctcctaggtgccctgtaaggcaggcaggtagacgtacgcgtcgctccgtgcgtaggagcgcgcgcacggcttgtagaccccgcgagaaggaaggtcgagccaggttaccaccaaagaatatgattttggtctaggggctccagtttctgaagctgaaaactaccagaatactctccagctagaacaagaagtgagaaaccaagatagattcatctcgacactgaaattacaggcatttggatacctttgtgatagaaaaggcccttttcttcatccattgatggtttgatagtgggctgggaaggaaagctgtgttcctccacattaggcagcaaatacttgattgatttgatatttagcttagtcaaattgaagatctcaaacagacaaatcatggcttggaagaatatgttaggaaactcttggatagtaaggaggtggtaagcagtcaagtagatgatttaaccagccacaatgagcatctttgtaaagaattgattaaaattgaccaactagcagagcaactcgaaaaagagaaaaattttgtggtggattccgccaacaaggaacttgaagaagccaagattgatctcatttgccagcaaaataatattatagtattggaagatacaataaaaaggcttaaatctacttgattcctttgtcaagactttggaagcagacaaagatcactataagagtgaagctcaacatttgagaaagatgatgcgaagtaggtctaaaagtccaagacgcccatcaccaactgcccggggtgcaaactgtgatgtagaacttttgaagacaacaacaagagatcgtgaagaacttaaatgcatgctggaaaaatatgagcgccatttggcagaaattcagggtaatgtcaaggttcttaaatctgagagagacaagatcttccttctttatgaacaggcacaggaagaaattacccgacttcgacgagaaatgatgaaaagctgtaagagtcctaaatcaacaacggcacatgctattctccggcgagtggagactgaaagagatgtagcctttactgatttacgaagaatgaccacagaacgagatagtctaagggagaggctaaagattgctcaagagacagcatttaatgagaaggctcacctggaacaaaggatagaggagctggagtgtacagttcataatcttgatgatgaacgtatggagcaaatgtcaaatatgactttgatgaaggaaaccataagcactgtggaaaaagaaatgaaatcactagcaagaaaggcaatggataccgaaagtgaacttggcagacaaaaagcagagaataattctttgagacttttgtatgaaaacacagaaaaagatctttctgatactcagcgacaccttgctaagaaaaaatatgagctacagcttactcaggagaaaattatgtgcttggatgaaaaaattgataactttacaaggcaaaatattgcacagcgagaagaaatcagcattcttggtggaaccctcaatgatctggctaaagaaaaggaatgcctgcaagcatgtttggataaaaaatctgagaatattgcatcccttggagagagtttggcaatgaaagaaaagaccatttcaggcatgaagaatatcattgctgagatggaacaggcatcaagacagtgtactgaggccctaattgtgtgtgaacaagacgtttccagaatgcgtcggcaattggatgagacaaatgatgagctggcccagatcgccagggaaagagatatcttggctcatgacaatgacaatctccaggaacagtttgctaaagctaaacaagaaaaccaggcactgtccaaaaaattgaatgacactcataatgaacttaatgacataaaacagaaggttcaagatactaatttggaggttaacaagctgaagaatatattaaagtctgaagaatctgagaaccggcaaatgatggaacaacttcgaaaagccaatgaagatgctgaaaactgggaaaataaagcccgtcaatcagaggcagataacaataccctcaaactggaacttatcactgctgaggcagagggtaacagattaaaagaaaaagtagattccctcaacagagaggttgagcaacacttaaatgcagaaaggtcttacaagtcccagatttctaccttacataaatctgttgtaaaaatggaagaggagcttcagaaggttcagtttgaaaaagtgtccgctcttgcagatttgtcttctactagggaactctgtattaaacttgactcaagcaaagaacttcttaatcgacagctggttgctaaagatcaagaaatagaaatgagggagaatgagttagattctgctcattctgaaattgaactcctgaggagtcagatggcaaatgagagaatctccatgcagaatctagaagctttgctggtggccaatcgagacaaagaatatcagtctcagatagcacttcaagaaaaagaatctgaaattcagcttcttaaagaacacctttgtttggcagaaaataaaatggccatccagagtagagatgtggcccagttcagaaatgttgtcacacaattggaagctgatttagacattaccaaaagacaactaggaacagagcgctttgaaagggagagggccgtacaagaacttcgccgccaaaattattcaagtaatgcttatcatatgagttctacaatgaagccaaatacaaaatgtcattcaccagaacgtgctcaccatcgatctcctgaccgaggcctagatcgatcattagaagagaatctttgctacagagatttctgacacctgaaatgattcttcacatccctgagaaaggtcaaagttacaaactgatttttttttttttgctacatgagtgcatttatcttttaaatgcttggcaatgttaaatgtatttattaactttgtgtctctgaatctctgttctaatgtgccatgttgcagtgatctgagatgacttataaaaacaaaaatgtatatggctctttctatccatgcagtgatagtgagtgtaaaatctgcttacttcactattgaacactattctgttcactatctggagtaaataaagaagcttattaaaacagggaaaagtgtttttacaaaactgctttcctttcctttcttggtatctcaaataattggttggttaattttttttctttgtgatttgtgttttcatggctggaaaatctgtgccaaaatgggtacaacttactgatactggtctgggatctgatattccattttggaaccaaccttacatgaattccatgccataatctgatattgaagcagcagaaagtaggagtgttgtcagggttttaaaacctatagtattgtaccactcaaagactaagtaacatacatattctacaattgtgtttactactactgcttttagaaaggtaggtgatggtatatctgtcaagaatgtaagattttattaaaaatctttatttttaataagttttctttcaagtactgcaatcaacttaattgcgattttattttattgtctgtggcagctgtctgtaatctggagtaataagataagtgatgtttccttcctcccccaatttcctaaatctcttaccttatctatccataggctttgatgtaatgttcatattagagcctgaatgctactgtattttactgatataaactatttgtattcttgccattttaataaaaaaaggcttgtcattaatagtatt

SEQ ID NO: 286065 - DNA, 3737 bp, Homo sapiens
acgcgtgcgcaccgggcctgggggcgagcgggacggaagcaaagctggggcgccggggaggtggaagacgagccccactccggttaccaccaaagaatatgattttggtctaggggctccagtttctgaagctgaaaactaccagaatactctccagctagaacaagaagtgagaaaccaagatagattcatctcgacactgaaattacaggcatttggatacctttgtgatagaaaaggcccttttcttcatccattgatggtttgatagtgggctgggaaggaaagctgtgttcctccacattaggcagcaaatacttgattgatttgatatttagcttagtcaaattgaagatctcaaacagacaaatcatggcttggaagaatatgttaggaaactcttggatagtaaggaggtggtaagcagtcaagtagatgatttaaccagccacaatgagcatctttgtaaagaattgattaaaattgaccaactagcagagcaactcgaaaaagagaaaaattttgtggtggattccgccaacaaggaacttgaagaagccaagattgatctcatttgccagcaaaataatattatagtattggaagatacaataaaaaggcttaaatctacttgattcctttgtcaagactttggaagcagacaaagatcactataagagtgaagctcaacatttgagaaagatgatgcgaagtaggtctaaaagtccaagacgcccatcaccaactgcccggggtgcaaactgtgatgtagaacttttgaagacaacaacaagagatcgtgaagaacttaaatgcatgctggaaaaatatgagcgccatttggcagaaattcagggtaatgtcaaggttcttaaatctgagagagacaagatcttccttctttatgaacaggcacaggaagaaattacccgacttcgacgagaaatgatgaaaagctgtaagagtcctaaatcaacaacggcacatgctattctccggcgagtggagactgaaagagatgtagcctttactgatttacgaagaatgaccacagaacgagatagtctaagggagaggctaaagattgctcaagagacagcatttaatgagaaggctcacctggaacaaaggatagaggagctggagtgtacagttcataatcttgatgatgaacgtatggagcaaatgtcaaatatgactttgatgaaggaaaccataagcactgtggaaaaagaaatgaaatcactagcaagaaaggcaatggataccgaaagtgaacttggcagacaaaaagcagagaataattctttgagacttttgtatgaaaacacagaaaaagatctttctgatactcagcgacaccttgctaagaaaaaatatgagctacagcttactcaggagaaaattatgtgcttggatgaaaaaattgataactttacaaggcaaaatattgcacagcgagaagaaatcagcattcttggtggaaccctcaatgatctggctaaagaaaaggaatgcctgcaagcatgtttggataaaaaatctgagaatattgcatcccttggagagagtttggcaatgaaagaaaagaccatttcaggcatgaagaatatcattgctgagatggaacaggcatcaagacagtgtactgaggccctaattgtgtgtgaacaagacgtttccagaatgcgtcggcaattggatgagacaaatgatgagctggcccagatcgccagggaaagagatatcttggctcatgacaatgacaatctccaggaacagtttgctaaagctaaacaagaaaaccaggcactgtccaaaaaattgaatgacactcataatgaacttaatgacataaaacagaaggttcaagatactaatttggaggttaacaagctgaagaatatattaaagtctgaagaatctgagaaccggcaaatgatggaacaacttcgaaaagccaatgaagatgctgaaaactgggaaaataaagcccgtcaatcagaggcagataacaataccctcaaactggaacttatcactgctgaggcagagggtaacagattaaaagaaaaagtagattccctcaacagagaggttgagcaacacttaaatgcagaaaggtcttacaagtcccagatttctaccttacataaatctgttgtaaaaatggaagaggagcttcagaaggttcagtttgaaaaagtgtccgctcttgcagatttgtcttctactagggaactctgtattaaacttgactcaagcaaagaacttcttaatcgacagctggttgctaaagatcaagaaatagaaatgagggagaatgagttagattctgctcattctgaaattgaactcctgaggagtcagatggcaaatgagagaatctccatgcagaatctagaagctttgctggtggccaatcgagacaaagaatatcagtctcagatagcacttcaagaaaaagaatctgaaattcagcttcttaaagaacacctttgtttggcagaaaataaaatggccatccagagtagagatgtggcccagttcagaaatgttgtcacacaattggaagctgatttagacattaccaaaagacaactaggaacagagcgctttgaaagggagagggccgtacaagaacttcgccgccaaaattattcaagtaatgcttatcatatgagttctacaatgaagccaaatacaaaatgtcattcaccagaacgtgctcaccatcgatctcctgaccgaggcctagatcgatcattagaagagaatctttgctacagagatttctgacacctgaaatgattcttcacatccctgagaaaggtcaaagttacaaactgatttttttttttttgctacatgagtgcatttatcttttaaatgcttggcaatgttaaatgtatttattaactttgtgtctctgaatctctgttctaatgtgccatgttgcagtgatctgagatgacttataaaaacaaaaatgtatatggctctttctatccatgcagtgatagtgagtgtaaaatctgcttacttcactattgaacactattctgttcactatctggagtaaataaagaagcttattaaaacagggaaaagtgtttttacaaaactgctttcctttcctttcttggtatctcaaataattggttggttaattttttttctttgtgatttgtgttttcatggctggaaaatctgtgccaaaatgggtacaacttactgatactggtctgggatctgatattccattttggaaccaaccttacatgaattccatgccataatctgatattgaagcagcagaaagtaggagtgttgtcagggttttaaaacctatagtattgtaccactcaaagactaagtaacatacatattctacaattgtgtttactactactgcttttagaaaggtaggtgatggtatatctgtcaagaatgtaagattttattaaaaatctttatttttaataagttttctttcaagtactgcaatcaacttaattgcgattttattttattgtctgtggcagctgtctgtaatctggagtaataagataagtgatgtttccttcctcccccaatttcctaaatctcttaccttatctatccataggctttgatgtaatgttcatattagagcctgaatgctactgtattttactgatataaactatttgtattcttgccattttaataaaaaaaggcttgtcattaatagtatt

SEQ ID NO: 286066 - DNA, 3601 bp, Homo sapiens
acgcgtgcgcaccgggcctgggggcgagcgggacggaagcaaagctggggcgccggggaggtggaagacgagccccactccggttaccaccaaagaatatgattttggtctaggggctccagtttctgaagctgaaaactaccagaatactctccagctagaacaagaagtgagaaaccaagatagattcatctcgacactgaaattacagattgaagatctcaaacagacaaatcatggcttggaagaatatgttaggaaactcttggatagtaaggaggtggtaagcagtcaagtagatgatttaaccagccacaatgagcatctttgtaaagaattgattaaaattgaccaactagcagagcaactcgaaaaagagaaaaattttgtggtggattccgccaacaaggaacttgaagaagccaagattgatctcatttgccagcaaaataatattatagtattggaagatacaataaaaaggcttaaatctacttgattcctttgtcaagactttggaagcagacaaagatcactataagagtgaagctcaacatttgagaaagatgatgcgaagtaggtctaaaagtccaagacgcccatcaccaactgcccggggtgcaaactgtgatgtagaacttttgaagacaacaacaagagatcgtgaagaacttaaatgcatgctggaaaaatatgagcgccatttggcagaaattcagggtaatgtcaaggttcttaaatctgagagagacaagatcttccttctttatgaacaggcacaggaagaaattacccgacttcgacgagaaatgatgaaaagctgtaagagtcctaaatcaacaacggcacatgctattctccggcgagtggagactgaaagagatgtagcctttactgatttacgaagaatgaccacagaacgagatagtctaagggagaggctaaagattgctcaagagacagcatttaatgagaaggctcacctggaacaaaggatagaggagctggagtgtacagttcataatcttgatgatgaacgtatggagcaaatgtcaaatatgactttgatgaaggaaaccataagcactgtggaaaaagaaatgaaatcactagcaagaaaggcaatggataccgaaagtgaacttggcagacaaaaagcagagaataattctttgagacttttgtatgaaaacacagaaaaagatctttctgatactcagcgacaccttgctaagaaaaaatatgagctacagcttactcaggagaaaattatgtgcttggatgaaaaaattgataactttacaaggcaaaatattgcacagcgagaagaaatcagcattcttggtggaaccctcaatgatctggctaaagaaaaggaatgcctgcaagcatgtttggataaaaaatctgagaatattgcatcccttggagagagtttggcaatgaaagaaaagaccatttcaggcatgaagaatatcattgctgagatggaacaggcatcaagacagtgtactgaggccctaattgtgtgtgaacaagacgtttccagaatgcgtcggcaattggatgagacaaatgatgagctggcccagatcgccagggaaagagatatcttggctcatgacaatgacaatctccaggaacagtttgctaaagctaaacaagaaaaccaggcactgtccaaaaaattgaatgacactcataatgaacttaatgacataaaacagaaggttcaagatactaatttggaggttaacaagctgaagaatatattaaagtctgaagaatctgagaaccggcaaatgatggaacaacttcgaaaagccaatgaagatgctgaaaactgggaaaataaagcccgtcaatcagaggcagataacaataccctcaaactggaacttatcactgctgaggcagagggtaacagattaaaagaaaaagtagattccctcaacagagaggttgagcaacacttaaatgcagaaaggtcttacaagtcccagatttctaccttacataaatctgttgtaaaaatggaagaggagcttcagaaggttcagtttgaaaaagtgtccgctcttgcagatttgtcttctactagggaactctgtattaaacttgactcaagcaaagaacttcttaatcgacagctggttgctaaagatcaagaaatagaaatgagggagaatgagttagattctgctcattctgaaattgaactcctgaggagtcagatggcaaatgagagaatctccatgcagaatctagaagctttgctggtggccaatcgagacaaagaatatcagtctcagatagcacttcaagaaaaagaatctgaaattcagcttcttaaagaacacctttgtttggcagaaaataaaatggccatccagagtagagatgtggcccagttcagaaatgttgtcacacaattggaagctgatttagacattaccaaaagacaactaggaacagagcgctttgaaagggagagggccgtacaagaacttcgccgccaaaattattcaagtaatgcttatcatatgagttctacaatgaagccaaatacaaaatgtcattcaccagaacgtgctcaccatcgatctcctgaccgaggcctagatcgatcattagaagagaatctttgctacagagatttctgacacctgaaatgattcttcacatccctgagaaaggtcaaagttacaaactgatttttttttttttgctacatgagtgcatttatcttttaaatgcttggcaatgttaaatgtatttattaactttgtgtctctgaatctctgttctaatgtgccatgttgcagtgatctgagatgacttataaaaacaaaaatgtatatggctctttctatccatgcagtgatagtgagtgtaaaatctgcttacttcactattgaacactattctgttcactatctggagtaaataaagaagcttattaaaacagggaaaagtgtttttacaaaactgctttcctttcctttcttggtatctcaaataattggttggttaattttttttctttgtgatttgtgttttcatggctggaaaatctgtgccaaaatgggtacaacttactgatactggtctgggatctgatattccattttggaaccaaccttacatgaattccatgccataatctgatattgaagcagcagaaagtaggagtgttgtcagggttttaaaacctatagtattgtaccactcaaagactaagtaacatacatattctacaattgtgtttactactactgcttttagaaaggtaggtgatggtatatctgtcaagaatgtaagattttattaaaaatctttatttttaataagttttctttcaagtactgcaatcaacttaattgcgattttattttattgtctgtggcagctgtctgtaatctggagtaataagataagtgatgtttccttcctcccccaatttcctaaatctcttaccttatctatccataggctttgatgtaatgttcatattagagcctgaatgctactgtattttactgatataaactatttgtattcttgccattttaataaaaaaaggcttgtcattaatagtatt

SEQ ID NO: 286067 - DNA, 3781 bp, Homo sapiens
acgcgtgcgcaccgggcctgggggcgagcgggacggaagcaaagctggggcgccggggaggtggaagacgagccccactccggttaccaccaaagaatatgattttggtctaggggctccagtttctgaagctgaaaactaccagaatactctccagctagaacaagaagtgagaaaccaagatagattcatctcgacactgaaattacaggcatttggatacctttgtgatagaaaaggcccttttcttcatccattgatggtttgatagtgggctgggaaggaaagctgtgttcctccacattaggcagcaaatacttgattgatttgatatttagcttagtcaaattgaagatctcaaacagacaaatcatggcttggaagaatatgttaggaaactcttggatagtaaggaggtggtaagcagtcaagtagatgatttaaccagccacaatgagcatctttgtaaagaattgattaaaattgaccaactagcagagcaactcgaaaaagagaaaaattttgtggtggattccgccaacaaggaacttgaagaagccaagattgatctcatttgccagcaaaataatattatagtattggaagatacaataaaaaggcttaaatctataattttagatactgaaaaagcacaaaataaatctccttctagacttgattcctttgtcaagactttggaagcagacaaagatcactataagagtgaagctcaacatttgagaaagatgatgcgaagtaggtctaaaagtccaagacgcccatcaccaactgcccggggtgcaaactgtgatgtagaacttttgaagacaacaacaagagatcgtgaagaacttaaatgcatgctggaaaaatatgagcgccatttggcagaaattcagggtaatgtcaaggttcttaaatctgagagagacaagatcttccttctttatgaacaggcacaggaagaaattacccgacttcgacgagaaatgatgaaaagctgtaagagtcctaaatcaacaacggcacatgctattctccggcgagtggagactgaaagagatgtagcctttactgatttacgaagaatgaccacagaacgagatagtctaagggagaggctaaagattgctcaagagacagcatttaatgagaaggctcacctggaacaaaggatagaggagctggagtgtacagttcataatcttgatgatgaacgtatggagcaaatgtcaaatatgactttgatgaaggaaaccataagcactgtggaaaaagaaatgaaatcactagcaagaaaggcaatggataccgaaagtgaacttggcagacaaaaagcagagaataattctttgagacttttgtatgaaaacacagaaaaagatctttctgatactcagcgacaccttgctaagaaaaaatatgagctacagcttactcaggagaaaattatgtgcttggatgaaaaaattgataactttacaaggcaaaatattgcacagcgagaagaaatcagcattcttggtggaaccctcaatgatctggctaaagaaaaggaatgcctgcaagcatgtttggataaaaaatctgagaatattgcatcccttggagagagtttggcaatgaaagaaaagaccatttcaggcatgaagaatatcattgctgagatggaacaggcatcaagacagtgtactgaggccctaattgtgtgtgaacaagacgtttccagaatgcgtcggcaattggatgagacaaatgatgagctggcccagatcgccagggaaagagatatcttggctcatgacaatgacaatctccaggaacagtttgctaaagctaaacaagaaaaccaggcactgtccaaaaaattgaatgacactcataatgaacttaatgacataaaacagaaggttcaagatactaatttggaggttaacaagctgaagaatatattaaagtctgaagaatctgagaaccggcaaatgatggaacaacttcgaaaagccaatgaagatgctgaaaactgggaaaataaagcccgtcaatcagaggcagataacaataccctcaaactggaacttatcactgctgaggcagagggtaacagattaaaagaaaaagtagattccctcaacagagaggttgagcaacacttaaatgcagaaaggtcttacaagtcccagatttctaccttacataaatctgttgtaaaaatggaagaggagcttcagaaggttcagtttgaaaaagtgtccgctcttgcagatttgtcttctactagggaactctgtattaaacttgactcaagcaaagaacttcttaatcgacagctggttgctaaagatcaagaaatagaaatgagggagaatgagttagattctgctcattctgaaattgaactcctgaggagtcagatggcaaatgagagaatctccatgcagaatctagaagctttgctggtggccaatcgagacaaagaatatcagtctcagatagcacttcaagaaaaagaatctgaaattcagcttcttaaagaacacctttgtttggcagaaaataaaatggccatccagagtagagatgtggcccagttcagaaatgttgtcacacaattggaagctgatttagacattaccaaaagacaactaggaacagagcgctttgaaagggagagggccgtacaagaacttcgccgccaaaattattcaagtaatgcttatcatatgagttctacaatgaagccaaatacaaaatgtcattcaccagaacgtgctcaccatcgatctcctgaccgaggcctagatcgatcattagaagagaatctttgctacagagatttctgacacctgaaatgattcttcacatccctgagaaaggtcaaagttacaaactgatttttttttttttgctacatgagtgcatttatcttttaaatgcttggcaatgttaaatgtatttattaactttgtgtctctgaatctctgttctaatgtgccatgttgcagtgatctgagatgacttataaaaacaaaaatgtatatggctctttctatccatgcagtgatagtgagtgtaaaatctgcttacttcactattgaacactattctgttcactatctggagtaaataaagaagcttattaaaacagggaaaagtgtttttacaaaactgctttcctttcctttcttggtatctcaaataattggttggttaattttttttctttgtgatttgtgttttcatggctggaaaatctgtgccaaaatgggtacaacttactgatactggtctgggatctgatattccattttggaaccaaccttacatgaattccatgccataatctgatattgaagcagcagaaagtaggagtgttgtcagggttttaaaacctatagtattgtaccactcaaagactaagtaacatacatattctacaattgtgtttactactactgcttttagaaaggtaggtgatggtatatctgtcaagaatgtaagattttattaaaaatctttatttttaataagttttctttcaagtactgcaatcaacttaattgcgattttattttattgtctgtggcagctgtctgtaatctggagtaataagataagtgatgtttccttcctcccccaatttcctaaatctcttaccttatctatccataggctttgatgtaatgttcatattagagcctgaatgctactgtattttactgatataaactatttgtattcttgccattttaataaaaaaaggcttgtcattaatagtatt

SEQ ID NO: 286068 - DNA, 3825 bp, Homo sapiens
cgttccatccaggtgcggcagcctcaggcagagattaagaaatgagtcgtggaaaagggggctagcggctggttactaggagacgggacgctcggctcgggcgtctaggcgctgcgtgggcgtgcgcctgcgcggcgcggatgggccaggaaggggtccctcctaggtgccctgtaaggcaggcaggtagacgtacgcgtcgctccgtgcgtaggagcgcgcgcacggcttgtagaccccgcgagaaggaaggtcgagccaggttaccaccaaagaatatgattttggtctaggggctccagtttctgaagctgaaaactaccagaatactctccagctagaacaagaagtgagaaaccaagatagattcatctcgacactgaaattacagattgaagatctcaaacagacaaatcatggcttggaagaatatgttaggaaactcttggatagtaaggaggtggtaagcagtcaagtagatgatttaaccagccacaatgagcatctttgtaaagaattgattaaaattgaccaactagcagagcaactcgaaaaagagaaaaattttgtggtggattccgccaacaaggaacttgaagaagccaagattgatctcatttgccagcaaaataatattatagtattggaagatacaataaaaaggcttaaatctataattttagatactgaaaaagcacaaaataaatctccttctagacttgattcctttgtcaagactttggaagcagacaaagatcactataagagtgaagctcaacatttgagaaagatgatgcgaagtaggtctaaaagtccaagacgcccatcaccaactgcccggggtgcaaactgtgatgtagaacttttgaagacaacaacaagagatcgtgaagaacttaaatgcatgctggaaaaatatgagcgccatttggcagaaattcagggtaatgtcaaggttcttaaatctgagagagacaagatcttccttctttatgaacaggcacaggaagaaattacccgacttcgacgagaaatgatgaaaagctgtaagagtcctaaatcaacaacggcacatgctattctccggcgagtggagactgaaagagatgtagcctttactgatttacgaagaatgaccacagaacgagatagtctaagggagaggctaaagattgctcaagagacagcatttaatgagaaggctcacctggaacaaaggatagaggagctggagtgtacagttcataatcttgatgatgaacgtatggagcaaatgtcaaatatgactttgatgaaggaaaccataagcactgtggaaaaagaaatgaaatcactagcaagaaaggcaatggataccgaaagtgaacttggcagacaaaaagcagagaataattctttgagacttttgtatgaaaacacagaaaaagatctttctgatactcagcgacaccttgctaagaaaaaatatgagctacagcttactcaggagaaaattatgtgcttggatgaaaaaattgataactttacaaggcaaaatattgcacagcgagaagaaatcagcattcttggtggaaccctcaatgatctggctaaagaaaaggaatgcctgcaagcatgtttggataaaaaatctgagaatattgcatcccttggagagagtttggcaatgaaagaaaagaccatttcaggcatgaagaatatcattgctgagatggaacaggcatcaagacagtgtactgaggccctaattgtgtgtgaacaagacgtttccagaatgcgtcggcaattggatgagacaaatgatgagctggcccagatcgccagggaaagagatatcttggctcatgacaatgacaatctccaggaacagtttgctaaagctaaacaagaaaaccaggcactgtccaaaaaattgaatgacactcataatgaacttaatgacataaaacagaaggttcaagatactaatttggaggttaacaagctgaagaatatattaaagtctgaagaatctgagaaccggcaaatgatggaacaacttcgaaaagccaatgaagatgctgaaaactgggaaaataaagcccgtcaatcagaggcagataacaataccctcaaactggaacttatcactgctgaggcagagggtaacagattaaaagaaaaagtagattccctcaacagagaggttgagcaacacttaaatgcagaaaggtcttacaagtcccagatttctaccttacataaatctgttgtaaaaatggaagaggagcttcagaaggttcagtttgaaaaagtgtccgctcttgcagatttgtcttctactagggaactctgtattaaacttgactcaagcaaagaacttcttaatcgacagctggttgctaaagatcaagaaatagaaatgagggagaatgagttagattctgctcattctgaaattgaactcctgaggagtcagatggcaaatgagagaatctccatgcagaatctagaagctttgctggtggccaatcgagacaaagaatatcagtctcagatagcacttcaagaaaaagaatctgaaattcagcttcttaaagaacacctttgtttggcagaaaataaaatggccatccagagtagagatgtggcccagttcagaaatgttgtcacacaattggaagctgatttagacattaccaaaagacaactaggaacagagcgctttgaaagggagagggccgtacaagaacttcgccgccaaaattattcaagtaatgcttatcatatgagttctacaatgaagccaaatacaaaatgtcattcaccagaacgtgctcaccatcgatctcctgaccgaggcctagatcgatcattagaagagaatctttgctacagagatttctgacacctgaaatgattcttcacatccctgagaaaggtcaaagttacaaactgatttttttttttttgctacatgagtgcatttatcttttaaatgcttggcaatgttaaatgtatttattaactttgtgtctctgaatctctgttctaatgtgccatgttgcagtgatctgagatgacttataaaaacaaaaatgtatatggctctttctatccatgcagtgatagtgagtgtaaaatctgcttacttcactattgaacactattctgttcactatctggagtaaataaagaagcttattaaaacagggaaaagtgtttttacaaaactgctttcctttcctttcttggtatctcaaataattggttggttaattttttttctttgtgatttgtgttttcatggctggaaaatctgtgccaaaatgggtacaacttactgatactggtctgggatctgatattccattttggaaccaaccttacatgaattccatgccataatctgatattgaagcagcagaaagtaggagtgttgtcagggttttaaaacctatagtattgtaccactcaaagactaagtaacatacatattctacaattgtgtttactactactgcttttagaaaggtaggtgatggtatatctgtcaagaatgtaagattttattaaaaatctttatttttaataagttttctttcaagtactgcaatcaacttaattgcgattttattttattgtctgtggcagctgtctgtaatctggagtaataagataagtgatgtttccttcctcccccaatttcctaaatctcttaccttatctatccataggctttgatgtaatgttcatattagagcctgaatgctactgtattttactgatataaactatttgtattcttgccattttaataaaaaaaggcttgtcattaatagtatt

SEQ ID NO: 286069 - DNA, 3781 bp, Homo sapiens
cgttccatccaggtgcggcagcctcaggcagagattaagaaatgagtcgtggaaaagggggctagcggctggttactaggagacgggacgctcggctcgggcgtctaggcgctgcgtgggcgtgcgcctgcgcggcgcggatgggccaggaaggggtccctcctaggtgccctgtaaggcaggcaggtagacgtacgcgtcgctccgtgcgtaggagcgcgcgcacggcttgtagaccccgcgagaaggaaggtcgagccaggttaccaccaaagaatatgattttggtctaggggctccagtttctgaagctgaaaactaccagaatactctccagctagaacaagaagtgagaaaccaagatagattcatctcgacactgaaattacagattgaagatctcaaacagacaaatcatggcttggaagaatatgttaggaaactcttggatagtaaggaggtggtaagcagtcaagtagatgatttaaccagccacaatgagcatctttgtaaagaattgattaaaattgaccaactagcagagcaactcgaaaaagagaaaaattttgtggtggattccgccaacaaggaacttgaagaagccaagattgatctcatttgccagcaaaataatattatagtattggaagatacaataaaaaggcttaaatctacttgattcctttgtcaagactttggaagcagacaaagatcactataagagtgaagctcaacatttgagaaagatgatgcgaagtaggtctaaaagtccaagacgcccatcaccaactgcccggggtgcaaactgtgatgtagaacttttgaagacaacaacaagagatcgtgaagaacttaaatgcatgctggaaaaatatgagcgccatttggcagaaattcagggtaatgtcaaggttcttaaatctgagagagacaagatcttccttctttatgaacaggcacaggaagaaattacccgacttcgacgagaaatgatgaaaagctgtaagagtcctaaatcaacaacggcacatgctattctccggcgagtggagactgaaagagatgtagcctttactgatttacgaagaatgaccacagaacgagatagtctaagggagaggctaaagattgctcaagagacagcatttaatgagaaggctcacctggaacaaaggatagaggagctggagtgtacagttcataatcttgatgatgaacgtatggagcaaatgtcaaatatgactttgatgaaggaaaccataagcactgtggaaaaagaaatgaaatcactagcaagaaaggcaatggataccgaaagtgaacttggcagacaaaaagcagagaataattctttgagacttttgtatgaaaacacagaaaaagatctttctgatactcagcgacaccttgctaagaaaaaatatgagctacagcttactcaggagaaaattatgtgcttggatgaaaaaattgataactttacaaggcaaaatattgcacagcgagaagaaatcagcattcttggtggaaccctcaatgatctggctaaagaaaaggaatgcctgcaagcatgtttggataaaaaatctgagaatattgcatcccttggagagagtttggcaatgaaagaaaagaccatttcaggcatgaagaatatcattgctgagatggaacaggcatcaagacagtgtactgaggccctaattgtgtgtgaacaagacgtttccagaatgcgtcggcaattggatgagacaaatgatgagctggcccagatcgccagggaaagagatatcttggctcatgacaatgacaatctccaggaacagtttgctaaagctaaacaagaaaaccaggcactgtccaaaaaattgaatgacactcataatgaacttaatgacataaaacagaaggttcaagatactaatttggaggttaacaagctgaagaatatattaaagtctgaagaatctgagaaccggcaaatgatggaacaacttcgaaaagccaatgaagatgctgaaaactgggaaaataaagcccgtcaatcagaggcagataacaataccctcaaactggaacttatcactgctgaggcagagggtaacagattaaaagaaaaagtagattccctcaacagagaggttgagcaacacttaaatgcagaaaggtcttacaagtcccagatttctaccttacataaatctgttgtaaaaatggaagaggagcttcagaaggttcagtttgaaaaagtgtccgctcttgcagatttgtcttctactagggaactctgtattaaacttgactcaagcaaagaacttcttaatcgacagctggttgctaaagatcaagaaatagaaatgagggagaatgagttagattctgctcattctgaaattgaactcctgaggagtcagatggcaaatgagagaatctccatgcagaatctagaagctttgctggtggccaatcgagacaaagaatatcagtctcagatagcacttcaagaaaaagaatctgaaattcagcttcttaaagaacacctttgtttggcagaaaataaaatggccatccagagtagagatgtggcccagttcagaaatgttgtcacacaattggaagctgatttagacattaccaaaagacaactaggaacagagcgctttgaaagggagagggccgtacaagaacttcgccgccaaaattattcaagtaatgcttatcatatgagttctacaatgaagccaaatacaaaatgtcattcaccagaacgtgctcaccatcgatctcctgaccgaggcctagatcgatcattagaagagaatctttgctacagagatttctgacacctgaaatgattcttcacatccctgagaaaggtcaaagttacaaactgatttttttttttttgctacatgagtgcatttatcttttaaatgcttggcaatgttaaatgtatttattaactttgtgtctctgaatctctgttctaatgtgccatgttgcagtgatctgagatgacttataaaaacaaaaatgtatatggctctttctatccatgcagtgatagtgagtgtaaaatctgcttacttcactattgaacactattctgttcactatctggagtaaataaagaagcttattaaaacagggaaaagtgtttttacaaaactgctttcctttcctttcttggtatctcaaataattggttggttaattttttttctttgtgatttgtgttttcatggctggaaaatctgtgccaaaatgggtacaacttactgatactggtctgggatctgatattccattttggaaccaaccttacatgaattccatgccataatctgatattgaagcagcagaaagtaggagtgttgtcagggttttaaaacctatagtattgtaccactcaaagactaagtaacatacatattctacaattgtgtttactactactgcttttagaaaggtaggtgatggtatatctgtcaagaatgtaagattttattaaaaatctttatttttaataagttttctttcaagtactgcaatcaacttaattgcgattttattttattgtctgtggcagctgtctgtaatctggagtaataagataagtgatgtttccttcctcccccaatttcctaaatctcttaccttatctatccataggctttgatgtaatgttcatattagagcctgaatgctactgtattttactgatataaactatttgtattcttgccattttaataaaaaaaggcttgtcattaatagtatt

SEQ ID NO: 286070 - DNA, 3794 bp, Homo sapiens
tgcgcgcgatgctgccccgccccctgagggccggccccctgaagcgcaagagaaggaggggcgcgcagggatcgcgcctagtctctccgcctgcggagccgtggggtcccggcagcccgcaggagtgctaagtaagggtccttcagggcgggaaccaggttccaggcagggacgcaggctacgttcgaataaaagtaccgaaggtcataaggccccagttcagatgggacttccccgcgtgacagcacagagataacggccagccctgggcgaaggttaccaccaaagaatatgattttggtctaggggctccagtttctgaagctgaaaactaccagaatactctccagctagaacaagaagtgagaaaccaagatagattcatctcgacactgaaattacagattgaagatctcaaacagacaaatcatggcttggaagaatatgttaggaaactcttggatagtaaggaggtggtaagcagtcaagtagatgatttaaccagccacaatgagcatctttgtaaagaattgattaaaattgaccaactagcagagcaactcgaaaaagagaaaaattttgtggtggattccgccaacaaggaacttgaagaagccaagattgatctcatttgccagcaaaataatattatagtattggaagatacaataaaaaggcttaaatctacttgattcctttgtcaagactttggaagcagacaaagatcactataagagtgaagctcaacatttgagaaagatgatgcgaagtaggtctaaaagtccaagacgcccatcaccaactgcccggggtgcaaactgtgatgtagaacttttgaagacaacaacaagagatcgtgaagaacttaaatgcatgctggaaaaatatgagcgccatttggcagaaattcagggtaatgtcaaggttcttaaatctgagagagacaagatcttccttctttatgaacaggcacaggaagaaattacccgacttcgacgagaaatgatgaaaagctgtaagagtcctaaatcaacaacggcacatgctattctccggcgagtggagactgaaagagatgtagcctttactgatttacgaagaatgaccacagaacgagatagtctaagggagaggctaaagattgctcaagagacagcatttaatgagaaggctcacctggaacaaaggatagaggagctggagtgtacagttcataatcttgatgatgaacgtatggagcaaatgtcaaatatgactttgatgaaggaaaccataagcactgtggaaaaagaaatgaaatcactagcaagaaaggcaatggataccgaaagtgaacttggcagacaaaaagcagagaataattctttgagacttttgtatgaaaacacagaaaaagatctttctgatactcagcgacaccttgctaagaaaaaatatgagctacagcttactcaggagaaaattatgtgcttggatgaaaaaattgataactttacaaggcaaaatattgcacagcgagaagaaatcagcattcttggtggaaccctcaatgatctggctaaagaaaaggaatgcctgcaagcatgtttggataaaaaatctgagaatattgcatcccttggagagagtttggcaatgaaagaaaagaccatttcaggcatgaagaatatcattgctgagatggaacaggcatcaagacagtgtactgaggccctaattgtgtgtgaacaagacgtttccagaatgcgtcggcaattggatgagacaaatgatgagctggcccagatcgccagggaaagagatatcttggctcatgacaatgacaatctccaggaacagtttgctaaagctaaacaagaaaaccaggcactgtccaaaaaattgaatgacactcataatgaacttaatgacataaaacagaaggttcaagatactaatttggaggttaacaagctgaagaatatattaaagtctgaagaatctgagaaccggcaaatgatggaacaacttcgaaaagccaatgaagatgctgaaaactgggaaaataaagcccgtcaatcagaggcagataacaataccctcaaactggaacttatcactgctgaggcagagggtaacagattaaaagaaaaagtagattccctcaacagagaggttgagcaacacttaaatgcagaaaggtcttacaagtcccagatttctaccttacataaatctgttgtaaaaatggaagaggagcttcagaaggttcagtttgaaaaagtgtccgctcttgcagatttgtcttctactagggaactctgtattaaacttgactcaagcaaagaacttcttaatcgacagctggttgctaaagatcaagaaatagaaatgagggagaatgagttagattctgctcattctgaaattgaactcctgaggagtcagatggcaaatgagagaatctccatgcagaatctagaagctttgctggtggccaatcgagacaaagaatatcagtctcagatagcacttcaagaaaaagaatctgaaattcagcttcttaaagaacacctttgtttggcagaaaataaaatggccatccagagtagagatgtggcccagttcagaaatgttgtcacacaattggaagctgatttagacattaccaaaagacaactaggaacagagcgctttgaaagggagagggccgtacaagaacttcgccgccaaaattattcaagtaatgcttatcatatgagttctacaatgaagccaaatacaaaatgtcattcaccagaacgtgctcaccatcgatctcctgaccgaggcctagatcgatcattagaagagaatctttgctacagagatttctgacacctgaaatgattcttcacatccctgagaaaggtcaaagttacaaactgatttttttttttttgctacatgagtgcatttatcttttaaatgcttggcaatgttaaatgtatttattaactttgtgtctctgaatctctgttctaatgtgccatgttgcagtgatctgagatgacttataaaaacaaaaatgtatatggctctttctatccatgcagtgatagtgagtgtaaaatctgcttacttcactattgaacactattctgttcactatctggagtaaataaagaagcttattaaaacagggaaaagtgtttttacaaaactgctttcctttcctttcttggtatctcaaataattggttggttaattttttttctttgtgatttgtgttttcatggctggaaaatctgtgccaaaatgggtacaacttactgatactggtctgggatctgatattccattttggaaccaaccttacatgaattccatgccataatctgatattgaagcagcagaaagtaggagtgttgtcagggttttaaaacctatagtattgtaccactcaaagactaagtaacatacatattctacaattgtgtttactactactgcttttagaaaggtaggtgatggtatatctgtcaagaatgtaagattttattaaaaatctttatttttaataagttttctttcaagtactgcaatcaacttaattgcgattttattttattgtctgtggcagctgtctgtaatctggagtaataagataagtgatgtttccttcctcccccaatttcctaaatctcttaccttatctatccataggctttgatgtaatgttcatattagagcctgaatgctactgtattttactgatataaactatttgtattcttgccattttaataaaaaaaggcttgtcattaatagtatt

SEQ ID NO: 286071 - DNA, 3666 bp, Homo sapiens
  misc_feature (2653)..(2653): n is a, c, g, or t
  misc_feature (2656)..(2656): n is a, c, g, or t
  misc_feature (2671)..(2671): n is a, c, g, or t
  misc_feature (2702)..(2702): n is a, c, g, or t
acgcgtgcgcaccgggcctgggggcgagcgggacggaagcaaagctggggcgccggggaggtggaagacgagccccactccggttaccaccaaagaatatgattttggtctaggggctccagtttctgaagctgaaaactaccagaatactctccagctagaacaagaagtgagaaaccaagatagattcatctcgacactgaaattacagattgaagatctcaaacagacaaatcatggcttggaagaatatgttaggaaactcttggatagtaaggaggtggtaagcagtcaagtagatgatttaaccagccacaatgagcatctttgtaaagaattgattaaaattgaccaactagcagagcaactcgaaaaagagaaaaattttgtggtggattccgccaacaaggaacttgaagaagccaagattgatctcatttgccagcaaaataatattatagtattggaagatacaataaaaaggcttaaatctacttgattcctttgtcaagactttggaagcagacaaagatcactataagagtgaagctcaacatttgagaaagatgatgcgaagtaggtctaaaagtccaagacgcccatcaccaactgcccggggtgcaaactgtgatgtagaacttttgaagacaacaacaagagatcgtgaagaacttaaatgcatgctggaaaaatatgagcgccatttggcagaaattcagggtaatgtcaaggttcttaaatctgagagagacaagatcttccttctttatgaacaggcacaggaagaaattacccgacttcgacgagaaatgatgaaaagctgtaagagtcctaaatcaacaacggcacatgctattctccggcgagtggagactgaaagagatgtagcctttactgatttacgaagaatgaccacagaacgagatagtctaagggagaggctaaagattgctcaagagacagcatttaatgagaaggctcacctggaacaaaggatagaggagctggagtgtacagttcataatcttgatgatgaacgtatggagcaaatgtcaaatatgactttgatgaaggaaaccataagcactgtggaaaaagaaatgaaatcactagcaagaaaggcaatggataccgaaagtgaacttggcagacaaaaagcagagaataattctttgagacttttgtatgaaaacacagaaaaagatctttctgatactcagcgacaccttgctaagaaaaaatatgagctacagcttactcaggagaaaattatgtgcttggatgaaaaaattgataactttacaaggcaaaatattgcacagcgagaagaaatcagcattcttggtggaaccctcaatgatctggctaaagaaaaggaatgcctgcaagcatgtttggataaaaaatctgagaatattgcatcccttggagagagtttggcaatgaaagaaaagaccatttcaggcatgaagaatatcattgctgagatggaacaggcatcaagacagtgtactgaggccctaattgtgtgtgaacaagacgtttccagaatgcgtcggcaattggatgagacaaatgatgagctggcccagatcgccagggaaagagatatcttggctcatgacaatgacaatctccaggaacagtttgctaaagctaaacaagaaaaccaggcactgtccaaaaaattgaatgacactcataatgaacttaatgacataaaacagaaggttcaagatactaatttggaggttaacaagctgaagaatatattaaagtctgaagaatctgagaaccggcaaatgatggaacaacttcgaaaagccaatgaagatgctgaaaactgggaaaataaagcccgtcaatcagaggcagataacaataccctcaaactggaacttatcactgctgaggcagagggtaacagattaaaagaaaaagtagattccctcaacagagaggttgagcaacacttaaatgcagaaaggtcttacaagtcccagatttctaccttacataaatctgttgtaaaaatggaagaggagcttcagaaggttcagtttgaaaaagtgtccgctcttgcagatttgtcttctactagggaactctgtattaaacttgactcaagcaaagaacttcttaatcgacagctggttgctaaagatcaagaaatagaaatgagggagaatgagttagattctgctcattctgaaattgaactcctgaggagtcagatggcaaatgagagaatctccatgcagaatctagaagctttgctggtggccaatcgagacaaagaatatcagtctcagatagcacttcaagaaaaagaatctgaaattcagcttcttaaagaacacctttgtttggcagaaaataaaatggccatccagagtagagatgtggcccagttcagaaatgttgtcacacaattggaagctgatttagacattaccaaaagacaactaggaacagagcgctttgaaagggagagggccgtacaagaacttcgccgccaaaattattcaagtaatgcttatcatatgagttctacaatgaagccaaatacaaaatgtcattcaccagaacgtgctcaccatcgatctcctgaccgaggcctagatcgatcattagaagaaggaaggaaaggacnacnaaatcttcttctttngggctcaccaaccggaagagggaaaattttntgaatctttgctacagagatttctgacacctgaaatgattcttcacatccctgagaaaggtcaaagttacaaactgatttttttttttttgctacatgagtgcatttatcttttaaatgcttggcaatgttaaatgtatttattaactttgtgtctctgaatctctgttctaatgtgccatgttgcagtgatctgagatgacttataaaaacaaaaatgtatatggctctttctatccatgcagtgatagtgagtgtaaaatctgcttacttcactattgaacactattctgttcactatctggagtaaataaagaagcttattaaaacagggaaaagtgtttttacaaaactgctttcctttcctttcttggtatctcaaataattggttggttaattttttttctttgtgatttgtgttttcatggctggaaaatctgtgccaaaatgggtacaacttactgatactggtctgggatctgatattccattttggaaccaaccttacatgaattccatgccataatctgatattgaagcagcagaaagtaggagtgttgtcagggttttaaaacctatagtattgtaccactcaaagactaagtaacatacatattctacaattgtgtttactactactgcttttagaaaggtaggtgatggtatatctgtcaagaatgtaagattttattaaaaatctttatttttaataagttttctttcaagtactgcaatcaacttaattgcgattttattttattgtctgtggcagctgtctgtaatctggagtaataagataagtgatgtttccttcctcccccaatttcctaaatctcttaccttatctatccataggctttgatgtaatgttcatattagagcctgaatgctactgtattttactgatataaactatttgtattcttgccattttaataaaaaaaggcttgtcattaatagtatt

SEQ ID NO: 286072 - DNA, 2907 bp, Homo sapiens
ttcataattctacattatatgtgtaatttattaatgttgggcaacaaataaattcttttgcaaacagcatatttatactatagtcaaattgaaccagattgaaaaatatagactgatatactgtgataagctttactttgcagtggcttttccttggtcctacttcacaacaccttatctgtaaaaccttctacagcagtcaggtctaacctgataatctcatcctgtcagtcttgccataaaccagtttgtacagagggagtatgcccttcaggaagattactaaggtgtttttagtgatggcagtaaccttgtcattctacttgtatagcttgatgatgaacgtatggagcaaatgtcaaatatgactttgatgaaggaaaccataagcactgtggaaaaagaaatgaaatcactagcaagaaaggcaatggataccgaaagtgaacttggcagacaaaaagcagagaataattctttgagacttttgtatgaaaacacagaaaaagatctttctgatactcagcgacaccttgctaagaaaaaatatgagctacagcttactcaggagaaaattatgtgcttggatgaaaaaattgataactttacaaggcaaaatattgcacagcgagaagaaatcagcattcttggtggaaccctcaatgatctggctaaagaaaaggaatgcctgcaagcatgtttggataaaaaatctgagaatattgcatcccttggagagagtttggcaatgaaagaaaagaccatttcaggcatgaagaatatcattgctgagatggaacaggcatcaagacagtgtactgaggccctaattgtgtgtgaacaagacgtttccagaatgcgtcggcaattggatgagacaaatgatgagctggcccagatcgccagggaaagagatatcttggctcatgacaatgacaatctccaggaacagtttgctaaagctaaacaagaaaaccaggcactgtccaaaaaattgaatgacactcataatgaacttaatgacataaaacagaaggttcaagatactaatttggaggttaacaagctgaagaatatattaaagtctgaagaatctgagaaccggcaaatgatggaacaacttcgaaaagccaatgaagatgctgaaaactgggaaaataaagcccgtcaatcagaggcagataacaataccctcaaactggaacttatcactgctgaggcagagggtaacagattaaaagaaaaagtagattccctcaacagagaggttgagcaacacttaaatgcagaaaggtcttacaagtcccagatttctaccttacataaatctgttgtaaaaatggaagaggagcttcagaaggttcagtttgaaaaagtgtccgctcttgcagatttgtcttctactagggaactctgtattaaacttgactcaagcaaagaacttcttaatcgacagctggttgctaaagatcaagaaatagaaatgagggagaatgagttagattctgctcattctgaaattgaactcctgaggagtcagatggcaaatgagagaatctccatgcagaatctagaagctttgctggtggccaatcgagacaaagaatatcagtctcagatagcacttcaagaaaaagaatctgaaattcagcttcttaaagaacacctttgtttggcagaaaataaaatggccatccagagtagagatgtggcccagttcagaaatgttgtcacacaattggaagctgatttagacattaccaaaagacaactaggaacagagcgctttgaaagggagagggccgtacaagaacttcgccgccaaaattattcaagtaatgcttatcatatgagttctacaatgaagccaaatacaaaatgtcattcaccagaacgtgctcaccatcgatctcctgaccgaggcctagatcgatcattagaagagaatctttgctacagagatttctgacacctgaaatgattcttcacatccctgagaaaggtcaaagttacaaactgatttttttttttttgctacatgagtgcatttatcttttaaatgcttggcaatgttaaatgtatttattaactttgtgtctctgaatctctgttctaatgtgccatgttgcagtgatctgagatgacttataaaaacaaaaatgtatatggctctttctatccatgcagtgatagtgagtgtaaaatctgcttacttcactattgaacactattctgttcactatctggagtaaataaagaagcttattaaaacagggaaaagtgtttttacaaaactgctttcctttcctttcttggtatctcaaataattggttggttaattttttttctttgtgatttgtgttttcatggctggaaaatctgtgccaaaatgggtacaacttactgatactggtctgggatctgatattccattttggaaccaaccttacatgaattccatgccataatctgatattgaagcagcagaaagtaggagtgttgtcagggttttaaaacctatagtattgtaccactcaaagactaagtaacatacatattctacaattgtgtttactactactgcttttagaaaggtaggtgatggtatatctgtcaagaatgtaagattttattaaaaatctttatttttaataagttttctttcaagtactgcaatcaacttaattgcgattttattttattgtctgtggcagctgtctgtaatctggagtaataagataagtgatgtttccttcctcccccaatttcctaaatctcttaccttatctatccataggctttgatgtaatgttcatattagagcctgaatgctactgtattttactgatataaactatttgtattcttgccattttaataaaaaaaggcttgtcattaatagtatt

SEQ ID NO: 286073 - DNA, 2559 bp, Homo sapiens
ttaaaacagaaatataaaagataatattgaaggagaactcacatttgggtattttaagtcccaataaagatctaaggtaagcagctgaatatttaagtttgtgtctcagaagagaaagatacatatttgggacacatcagcatataaatgatattttaaaaccgtgaaattacctagggaaatatagagaatgagaagaggatccaggactgagtaacaagaagccaaagaagtaggaagaagacccagaaataactttacaaggcaaaatattgcacagcgagaagaaatcagcattcttggtggaaccctcaatgatctggctaaagaaaaggaatgcctgcaagcatgtttggataaaaaatctgagaatattgcatcccttggagagagtttggcaatgaaagaaaagaccatttcaggcatgaagaatatcattgctgagatggaacaggcatcaagacagtgtactgaggccctaattgtgtgtgaacaagacgtttccagaatgcgtcggcaattggatgagacaaatgatgagctggcccagatcgccagggaaagagatatcttggctcatgacaatgacaatctccaggaacagtttgctaaagctaaacaagaaaaccaggcactgtccaaaaaattgaatgacactcataatgaacttaatgacataaaacagaaggttcaagatactaatttggaggttaacaagctgaagaatatattaaagtctgaagaatctgagaaccggcaaatgatggaacaacttcgaaaagccaatgaagatgctgaaaactgggaaaataaagcccgtcaatcagaggcagataacaataccctcaaactggaacttatcactgctgaggcagagggtaacagattaaaagaaaaagtagattccctcaacagagaggttgagcaacacttaaatgcagaaaggtcttacaagtcccagatttctaccttacataaatctgttgtaaaaatggaagaggagcttcagaaggttcagtttgaaaaagtgtccgctcttgcagatttgtcttctactagggaactctgtattaaacttgactcaagcaaagaacttcttaatcgacagctggttgctaaagatcaagaaatagaaatgagggagaatgagttagattctgctcattctgaaattgaactcctgaggagtcagatggcaaatgagagaatctccatgcagaatctagaagctttgctggtggccaatcgagacaaagaatatcagtctcagatagcacttcaagaaaaagaatctgaaattcagcttcttaaagaacacctttgtttggcagaaaataaaatggccatccagagtagagatgtggcccagttcagaaatgttgtcacacaattggaagctgatttagacattaccaaaagacaactaggaacagagcgctttgaaagggagagggccgtacaagaacttcgccgccaaaattattcaagtaatgcttatcatatgagttctacaatgaagccaaatacaaaatgtcattcaccagaacgtgctcaccatcgatctcctgaccgaggcctagatcgatcattagaagagaatctttgctacagagatttctgacacctgaaatgattcttcacatccctgagaaaggtcaaagttacaaactgatttttttttttttgctacatgagtgcatttatcttttaaatgcttggcaatgttaaatgtatttattaactttgtgtctctgaatctctgttctaatgtgccatgttgcagtgatctgagatgacttataaaaacaaaaatgtatatggctctttctatccatgcagtgatagtgagtgtaaaatctgcttacttcactattgaacactattctgttcactatctggagtaaataaagaagcttattaaaacagggaaaagtgtttttacaaaactgctttcctttcctttcttggtatctcaaataattggttggttaattttttttctttgtgatttgtgttttcatggctggaaaatctgtgccaaaatgggtacaacttactgatactggtctgggatctgatattccattttggaaccaaccttacatgaattccatgccataatctgatattgaagcagcagaaagtaggagtgttgtcagggttttaaaacctatagtattgtaccactcaaagactaagtaacatacatattctacaattgtgtttactactactgcttttagaaaggtaggtgatggtatatctgtcaagaatgtaagattttattaaaaatctttatttttaataagttttctttcaagtactgcaatcaacttaattgcgattttattttattgtctgtggcagctgtctgtaatctggagtaataagataagtgatgtttccttcctcccccaatttcctaaatctcttaccttatctatccataggctttgatgtaatgttcatattagagcctgaatgctactgtattttactgatataaactatttgtattcttgccattttaataaaaaaaggcttgtcattaatagtatt

SEQ ID NO: 286074 - DNA, 2114 bp, Homo sapiens
gcctctcgggtagctgggactacaggcgcccgcaccacacctggctaattttttgtatttttagtagagacggggtttcaccgtgttagccaggatggtctcgatctcctgacctcgtgatccgcccgccttggcctcccaaagtgttgggattacaggcgtgacaaccacacccggccttaaacattcttagataaggtattcttctgtcttaacttgcctgttttataaagtctaacaatggcacatagtttgaagacaaattggcatttctggaccacttactagagaagttccaaattggcactacaggtttactgctattccgatcttaagtcataccaaggtgtaaaaattcagctccgactaattaaaatgaatattgaattatatttcattcagtggtttagtgcttcttccatcctgctcactggagacacaaatatgagtaaggcatacctctggccctgcctgttttatttatcatgacatgattttttatacctcacatagtattggatatacagtagttactcaataaacacttgttgatttgagtgtccttgagaaacttgttggctggtgggagagtttgacgtgtaaaaagattttttaaaattacaatgaaaaaatatataagaaaataaaatacataatagaagtcattaagagaaatcttaatcactaagaggaaggagtctcaaagcactccattggtttttgccttctctcatattgtctaattttaggaaagaatatcatcacccaaaattctgaggaaaaatgaaatgtgctctggtttaaatagttttcttatttttctttttatctaggattctcagatgttggttgtttctatgaaaccaggcagggaaattggaatgcattatgtttttaaaactttaaacctgcttctgttctgtttgactggcatttactattttctgcatttcattctctcacctaatctcttcctttctaatctgcttactaaaaatgaagatttaacatcagaagccgggctcagtaactgatcaaagggaactttaagatgcagtcttgtggcgcagtttgggctgctaacctgctatctaaaggtgatgcttcaaatggcttttctgtgcatgtgcatggattttgtgaatggtgaaaactgtctctaaactgtgtggtggtgtgtagtgtaaagtgaatttgttcttgatgggtgctatctcacaaaagatggacttgacaaaaggaccttaatttataataccatcctttgacaaatgtctctgataactaagtttttgctaaataacatttaagattaccaaaataacaatactcctggagtttcttaagaaatttaaaataggttgatctttgagacagctgctgcagtctagttctgataaaaggtaagggaagtcatgctaaatgcttctctgtcttcatagactttgattttagcatcctgtcttccattaagtttccctacttttttctggttcttgagtcaagatttcctctattaaagttttgcttctaatgattaggattacccatgatttaggccactaccaaattaaggaatcaattgccagtctagtcgtctcaaatcctatttggaacaaggtgggatataaaattttaaatgctaccatatctggtatcttctttccttaaataagggtttcccctctacatatgttataaactattctataattcctgttacatcatgtgttaacttgctgtgatttcatgttgaattaatacaaaactaactaatattaatttttcatgggaggtaagttttgtcagcttactgtttattattgtgtctgactcttaagtttagatctttatgagaattatgaacatgattaaatgttaaaaaattaagtatttgatttctaccctttgtttcctgccctccttttttcttcttttcttagtttgactatccaaagcatacacacactcacattcactctttattattagttaatagttatttggtcccttttctccttgatgtgaaatagtcacagctaatatttagttttatttttgctatttttaattcagttaaaactaatattgatgcaaccaaaactaaaaaaaaa

SEQ ID NO: 286075 - DNA, 513 bp, Homo sapiens
cgcgcgaggcgcgactagggtgcagcgccaggtccggtgttggggtgtccgagttgccgccggagaggagtggcctcgcccgcttgagttttgattcatcatggataatctgtcatcagaagaaattcaacagagagctcaccagattactgatgagtctctggaaagtacgaggagaatcctgggtttagccattgagtctcaggatgcaggaatcaagaccatcactatgctggatgaacaaaaggaacaactaaaccgcatagaagaaggcttggaccaaataaataaggacatgagagagacagagaagactttaacagaactcaacaaatgctgtggcctttgtgtctgcccatgtaataggcgaagaattttaaggcgtggacagcaagatatcttcactgagatctgagatatctattgaaaaaccacaaaagaataacaggaaaaagcataagcactatactggttacttttagtacattaaaacaaaacaaaaatctttaaaaa

SEQ ID NO: 286076 - DNA, 2661 bp, Homo sapiens
cgcgcgaggcgcgactagggtgcagcgccaggtccggtgttggggtgtccgagttgccgccggagaggagtggcctcgcccgcttgagttttgattcatcatggataatctgtcatcagaagaaattcaacagagagctcaccagattactgatgagtctctggaaagtacgaggagaatcctgggtttagccattgagtctcaggatgcaggaatcaagaccatcactatgctggatgaacaaaaggaacaactaaaccgcatagaagaaggcttggaccaaataaataaggacatgagagagacagagaagactttaacagaactcaacaaatgctgtggcctttgtgtctgcccatgtaatagaacaaagaactttgagtctggcaaggcttataagacaacatggggagatggtggagaaaactcaccttgcaatgtagtatctaaacagccaggcccggtgacaaatggtcagcttcagcaaccaacaacgggagcagccagtggtggatacattaaacgcataactaatgatgccagagaagatgaaatggaagagaacctgactcaagtgggcagtatcctgggaaatctaaaagacatggccctgaacataggcaatgagattgatgctcaaaatccacaaataaaacgaatcacagacaaggctgacaccaacagagatcgtattgatattgccaatgccagagcaaagaaactcattgacagctaaagctactgctgttcttctttatcatttattcacttccgtagctcctccttgaaagttattaccttttcagagtttaagttttcggttccacgctcttctaattgggagataatatggaagaagggccagagcagttacagccctccttcttttttgttttctgttgagggccgactgctgctctgccttccttctagtattttctttctcaattcatacgcttagattggttttcatatgtcatgtttagtgttttcatcctcctcatatacttcagcaggttcttttgctttcaagatttggaagcattgccaaagacagccatgaagaaggaagctgtagaggtgttttttgttgttgtttatttttgcttttgtggttgagggaaggacaagagataagaggttgttacctcagtaaaaaccttcaggccacaaagcaaaaagttgcatagccacaacgaagatctagttggatatagtttttgatttaagttgcagttatagccaatttaggctaatgcttggttttggagcttttatacacaacgtttttgttaggcatcacagttttgcaacctctgctccaaagagaaaaatagaatgagttttctttctttttttttttttggagtcagagtctcgctctcttgtccaggctggagtgcaatagcgcgatctgggctcactgcaacctccgcctccctggttcaagcaattctcctgccttgcctcctgagtagctgggattacaggcgtgtgtcaccacgctcggctaatttttgtatttttagtagagacagggtttcaccatgtcaagctggtcttggactcctgacgtcgtgatccacccgccttggcctcccaaagtactgggattacaggcgtgagccactgtgcctggctgagttttcttaaagtgagcttaatttctgaactcttagtgattcatatatgtacataaatctgtgatcccatttcttattgcaccattcaggaacactttatataaatgagtggctttttatttcatattattagtagtatcatggttccattacaggcctattaacatcatacattgtcattagtctttgaagaaaaaatatgtaaatatatatgtgtaacatgagaatttctctctaaagcagggcttaaaattttttggaaaagtttgacaaagcataccacatgaattcagatttacctcaatgctaagaattatgtttagttaggaaaaaggaaagtcattttgacctcaggtagaaaaatagattgctttgagttttatgtagctttagactttaaaaagttagaatttattctgtaactaaaaattatttgaaaaaattatgcctctggtttaattattggtgattacacactctttctcttacccttgtgtattgaactatgtccataatcaagttgatgtggatcctgaaaagtgttatgaacatctgattggtatttgtcacatttattttaaaattagcatctgaacacttcaaagctgtcagtgtgtattggtttcaccaataaccactgcttgatccttacaattaaattttttaactaacaaaaaaaaaaaaaacaacacaatacactcacaaaaacgctcgccccgaagcagcgaccgcgccccacacaacacccgcagaccaaaaacgcacacgagaccgaagcagaacaacaacaaagtagcgaccacgcgaaagctgacggaacacaaaaaaagagcgtgcgcgacatgcgccccgcaagagcaactacaacaacaatggtggtggcggccgagcaggcccaagcataaaagatagaagaccgactgcctgccgagacaaacgccggggccgacagatgagcggtgtaggccaccaacaagaaacaccgcgcgcccggctcatccagccaaacaacgggggg

SEQ ID NO: 286077 - DNA, 2080 bp, Homo sapiens
cgcgcgaggcgcgactagggtgcagcgccaggtccggtgttggggtgtccgagttgccgccggagaggagtggcctcgcccgcttgagttttgattcatcatggataatctgtcatcagaagaaattcaacagagagctcaccagattactgatgagtctctggaaagtacgaggagaatcctgggtttagccattgagtctcaggatgcaggaatcaagaccatcactatgctggatgaacaaaaggaacaactaaaccgcatagaagaaggcttggaccaaataaataaggacatgagagagacagagaagactttaacagaactcaacaaatgctgtggcctttgtgtctgcccatgtaatagaacaaagaactttgagtctggcaaggcttataagacaacatggggagatggtggagaaaactcaccttgcaatgtagtatctaaacagccaggcccggtgacaaatggtcagcttcagcaaccaacaacgggagcagccagtggtggatacattaaacgcataactaatgatgccagagaagatgaaatggaagagaacctgactcaagtgggcagtatcctgggaaatctaaaagacatggccctgaacataggcaatgagattgatgctcaaaatccacaaataaaacgaatcacagacaaggctgacaccaacagagatcgtattgatattgccaatgccagagcaaagaaactcattgacagctaaagctactgctgttcttctttatcatttattcacttccgtagctcctccttgaaagttattaccttttcagagtttaagttttcggttccacgctcttctaattgggagataatatggaagaagggccagagcagttacagccctccttcttttttgttttctgttgagggccgactgctgctctgccttccttctagtattttctttctcaattcatacgcttagattggttttcatatgtcatgtttagtgttttcatcctcctcatatacttcagcaggttcttttgctttcaagatttggaagcattgccaaagacagccatgaagaaggaagctgtagaggtgttttttgttgttgtttatttttgcttttgtggttgagggaaggacaagagataagaggttgttacctcagtaaaaaccttcaggccacaaagcaaaaagttgcatagccacaacgaagatctagttggatatagtttttgatttaagttgcagttatagccaatttaggctaatgcttggttttggagcttttatacacaacgtttttgttaggcatcacagttttgcaacctctgctccaaagagaaaaatagaatgagttttctttctttttttttttttggagtcagagtctcgctctcttgtccaggctggagtgcaatagcgcgatctgggctcactgcaacctccgcctccctggttcaagcaattctcctgccttgcctcctgagtagctgggattacaggcgtgtgtcaccacgctcggctaatttttgtatttttagtagagacagggtttcaccatgtcaagctggtcttggactcctgacgtcgtgatccacccgccttggcctcccaaagtactgggattacaggcgtgagccactgtgcctggctgagttttcttaaagtgagcttaatttctgaactcttagtgattcatatatgtacataaatctgtgatcccatttcttattgcaccattcaggaacactttatataaatgagtggctttttatttcatattattagtagtatcatggttccattacaggcctattaacatcatacattgtcattagtctttgaagaaaaaatatgtaaatatatatgtgtaacatgagaatttctctctaaagcagggcttaaaattttttggaaaagtttgacaaagcataccacatgaattcagatttacctcaatgctaagaattatgtttagttaggaaaaaggaaagtcattttgacctcaggtagaaaaatagattgctttgagttttatgtagctttagactttaaaaagttagaatttattctgtaactaaaaattatttga

SEQ ID NO: 286078 - DNA, 3063 bp, Homo sapiens
cgcgcgaggcgcgactagggtgcagcgccaggtccggtgttggggtgtccgagttgccgccggagaggagtggcctcgcccgcttgagttttgattcatcatggataatctgtcatcagaagaaattcaacagagagctcaccagattactgatgagtctctggaaagtacgaggagaatcctgggtttagccattgaggtaagaaaatgttagtcatcaacttaagtatagaaatttataggagcgatcctaatacttctggctggaattagtattaaagggtaatgtatcaatatgctttattatttgaaattaacagttgctgaaatgtcaaaccatgcactaatgggaattttctgtttttccctttaacagtattggaatatgacagggaagatgaattcactatgagtttgtgacttaattattttgggggctgctatgttaaagtgtgttagtttaagaatactagttctgtctgtagctctaatcctctgagagcttgggtttctaaattattctgtgttgctcttgtaggttttgtttctgttgtttttggtttgttttgttgtactatcagcttttccccccttgtcttagtctcaggatgcaggaatcaagaccatcactatgctggatgaacaaaaggaacaactaaaccgcatagaagaaggcttggaccaaataaataaggacatgagagagacagagaagactttaacagaactcaacaaatgctgtggcctttgtgtctgcccatgtaatagaacaaagaactttgagtctggcaaggcttataagacaacatggggagatggtggagaaaactcaccttgcaatgtagtatctaaacagccaggcccggtgacaaatggtcagcttcagcaaccaacaacgggagcagccagtggtggatacattaaacgcataactaatgatgccagagaagatgaaatggaagagaacctgactcaagtgggcagtatcctgggaaatctaaaagacatggccctgaacataggcaatgagattgatgctcaaaatccacaaataaaacgaatcacagacaaggctgacaccaacagagatcgtattgatattgccaatgccagagcaaagaaactcattgacagctaaagctactgctgttcttctttatcatttattcacttccgtagctcctccttgaaagttattaccttttcagagtttaagttttcggttccacgctcttctaattgggagataatatggaagaagggccagagcagttacagccctccttcttttttgttttctgttgagggccgactgctgctctgccttccttctagtattttctttctcaattcatacgcttagattggttttcatatgtcatgtttagtgttttcatcctcctcatatacttcagcaggttcttttgctttcaagatttggaagcattgccaaagacagccatgaagaaggaagctgtagaggtgttttttgttgttgtttatttttgcttttgtggttgagggaaggacaagagataagaggttgttacctcagtaaaaaccttcaggccacaaagcaaaaagttgcatagccacaacgaagatctagttggatatagtttttgatttaagttgcagttatagccaatttaggctaatgcttggttttggagcttttatacacaacgtttttgttaggcatcacagttttgcaacctctgctccaaagagaaaaatagaatgagttttctttctttttttttttttggagtcagagtctcgctctcttgtccaggctggagtgcaatagcgcgatctgggctcactgcaacctccgcctccctggttcaagcaattctcctgccttgcctcctgagtagctgggattacaggcgtgtgtcaccacgctcggctaatttttgtatttttagtagagacagggtttcaccatgtcaagctggtcttggactcctgacgtcgtgatccacccgccttggcctcccaaagtactgggattacaggcgtgagccactgtgcctggctgagttttcttaaagtgagcttaatttctgaactcttagtgattcatatatgtacataaatctgtgatcccatttcttattgcaccattcaggaacactttatataaatgagtggctttttatttcatattattagtagtatcatggttccattacaggcctattaacatcatacattgtcattagtctttgaagaaaaaatatgtaaatatatatgtgtaacatgagaatttctctctaaagcagggcttaaaattttttggaaaagtttgacaaagcataccacatgaattcagatttacctcaatgctaagaattatgtttagttaggaaaaaggaaagtcattttgacctcaggtagaaaaatagattgctttgagttttatgtagctttagactttaaaaagttagaatttattctgtaactaaaaattatttgaaaaaattatgcctctggtttaattattggtgattacacactctttctcttacccttgtgtattgaactatgtccataatcaagttgatgtggatcctgaaaagtgttatgaacatctgattggtatttgtcacatttattttaaaattagcatctgaacacttcaaagctgtcagtgtgtattggtttcaccaataaccactgcttgatccttacaattaaattttttaactaacaaaaaaaaaaaaaacaacacaatacactcacaaaaacgctcgccccgaagcagcgaccgcgccccacacaacacccgcagaccaaaaacgcacacgagaccgaagcagaacaacaacaaagtagcgaccacgcgaaagctgacggaacacaaaaaaagagcgtgcgcgacatgcgccccgcaagagcaactacaacaacaatggtggtggcggccgagcaggcccaagcataaaagatagaagaccgactgcctgccgagacaaacgccggggccgacagatgagcggtgtaggccaccaacaagaaacaccgcgcgcccggctcatccagccaaacaacgggggg

SEQ ID NO: 286079 - DNA, 2502 bp, Homo sapiens
cgcgcgaggcgcgactagggtgcagcgccaggtccggtgttggggtgtccgagttgccgccggagaggagtggcctcgcccgcttgagttttgattcatcatggataatctgtcatcagaagaaattcaacagagagctcaccagattactgatgagtctctggaaagtacgaggagaatcctgggtttagccattgagtctcaggatgcaggaatcaagaccatcactatgctggatgaacaaaaggaacaactaaaccgcatagaagaaggcttggaccaaataaataaggacatgagagagacagagaagactttaacagaactcaacaaatgctgtggcctttgtgtctgcccatgtaatagcataactaatgatgccagagaagatgaaatggaagagaacctgactcaagtgggcagtatcctgggaaatctaaaagacatggccctgaacataggcaatgagattgatgctcaaaatccacaaataaaacgaatcacagacaaggctgacaccaacagagatcgtattgatattgccaatgccagagcaaagaaactcattgacagctaaagctactgctgttcttctttatcatttattcacttccgtagctcctccttgaaagttattaccttttcagagtttaagttttcggttccacgctcttctaattgggagataatatggaagaagggccagagcagttacagccctccttcttttttgttttctgttgagggccgactgctgctctgccttccttctagtattttctttctcaattcatacgcttagattggttttcatatgtcatgtttagtgttttcatcctcctcatatacttcagcaggttcttttgctttcaagatttggaagcattgccaaagacagccatgaagaaggaagctgtagaggtgttttttgttgttgtttatttttgcttttgtggttgagggaaggacaagagataagaggttgttacctcagtaaaaaccttcaggccacaaagcaaaaagttgcatagccacaacgaagatctagttggatatagtttttgatttaagttgcagttatagccaatttaggctaatgcttggttttggagcttttatacacaacgtttttgttaggcatcacagttttgcaacctctgctccaaagagaaaaatagaatgagttttctttctttttttttttttggagtcagagtctcgctctcttgtccaggctggagtgcaatagcgcgatctgggctcactgcaacctccgcctccctggttcaagcaattctcctgccttgcctcctgagtagctgggattacaggcgtgtgtcaccacgctcggctaatttttgtatttttagtagagacagggtttcaccatgtcaagctggtcttggactcctgacgtcgtgatccacccgccttggcctcccaaagtactgggattacaggcgtgagccactgtgcctggctgagttttcttaaagtgagcttaatttctgaactcttagtgattcatatatgtacataaatctgtgatcccatttcttattgcaccattcaggaacactttatataaatgagtggctttttatttcatattattagtagtatcatggttccattacaggcctattaacatcatacattgtcattagtctttgaagaaaaaatatgtaaatatatatgtgtaacatgagaatttctctctaaagcagggcttaaaattttttggaaaagtttgacaaagcataccacatgaattcagatttacctcaatgctaagaattatgtttagttaggaaaaaggaaagtcattttgacctcaggtagaaaaatagattgctttgagttttatgtagctttagactttaaaaagttagaatttattctgtaactaaaaattatttgaaaaaattatgcctctggtttaattattggtgattacacactctttctcttacccttgtgtattgaactatgtccataatcaagttgatgtggatcctgaaaagtgttatgaacatctgattggtatttgtcacatttattttaaaattagcatctgaacacttcaaagctgtcagtgtgtattggtttcaccaataaccactgcttgatccttacaattaaattttttaactaacaaaaaaaaaaaaaacaacacaatacactcacaaaaacgctcgccccgaagcagcgaccgcgccccacacaacacccgcagaccaaaaacgcacacgagaccgaagcagaacaacaacaaagtagcgaccacgcgaaagctgacggaacacaaaaaaagagcgtgcgcgacatgcgccccgcaagagcaactacaacaacaatggtggtggcggccgagcaggcccaagcataaaagatagaagaccgactgcctgccgagacaaacgccggggccgacagatgagcggtgtaggccaccaacaagaaacaccgcgcgcccggctcatccagccaaacaacgggggg

SEQ ID NO: 286080 - DNA, 3096 bp, Homo sapiens
cgcgcgaggcgcgactagggtgcagcgccaggtccggtgttggggtgtccgagttgccgccggagaggagtggcctcgcccgcttgagttttgattcatcatggataatctgtcatcagaagaaattcaacagagagctcaccagattactgatgagtctctggaaagtacgaggagaatcctgggtttagccattgaggtaagaaaatgttagtcatcaacttaagtatagaaatttataggagcgatcctaatacttctggctggaattagtattaaagggtaatgtatcaatatgctttattatttgaaattaacagttgctgaaatgtcaaaccatgcactaatgggaattttctgtttttccctttaacagtattggaatatgacagggaagatgaattcactatgagtttgtgacttaattattttgggggctgctatgttaaagtgtgttagtttaagaatactagttctgtctgtagctctaatcctctgagagcttgggtttctaaattattctgtgttgctcttgtaggttttgtttctgttgtttttggtttgttttgttgtactatcagcttttccccccttgtcttagtctcaggatgcaggaatcaagaccatcactatgctggatgaacaaaaggaacaactaaaccgcatagaagaaggcttggaccaaataaataaggacatgagagagacagagaagactttaacagaactcaacaaatgctgtggcctttgtgtctgcccatgtaatagattctcagatgttggttgtttctatgaaaccagaacaaagaactttgagtctggcaaggcttataagacaacatggggagatggtggagaaaactcaccttgcaatgtagtatctaaacagccaggcccggtgacaaatggtcagcttcagcaaccaacaacgggagcagccagtggtggatacattaaacgcataactaatgatgccagagaagatgaaatggaagagaacctgactcaagtgggcagtatcctgggaaatctaaaagacatggccctgaacataggcaatgagattgatgctcaaaatccacaaataaaacgaatcacagacaaggctgacaccaacagagatcgtattgatattgccaatgccagagcaaagaaactcattgacagctaaagctactgctgttcttctttatcatttattcacttccgtagctcctccttgaaagttattaccttttcagagtttaagttttcggttccacgctcttctaattgggagataatatggaagaagggccagagcagttacagccctccttcttttttgttttctgttgagggccgactgctgctctgccttccttctagtattttctttctcaattcatacgcttagattggttttcatatgtcatgtttagtgttttcatcctcctcatatacttcagcaggttcttttgctttcaagatttggaagcattgccaaagacagccatgaagaaggaagctgtagaggtgttttttgttgttgtttatttttgcttttgtggttgagggaaggacaagagataagaggttgttacctcagtaaaaaccttcaggccacaaagcaaaaagttgcatagccacaacgaagatctagttggatatagtttttgatttaagttgcagttatagccaatttaggctaatgcttggttttggagcttttatacacaacgtttttgttaggcatcacagttttgcaacctctgctccaaagagaaaaatagaatgagttttctttctttttttttttttggagtcagagtctcgctctcttgtccaggctggagtgcaatagcgcgatctgggctcactgcaacctccgcctccctggttcaagcaattctcctgccttgcctcctgagtagctgggattacaggcgtgtgtcaccacgctcggctaatttttgtatttttagtagagacagggtttcaccatgtcaagctggtcttggactcctgacgtcgtgatccacccgccttggcctcccaaagtactgggattacaggcgtgagccactgtgcctggctgagttttcttaaagtgagcttaatttctgaactcttagtgattcatatatgtacataaatctgtgatcccatttcttattgcaccattcaggaacactttatataaatgagtggctttttatttcatattattagtagtatcatggttccattacaggcctattaacatcatacattgtcattagtctttgaagaaaaaatatgtaaatatatatgtgtaacatgagaatttctctctaaagcagggcttaaaattttttggaaaagtttgacaaagcataccacatgaattcagatttacctcaatgctaagaattatgtttagttaggaaaaaggaaagtcattttgacctcaggtagaaaaatagattgctttgagttttatgtagctttagactttaaaaagttagaatttattctgtaactaaaaattatttgaaaaaattatgcctctggtttaattattggtgattacacactctttctcttacccttgtgtattgaactatgtccataatcaagttgatgtggatcctgaaaagtgttatgaacatctgattggtatttgtcacatttattttaaaattagcatctgaacacttcaaagctgtcagtgtgtattggtttcaccaataaccactgcttgatccttacaattaaattttttaactaacaaaaaaaaaaaaaacaacacaatacactcacaaaaacgctcgccccgaagcagcgaccgcgccccacacaacacccgcagaccaaaaacgcacacgagaccgaagcagaacaacaacaaagtagcgaccacgcgaaagctgacggaacacaaaaaaagagcgtgcgcgacatgcgccccgcaagagcaactacaacaacaatggtggtggcggccgagcaggcccaagcataaaagatagaagaccgactgcctgccgagacaaacgccggggccgacagatgagcggtgtaggccaccaacaagaaacaccgcgcgcccggctcatccagccaaacaacgggggg

SEQ ID NO: 286081 - DNA, 2694 bp, Homo sapiens
cgcgcgaggcgcgactagggtgcagcgccaggtccggtgttggggtgtccgagttgccgccggagaggagtggcctcgcccgcttgagttttgattcatcatggataatctgtcatcagaagaaattcaacagagagctcaccagattactgatgagtctctggaaagtacgaggagaatcctgggtttagccattgagtctcaggatgcaggaatcaagaccatcactatgctggatgaacaaaaggaacaactaaaccgcatagaagaaggcttggaccaaataaataaggacatgagagagacagagaagactttaacagaactcaacaaatgctgtggcctttgtgtctgcccatgtaatagattctcagatgttggttgtttctatgaaaccagaacaaagaactttgagtctggcaaggcttataagacaacatggggagatggtggagaaaactcaccttgcaatgtagtatctaaacagccaggcccggtgacaaatggtcagcttcagcaaccaacaacgggagcagccagtggtggatacattaaacgcataactaatgatgccagagaagatgaaatggaagagaacctgactcaagtgggcagtatcctgggaaatctaaaagacatggccctgaacataggcaatgagattgatgctcaaaatccacaaataaaacgaatcacagacaaggctgacaccaacagagatcgtattgatattgccaatgccagagcaaagaaactcattgacagctaaagctactgctgttcttctttatcatttattcacttccgtagctcctccttgaaagttattaccttttcagagtttaagttttcggttccacgctcttctaattgggagataatatggaagaagggccagagcagttacagccctccttcttttttgttttctgttgagggccgactgctgctctgccttccttctagtattttctttctcaattcatacgcttagattggttttcatatgtcatgtttagtgttttcatcctcctcatatacttcagcaggttcttttgctttcaagatttggaagcattgccaaagacagccatgaagaaggaagctgtagaggtgttttttgttgttgtttatttttgcttttgtggttgagggaaggacaagagataagaggttgttacctcagtaaaaaccttcaggccacaaagcaaaaagttgcatagccacaacgaagatctagttggatatagtttttgatttaagttgcagttatagccaatttaggctaatgcttggttttggagcttttatacacaacgtttttgttaggcatcacagttttgcaacctctgctccaaagagaaaaatagaatgagttttctttctttttttttttttggagtcagagtctcgctctcttgtccaggctggagtgcaatagcgcgatctgggctcactgcaacctccgcctccctggttcaagcaattctcctgccttgcctcctgagtagctgggattacaggcgtgtgtcaccacgctcggctaatttttgtatttttagtagagacagggtttcaccatgtcaagctggtcttggactcctgacgtcgtgatccacccgccttggcctcccaaagtactgggattacaggcgtgagccactgtgcctggctgagttttcttaaagtgagcttaatttctgaactcttagtgattcatatatgtacataaatctgtgatcccatttcttattgcaccattcaggaacactttatataaatgagtggctttttatttcatattattagtagtatcatggttccattacaggcctattaacatcatacattgtcattagtctttgaagaaaaaatatgtaaatatatatgtgtaacatgagaatttctctctaaagcagggcttaaaattttttggaaaagtttgacaaagcataccacatgaattcagatttacctcaatgctaagaattatgtttagttaggaaaaaggaaagtcattttgacctcaggtagaaaaatagattgctttgagttttatgtagctttagactttaaaaagttagaatttattctgtaactaaaaattatttgaaaaaattatgcctctggtttaattattggtgattacacactctttctcttacccttgtgtattgaactatgtccataatcaagttgatgtggatcctgaaaagtgttatgaacatctgattggtatttgtcacatttattttaaaattagcatctgaacacttcaaagctgtcagtgtgtattggtttcaccaataaccactgcttgatccttacaattaaattttttaactaacaaaaaaaaaaaaaacaacacaatacactcacaaaaacgctcgccccgaagcagcgaccgcgccccacacaacacccgcagaccaaaaacgcacacgagaccgaagcagaacaacaacaaagtagcgaccacgcgaaagctgacggaacacaaaaaaagagcgtgcgcgacatgcgccccgcaagagcaactacaacaacaatggtggtggcggccgagcaggcccaagcataaaagatagaagaccgactgcctgccgagacaaacgccggggccgacagatgagcggtgtaggccaccaacaagaaacaccgcgcgcccggctcatccagccaaacaacgggggg

SEQ ID NO: 286082 - DNA, 3162 bp, Homo sapiens
gcctctcgggtagctgggactacaggcgcccgcaccacacctggctaattttttgtatttttagtagagacggggtttcaccgtgttagccaggatggtctcgatctcctgacctcgtgatccgcccgccttggcctcccaaagtgttgggattacaggcgtgacaaccacacccggccttaaacattcttagataaggtattcttctgtcttaacttgcctgttttataaagtctaacaatggcacatagtttgaagacaaattggcatttctggaccacttactagagaagttccaaattggcactacaggtttactgctattccgatcttaagtcataccaaggtgtaaaaattcagctccgactaattaaaatgaatattgaattatatttcattcagtggtttagtgcttcttccatcctgctcactggagacacaaatatgagtaaggcatacctctggccctgcctgttttatttatcatgacatgattttttatacctcacatagtattggatatacagtagttactcaataaacacttgttgatttgagtgtccttgagaaacttgttggctggtgggagagtttgacgtgtaaaaagattttttaaaattacaatgaaaaaatatataagaaaataaaatacataatagaagtcattaagagaaatcttaatcactaagaggaaggagtctcaaagcactccattggtttttgccttctctcatattgtctaattttaggaaagaatatcatcacccaaaattctgaggaaaaatgaaatgtgctctggtttaaatagttttcttatttttctttttatctaggattctcagatgttggttgtttctatgaaaccagaacaaagaactttgagtctggcaaggcttataagacaacatggggagatggtggagaaaactcaccttgcaatgtagtatctaaacagccaggcccggtgacaaatggtcagcttcagcaaccaacaacgggagcagccagtggtggatacattaaacgcataactaatgatgccagagaagatgaaatggaagagaacctgactcaagtgggcagtatcctgggaaatctaaaagacatggccctgaacataggcaatgagattgatgctcaaaatccacaaataaaacgaatcacagacaaggctgacaccaacagagatcgtattgatattgccaatgccagagcaaagaaactcattgacagctaaagctactgctgttcttctttatcatttattcacttccgtagctcctccttgaaagttattaccttttcagagtttaagttttcggttccacgctcttctaattgggagataatatggaagaagggccagagcagttacagccctccttcttttttgttttctgttgagggccgactgctgctctgccttccttctagtattttctttctcaattcatacgcttagattggttttcatatgtcatgtttagtgttttcatcctcctcatatacttcagcaggttcttttgctttcaagatttggaagcattgccaaagacagccatgaagaaggaagctgtagaggtgttttttgttgttgtttatttttgcttttgtggttgagggaaggacaagagataagaggttgttacctcagtaaaaaccttcaggccacaaagcaaaaagttgcatagccacaacgaagatctagttggatatagtttttgatttaagttgcagttatagccaatttaggctaatgcttggttttggagcttttatacacaacgtttttgttaggcatcacagttttgcaacctctgctccaaagagaaaaatagaatgagttttctttctttttttttttttggagtcagagtctcgctctcttgtccaggctggagtgcaatagcgcgatctgggctcactgcaacctccgcctccctggttcaagcaattctcctgccttgcctcctgagtagctgggattacaggcgtgtgtcaccacgctcggctaatttttgtatttttagtagagacagggtttcaccatgtcaagctggtcttggactcctgacgtcgtgatccacccgccttggcctcccaaagtactgggattacaggcgtgagccactgtgcctggctgagttttcttaaagtgagcttaatttctgaactcttagtgattcatatatgtacataaatctgtgatcccatttcttattgcaccattcaggaacactttatataaatgagtggctttttatttcatattattagtagtatcatggttccattacaggcctattaacatcatacattgtcattagtctttgaagaaaaaatatgtaaatatatatgtgtaacatgagaatttctctctaaagcagggcttaaaattttttggaaaagtttgacaaagcataccacatgaattcagatttacctcaatgctaagaattatgtttagttaggaaaaaggaaagtcattttgacctcaggtagaaaaatagattgctttgagttttatgtagctttagactttaaaaagttagaatttattctgtaactaaaaattatttgaaaaaattatgcctctggtttaattattggtgattacacactctttctcttacccttgtgtattgaactatgtccataatcaagttgatgtggatcctgaaaagtgttatgaacatctgattggtatttgtcacatttattttaaaattagcatctgaacacttcaaagctgtcagtgtgtattggtttcaccaataaccactgcttgatccttacaattaaattttttaactaacaaaaaaaaaaaaaacaacacaatacactcacaaaaacgctcgccccgaagcagcgaccgcgccccacacaacacccgcagaccaaaaacgcacacgagaccgaagcagaacaacaacaaagtagcgaccacgcgaaagctgacggaacacaaaaaaagagcgtgcgcgacatgcgccccgcaagagcaactacaacaacaatggtggtggcggccgagcaggcccaagcataaaagatagaagaccgactgcctgccgagacaaacgccggggccgacagatgagcggtgtaggccaccaacaagaaacaccgcgcgcccggctcatccagccaaacaacgggggg

SEQ ID NO: 286083 - DNA, 2602 bp, Homo sapiens
cgcgcgaggcgcgactagggtgcagcgccaggtccggtgttggggtgtccgagttgccgccggagaggagtggcctcgcccgcttgagttttgattcatcatggataatctgtcatcagaagaaattcaacagagagctcaccagattactgatgagtctctggaaagtacgaggagaatcctgggtttagccattgagtctcaggatgcaggaatcaagaccatcactatgctggatgaacaaaaggaacaactaaaccgcatagaagaaggcttggaccaaataaataaggacatgagagagacagagaagactttaacagaactcaacaaatgctgtggcctttgtgtctgcccatgtaatagaacaaagaactttgagtctggcaaggcttataagacaacatggggagatggtggagaaaactcaccttgcaatgtagtatctaaacagccaggcccggtgacaaatggtcagcttcagcaaccaacaacgggagcagccagtggtggatacattaaacgcataactaatgatgccagagaagatgaaatggaagagaacctgactcaagtgggcagtatcctgggaaatctaaaagacatggccctgaacataggcaatgagattgatgctcaaaatcaatgccagagcaaagaaactcattgacagctaaagctactgctgttcttctttatcatttattcacttccgtagctcctccttgaaagttattaccttttcagagtttaagttttcggttccacgctcttctaattgggagataatatggaagaagggccagagcagttacagccctccttcttttttgttttctgttgagggccgactgctgctctgccttccttctagtattttctttctcaattcatacgcttagattggttttcatatgtcatgtttagtgttttcatcctcctcatatacttcagcaggttcttttgctttcaagatttggaagcattgccaaagacagccatgaagaaggaagctgtagaggtgttttttgttgttgtttatttttgcttttgtggttgagggaaggacaagagataagaggttgttacctcagtaaaaaccttcaggccacaaagcaaaaagttgcatagccacaacgaagatctagttggatatagtttttgatttaagttgcagttatagccaatttaggctaatgcttggttttggagcttttatacacaacgtttttgttaggcatcacagttttgcaacctctgctccaaagagaaaaatagaatgagttttctttctttttttttttttggagtcagagtctcgctctcttgtccaggctggagtgcaatagcgcgatctgggctcactgcaacctccgcctccctggttcaagcaattctcctgccttgcctcctgagtagctgggattacaggcgtgtgtcaccacgctcggctaatttttgtatttttagtagagacagggtttcaccatgtcaagctggtcttggactcctgacgtcgtgatccacccgccttggcctcccaaagtactgggattacaggcgtgagccactgtgcctggctgagttttcttaaagtgagcttaatttctgaactcttagtgattcatatatgtacataaatctgtgatcccatttcttattgcaccattcaggaacactttatataaatgagtggctttttatttcatattattagtagtatcatggttccattacaggcctattaacatcatacattgtcattagtctttgaagaaaaaatatgtaaatatatatgtgtaacatgagaatttctctctaaagcagggcttaaaattttttggaaaagtttgacaaagcataccacatgaattcagatttacctcaatgctaagaattatgtttagttaggaaaaaggaaagtcattttgacctcaggtagaaaaatagattgctttgagttttatgtagctttagactttaaaaagttagaatttattctgtaactaaaaattatttgaaaaaattatgcctctggtttaattattggtgattacacactctttctcttacccttgtgtattgaactatgtccataatcaagttgatgtggatcctgaaaagtgttatgaacatctgattggtatttgtcacatttattttaaaattagcatctgaacacttcaaagctgtcagtgtgtattggtttcaccaataaccactgcttgatccttacaattaaattttttaactaacaaaaaaaaaaaaaacaacacaatacactcacaaaaacgctcgccccgaagcagcgaccgcgccccacacaacacccgcagaccaaaaacgcacacgagaccgaagcagaacaacaacaaagtagcgaccacgcgaaagctgacggaacacaaaaaaagagcgtgcgcgacatgcgccccgcaagagcaactacaacaacaatggtggtggcggccgagcaggcccaagcataaaagatagaagaccgactgcctgccgagacaaacgccggggccgacagatgagcggtgtaggccaccaacaagaaacaccgcgcgcccggctcatccagccaaacaacgggggg

SEQ ID NO: 286084 - DNA, 2585 bp, Homo sapiens
ctcgtgccgattcggcaccaggttggggtgtccgagttgccgccggagaggagtggcctcgcccgcttgagttttgattcatcatggataatctgtcatcagaagaaattcaacagagagctcaccagattactgatgagtctctggaaagtacgaggagaatcctgggtttagccattgagtctcaggatgcaggaatcaagaccatcactatgctggatgaacaaaaggaacaactaaaccgcatagaagaaggcttggaccaaataaataaggacatgagagagacagagaagactttaacagaactcaacaaatgctgtggcctttgtgtctgcccatgtaatagaacaaagaactttgagtctggcaaggcttataagacaacatggggagatggtggagaaaactcaccttgcaatgtagtatctaaacagccaggcccggtgacaaatggtcagcttcagcaaccaacaacgggagcagccagtggtggatacattaaacgcataactaatgatgccagagaagatgaaatggaagagaacctgactcaagtgggcagtatcctgggaaatctaaaagacatggccctgaacataggcaatgagattgatgctcaaaatcaatgccagagcaaagaaactcattgacagctaaagctactgctgttcttctttatcatttattcacttccgtagctcctccttgaaagttattaccttttcagagtttaagttttcggttccacgctcttctaattgggagataatatggaagaagggccagagcagttacagccctccttcttttttgttttctgttgagggccgactgctgctctgccttccttctagtattttctttctcaattcatacgcttagattggttttcatatgtcatgtttagtgttttcatcctcctcatatacttcagcaggttcttttgctttcaagatttggaagcattgccaaagacagccatgaagaaggaagctgtagaggtgttttttgttgttgtttatttttgcttttgtggttgagggaaggacaagagataagaggttgttacctcagtaaaaaccttcaggccacaaagcaaaaagttgcatagccacaacgaagatctagttggatatagtttttgatttaagttgcagttatagccaatttaggctaatgcttggttttggagcttttatacacaacgtttttgttaggcatcacagttttgcaacctctgctccaaagagaaaaatagaatgagttttctttctttttttttttttggagtcagagtctcgctctcttgtccaggctggagtgcaatagcgcgatctgggctcactgcaacctccgcctccctggttcaagcaattctcctgccttgcctcctgagtagctgggattacaggcgtgtgtcaccacgctcggctaatttttgtatttttagtagagacagggtttcaccatgtcaagctggtcttggactcctgacgtcgtgatccacccgccttggcctcccaaagtactgggattacaggcgtgagccactgtgcctggctgagttttcttaaagtgagcttaatttctgaactcttagtgattcatatatgtacataaatctgtgatcccatttcttattgcaccattcaggaacactttatataaatgagtggctttttatttcatattattagtagtatcatggttccattacaggcctattaacatcatacattgtcattagtctttgaagaaaaaatatgtaaatatatatgtgtaacatgagaatttctctctaaagcagggcttaaaattttttggaaaagtttgacaaagcataccacatgaattcagatttacctcaatgctaagaattatgtttagttaggaaaaaggaaagtcattttgacctcaggtagaaaaatagattgctttgagttttatgtagctttagactttaaaaagttagaatttattctgtaactaaaaattatttgaaaaaattatgcctctggtttaattattggtgattacacactctttctcttacccttgtgtattgaactatgtccataatcaagttgatgtggatcctgaaaagtgttatgaacatctgattggtatttgtcacatttattttaaaattagcatctgaacacttcaaagctgtcagtgtgtattggtttcaccaataaccactgcttgatccttacaattaaattttttaactaacaaaaaaaaaaaaaacaacacaatacactcacaaaaacgctcgccccgaagcagcgaccgcgccccacacaacacccgcagaccaaaaacgcacacgagaccgaagcagaacaacaacaaagtagcgaccacgcgaaagctgacggaacacaaaaaaagagcgtgcgcgacatgcgccccgcaagagcaactacaacaacaatggtggtggcggccgagcaggcccaagcataaaagatagaagaccgactgcctgccgagacaaacgccggggccgacagatgagcggtgtaggccaccaacaagaaacaccgcgcgcccggctcatccagccaaacaacgggggg

SEQ ID NO: 286085 - DNA, 2357 bp, Homo sapiens
cgcgcgaggcgcgactagggtgcagcgccaggtccggtgttggggtgtccgagttgccgccggagaggagtggcctcgcccgcttgagttttgattcatcatggataatctgtcatcagaagaaattcaacagagagctcaccagattactgatgagtctctggaaagtacgaggagaatcctgggtttagccattgagtctcaggatgcaggaatcaagaccatcactatgctggatgaacaaaaggaacaactaaaccgcatagaagaaggcttggaccaaataaataaggacatgagagagacagagaagactttaacagaactcaacaaatgctgtggcctttgtgtctgcccatgtaataggctgacaccaacagagatcgtattgatattgccaatgccagagcaaagaaactcattgacagctaaagctactgctgttcttctttatcatttattcacttccgtagctcctccttgaaagttattaccttttcagagtttaagttttcggttccacgctcttctaattgggagataatatggaagaagggccagagcagttacagccctccttcttttttgttttctgttgagggccgactgctgctctgccttccttctagtattttctttctcaattcatacgcttagattggttttcatatgtcatgtttagtgttttcatcctcctcatatacttcagcaggttcttttgctttcaagatttggaagcattgccaaagacagccatgaagaaggaagctgtagaggtgttttttgttgttgtttatttttgcttttgtggttgagggaaggacaagagataagaggttgttacctcagtaaaaaccttcaggccacaaagcaaaaagttgcatagccacaacgaagatctagttggatatagtttttgatttaagttgcagttatagccaatttaggctaatgcttggttttggagcttttatacacaacgtttttgttaggcatcacagttttgcaacctctgctccaaagagaaaaatagaatgagttttctttctttttttttttttggagtcagagtctcgctctcttgtccaggctggagtgcaatagcgcgatctgggctcactgcaacctccgcctccctggttcaagcaattctcctgccttgcctcctgagtagctgggattacaggcgtgtgtcaccacgctcggctaatttttgtatttttagtagagacagggtttcaccatgtcaagctggtcttggactcctgacgtcgtgatccacccgccttggcctcccaaagtactgggattacaggcgtgagccactgtgcctggctgagttttcttaaagtgagcttaatttctgaactcttagtgattcatatatgtacataaatctgtgatcccatttcttattgcaccattcaggaacactttatataaatgagtggctttttatttcatattattagtagtatcatggttccattacaggcctattaacatcatacattgtcattagtctttgaagaaaaaatatgtaaatatatatgtgtaacatgagaatttctctctaaagcagggcttaaaattttttggaaaagtttgacaaagcataccacatgaattcagatttacctcaatgctaagaattatgtttagttaggaaaaaggaaagtcattttgacctcaggtagaaaaatagattgctttgagttttatgtagctttagactttaaaaagttagaatttattctgtaactaaaaattatttgaaaaaattatgcctctggtttaattattggtgattacacactctttctcttacccttgtgtattgaactatgtccataatcaagttgatgtggatcctgaaaagtgttatgaacatctgattggtatttgtcacatttattttaaaattagcatctgaacacttcaaagctgtcagtgtgtattggtttcaccaataaccactgcttgatccttacaattaaattttttaactaacaaaaaaaaaaaaaacaacacaatacactcacaaaaacgctcgccccgaagcagcgaccgcgccccacacaacacccgcagaccaaaaacgcacacgagaccgaagcagaacaacaacaaagtagcgaccacgcgaaagctgacggaacacaaaaaaagagcgtgcgcgacatgcgccccgcaagagcaactacaacaacaatggtggtggcggccgagcaggcccaagcataaaagatagaagaccgactgcctgccgagacaaacgccggggccgacagatgagcggtgtaggccaccaacaagaaacaccgcgcgcccggctcatccagccaaacaacgggggg

SEQ ID NO: 286086 - DNA, 1464 bp, Homo sapiens
cgcgcgaggcgcgactagggtgcagcgccaggtccggtgttggggtgtccgagttgccgccggagaggagtggcctcgcccgcttgagttttgattcatcatggataatctgtcatcagaagaaattcaacagagagctcaccagattactgatgagtctctggaaagtacgaggagaatcctgggtttagccattgagtctcaggatgcaggaatcaagaccatcactatgctggatgaacaaaaggaacaactaaaccgcatagaagaaggcttggaccaaataaataaggacatgagagagacagagaagactttaacagaactcaacaaatgctgtggcctttgtgtctgcccatgtaatagaacaaagaactttgagtctggcaaggcttataagacaacatggggagatggtggagaaaactcaccttgcaatgtagtatctaaacagccaggcccggtgacaaatggtcagcttcagcaaccaacaacgggagcagccagtggtggatacattaaacgcataactaatgatgccagagaagatgaaatggaagagaacctgactcaagtgggcagtatcctgggaaatctaaaagacatggccctgaacataggcaatgagattgatgctcaaaatccacaaataaaacgaatcacagacaaggctgacaccaacagagatcgtattgatattgccaatgccagagcaaagaaactcattgacagctaaagctactgctgttcttctttatcatttattcacttccgtagctcctccttgaaagttattaccttttcagagtttaagttttcggttccacgctcttctaattgggagataatatggaagaagggccagagcagttacagccctccttcttttttgttttctgttgagggccgactgctgctctgccttccttctagtattttctttctcaattcatacgcttagattggttttcatatgtcatgtttagtgttttcatcctcctcatatacttcagcaggttcttttgctttcaagatttggaagcattgccaaagacagccatgaagaaggaagctgtagaggtgttttttgttgttgtttatttttgcttttgtggttgagggaaggacaagagataagaggttgttacctcagtaaaaaccttcaggccacaaagcaaaaagttgcatagccacaacgaagatctagttggatatagtttttgatttaagttgcagttatagccaatttaggctaatgcttggttttggagcttttatacacaacgtttttgttaggctggagtgcaatggcgcgatgatgggagtccatagcgatgatgggagtccatagcgatgatgggagtccatggcgatgatgggagtccatagcgatgatgggagtccatagcgatgatgggagtccatagcgatgatgggagtccatagcgatgatgggagtccata

SEQ ID NO: 286087 - DNA, 1695 bp, Homo sapiens
cgcgcgaggcgcgactagggtgcagcgccaggtccggtgttggggtgtccgagttgccgccggagaggagtggcctcgcccgcttgagttttgattcatcatggataatctgtcatcagaagaaattcaacagagagctcaccagattactgatgagtctctggaaagtacgaggagaatcctgggtttagccattgagtctcaggatgcaggaatcaagaccatcactatgctggatgaacaaaaggaacaactaaaccgcatagaagaaggcttggaccaaataaataaggacatgagagagacagagaagactttaacagaactcaacaaatgctgtggcctttgtgtctgcccatgtaatagaacaaagaactttgagtctggcaaggcttataagacaacatggggagatggtggagaaaactcacctttgcaatagcgcgatctgggctcactgcaacctccgcctccctggttcaagcaattctcctgccttgcctcctgagtagctgggattacaggcgtgtgtcaccacgctcggctaatttttgtatttttagtagagacagggtttcaccatgtcaagctggtcttggactcctgacgtcgtgatccacccgccttggcctcccaaagtactgggattacaggcgtgagccactgtgcctggctgagttttcttaaagtgagcttaatttctgaactcttagtgattcatatatgtacataaatctgtgatcccatttcttattgcaccattcaggaacactttatataaatgagtggctttttatttcatattattagtagtatcatggttccattacaggcctattaacatcatacattgtcattagtctttgaagaaaaaatatgtaaatatatatgtgtaacatgagaatttctctctaaagcagggcttaaaattttttggaaaagtttgacaaagcataccacatgaattcagatttacctcaatgctaagaattatgtttagttaggaaaaaggaaagtcattttgacctcaggtagaaaaatagattgctttgagttttatgtagctttagactttaaaaagttagaatttattctgtaactaaaaattatttgaaaaaattatgcctctggtttaattattggtgattacacactctttctcttacccttgtgtattgaactatgtccataatcaagttgatgtggatcctgaaaagtgttatgaacatctgattggtatttgtcacatttattttaaaattagcatctgaacacttcaaagctgtcagtgtgtattggtttcaccaataaccactgcttgatccttacaattaaattttttaactaacaaaaaaaaaaaaaacaacacaatacactcacaaaaacgctcgccccgaagcagcgaccgcgccccacacaacacccgcagaccaaaaacgcacacgagaccgaagcagaacaacaacaaagtagcgaccacgcgaaagctgacggaacacaaaaaaagagcgtgcgcgacatgcgccccgcaagagcaactacaacaacaatggtggtggcggccgagcaggcccaagcataaaagatagaagaccgactgcctgccgagacaaacgccggggccgacagatgagcggtgtaggccaccaacaagaaacaccgcgcgcccggctcatccagccaaacaacgggggg

SEQ ID NO: 286088 - DNA, 1322 bp, Homo sapiens
agctgggcgcggtagctcacttctgtaatcccagcactttgggaggccgaggcaggcggatcacgaggtcaggagatcgagaccatccctggctaacacggtgaaaccctgtctctactaaaaatacaaaaaattatagctgggattacaggcgtgtgtcaccacgctcggctaatttttgtatttttagtagagacagggtttcaccatgtcaagctggtcttggactcctgacgtcgtgatccacccgccttggcctcccaaagtactgggattacaggcgtgagccactgtgcctggctgagttttcttaaagtgagcttaatttctgaactcttagtgattcatatatgtacataaatctgtgatcccatttcttattgcaccattcaggaacactttatataaatgagtggctttttatttcatattattagtagtatcatggttccattacaggcctattaacatcatacattgtcattagtctttgaagaaaaaatatgtaaatatatatgtgtaacatgagaatttctctctaaagcagggcttaaaattttttggaaaagtttgacaaagcataccacatgaattcagatttacctcaatgctaagaattatgtttagttaggaaaaaggaaagtcattttgacctcaggtagaaaaatagattgctttgagttttatgtagctttagactttaaaaagttagaatttattctgtaactaaaaattatttgaaaaaattatgcctctggtttaattattggtgattacacactctttctcttacccttgtgtattgaactatgtccataatcaagttgatgtggatcctgaaaagtgttatgaacatctgattggtatttgtcacatttattttaaaattagcatctgaacacttcaaagctgtcagtgtgtattggtttcaccaataaccactgcttgatccttacaattaaattttttaactaacaaaaaaaaaaaaaacaacacaatacactcacaaaaacgctcgccccgaagcagcgaccgcgccccacacaacacccgcagaccaaaaacgcacacgagaccgaagcagaacaacaacaaagtagcgaccacgcgaaagctgacggaacacaaaaaaagagcgtgcgcgacatgcgccccgcaagagcaactacaacaacaatggtggtggcggccgagcaggcccaagcataaaagatagaagaccgactgcctgccgagacaaacgccggggccgacagatgagcggtgtaggccaccaacaagaaacaccgcgcgcccggctcatccagccaaacaacgggggg

SEQ ID NO: 286089 - DNA, 1475 bp, Homo sapiens
ccaaggtacagtggtatttcttactttgggattctgctccctccatgaggtatctaaaatgttgatgaattgctaatacctggatttcccaggagtgtaactaacattatctgggaagaatgaatctgaatcagcttctccttggaatccagcatcctagtcccagcgcttgggaatactacttttccagccatggtctttcttgagttgctgttaccagtgaaaccttgggctgcccccaggtgtgtttagcccagaggagaggactttcttgccctttctttccatcttttagctccttatcatatactggttcagttgtacccttttaccttacccatttctactatcatggaggttcagaattcacatctgaattcaaaagataattgggagccaggcatggtggtgtgtgcttaataatcccagttacccaggagccactgtgcctggctgagttttcttaaagtgagcttaatttctgaactcttagtgattcatatatgtacataaatctgtgatcccatttcttattgcaccattcaggaacactttatataaatgagtggctttttatttcatattattagtagtatcatggttccattacaggcctattaacatcatacattgtcattagtctttgaagaaaaaatatgtaaatatatatgtgtaacatgagaatttctctctaaagcagggcttaaaattttttggaaaagtttgacaaagcataccacatgaattcagatttacctcaatgctaagaattatgtttagttaggaaaaaggaaagtcattttgacctcaggtagaaaaatagattgctttgagttttatgtagctttagactttaaaaagttagaatttattctgtaactaaaaattatttgaaaaaattatgcctctggtttaattattggtgattacacactctttctcttacccttgtgtattgaactatgtccataatcaagttgatgtggatcctgaaaagtgttatgaacatctgattggtatttgtcacatttattttaaaattagcatctgaacacttcaaagctgtcagtgtgtattggtttcaccaataaccactgcttgatccttacaattaaattttttaactaacaaaaaaaaaaaaaacaacacaatacactcacaaaaacgctcgccccgaagcagcgaccgcgccccacacaacacccgcagaccaaaaacgcacacgagaccgaagcagaacaacaacaaagtagcgaccacgcgaaagctgacggaacacaaaaaaagagcgtgcgcgacatgcgccccgcaagagcaactacaacaacaatggtggtggcggccgagcaggcccaagcataaaagatagaagaccgactgcctgccgagacaaacgccggggccgacagatgagcggtgtaggccaccaacaagaaacaccgcgcgcccggctcatccagccaaacaacgggggg

SEQ ID NO: 286090 - DNA, 890 bp, Homo sapiens
cgcgcgaggcgcgactagggtgcagcgccaggtccggtgttggggtgtccgagttgccgccggagaggagtggcctcgcccgcttgagttttgattcatcatggataatctgtcatcagaagaaattcaacagagagctcaccagattactgatgagtctctggaaagtacgaggagaatcctgggtttagccattgagtctcaggatgcaggaatcaagaccatcactatgctggatgaacaaaaggaacaactaaaccgcatagaagaaggcttggaccaaataaataaggacatgagagagacagagaagactttaacagaactcaacaaatgctgtggcctttgtgtctgcccatgtaatagaacaaagaactttgagtctggcaaggcttataagacaacatggggagatggtggagaaaactcaccttgcaatgtagtatctaaacagccaggcccggtgacaaatggtcagcttcagcaaccaacaacgggagcagccagtggtggatacattaaacgcataactaatgatgccagagaagatgaaatggaagagaacctgactcaagtgggcagtatcctgggaaatctaaaagacatggccctgaacataggcaatgagattgatgctcaaaatccacaaataaaacgaatcacagacaagcaagcagacagatctgggaatcactgaggatgctctggggaagcatgctgagctcaagacaattctcttccaggcgaagaattttaaggcgtggacagcaagatatcttcactgagatctgagatatctattgaaaaaccacaaaagaataacaggaaaaagcataagcactatactggttacttttagtacattaaaacaaaacaaaaatctttaaaaa

SEQ ID NO: 286091 - DNA, 2048 bp, Homo sapiens
cgcgcgaggcgcgactagggtgcagcgccaggtccggtgttggggtgtccgagttgccgccggagaggagtggcctcgcccgcttgagttttgattcatcatggataatctgtcatcagaagaaattcaacagagagctcaccagattactgatgagtctctggaaagtacgaggagaatcctgggtttagccattgaggtaagaaaatgttagtcatcaacttaagtatagaaatttataggagcgatcctaatacttctggctggaattagtattaaagggtaatgtatcaatatgctttattatttgaaattaacagttgctgaaatgtcaaaccatgcactaatgggaattttctgtttttccctttaacagtattggaatatgacagggaagatgaattcactatgagtttgtgacttaattattttgggggctgctatgttaaagtgtgttagtttaagaatactagttctgtctgtagctctaatcctctgagagcttgggtttctaaattattctgtgttgctcttgtaggttttgtttctgttgtttttggtttgttttgttgtactatcagcttttccccccttgtcttagtctcaggatgcaggaatcaagaccatcactatgctggatgaacaaaaggaacaactaaaccgcatagaagaaggcttggaccaaataaataaggacatgagagagacagagaagactttaacagaactcaacaaatgctgtggcctttgtgtctgcccatgtaatagattctcagatgttggttgtttctatgaaaccaggcagggaaattggaatgcattatgtttttaaaactttaaacctgcttctgttctgtttgactggcatttactattttctgcatttcattctctcacctaatctcttcctttctaatctgcttactaaaaatgaagatttaacatcagaagccgggctcagtaactgatcaaagggaactttaagatgcagtcttgtggcgcagtttgggctgctaacctgctatctaaaggtgatgcttcaaatggcttttctgtgcatgtgcatggattttgtgaatggtgaaaactgtctctaaactgtgtggtggtgtgtagtgtaaagtgaatttgttcttgatgggtgctatctcacaaaagatggacttgacaaaaggaccttaatttataataccatcctttgacaaatgtctctgataactaagtttttgctaaataacatttaagattaccaaaataacaatactcctggagtttcttaagaaatttaaaataggttgatctttgagacagctgctgcagtctagttctgataaaaggtaagggaagtcatgctaaatgcttctctgtcttcatagactttgattttagcatcctgtcttccattaagtttccctacttttttctggttcttgagtcaagatttcctctattaaagttttgcttctaatgattaggattacccatgatttaggccactaccaaattaaggaatcaattgccagtctagtcgtctcaaatcctatttggaacaaggtgggatataaaattttaaatgctaccatatctggtatcttctttccttaaataagggtttcccctctacatatgttataaactattctataattcctgttacatcatgtgttaacttgctgtgatttcatgttgaattaatacaaaactaactaatattaatttttcatgggaggtaagttttgtcagcttactgtttattattgtgtctgactcttaagtttagatctttatgagaattatgaacatgattaaatgttaaaaaattaagtatttgatttctaccctttgtttcctgccctccttttttcttcttttcttagtttgactatccaaagcatacacacactcacattcactctttattattagttaatagttatttggtcccttttctccttgatgtgaaatagtcacagctaatatttagttttatttttgctatttttaattcagttaaaactaatattgatgcaaccaaaactaaaaaaaaa

SEQ ID NO: 286092 - DNA, 695 bp, Homo sapiens
  misc_feature (695)..(695): n is a, c, g, or t
cgcgcgaggcgcgactagggtgcagcgccaggtccggtgttggggtgtccgagttgccgccggagaggagtggcctcgcccgcttgagttttgattcatcatggataatctgtcatcagaagaaattcaacagagagctcaccagattactgatgagtctctggaaagtacgaggagaatcctgggtttagccattgagtctcaggatgcaggaatcaagaccatcactatgctggatgaacaaaaggaacaactaaaccgcatagaagaaggcttggaccaaataaataaggacatgagagagacagagaagactttaacagaactcaacaaatgctgtggcctttgtgtctgcccatgtaatagaacaaagaactttgagtctggcaaggcttataagacaacatggggagatggtggagaaaactcaccttgcaatgtagtatctaaacagccaggcccggtgacaaatggtcagcttcagcaaccaacaacgggagcagccagtggtggatacattaaacgcataactaatgatgccagagaagatgaaatggaagagaacctgactcaagtgggcagtatcctgggaaatctaaaagacatggccctgaacataggcaatgagattgatgctcaaaatcggttatattgcccatgccgggcaaagaaactaatggccggtaaaggttctn

SEQ ID NO: 286093 - DNA, 586 bp, Homo sapiens
cgcgcgaggcgcgactagggtgcagcgccaggtccggtgttggggtgtccgagttgccgccggagaggagtggcctcgcccgcttgagttttgattcatcatggataatctgtcatcagaagaaattcaacagagagctcaccagattactgatgagtctctggaaagtacgaggagaatcctgggtttagccattgagtctcaggatgcaggaatcaagaccatcactatgctggatgaacaaaaggaacaactaaaccgcatagaagaaggcttggaccaaataaataaggacatgagagagacagagaagactttaacagaactcaacaaatgctgtggcctttgtgtctgcccatgtaatagcaagcagacagatctgggaatcactgaggatgctctggggaagcatgctgagctcaagacaattctcttccaggcgaagaattttaaggcgtggacagcaagatatcttcactgagatctgagatatctattgaaaaaccacaaaagaataacaggaaaaagcataagcactatactggttacttttagtacattaaaacaaaacaaaaatctttaaaaa

SEQ ID NO: 286094 - DNA, 380 bp, Homo sapiens
cctcaggtcatcgcccacctcggcctcccaaagtgctgggatcacaggcgtgagccaccatacccagccatatacaagctttttagaacaaatttttccacagcaagaggctaggtgcctccggatcagtacgtgaaagattgttatcatgttgaatcgcttctaataccttttgacactgacatactcactgtggggagttattggtagattcaaggttgaagtttgctgttccataataatagcattttctggttgacactgtgaatggaacacaaagtgttaacttcacaacttattcttagaacaactaaaccgcatagaagaaggcttggaccaaataaataaggacatgagagagacagagaagactttaacag

SEQ ID NO: 286095 - DNA, 1944 bp, Homo sapiens
gagttccacatctgatacccaggagtctccagcttccaagagaggtcgggtcacagccagcagctatgtctgacataaatcttgactgggttgacaggcgtcagttgcagcgcttggaggaaatgctgattgttgtggatgagaatgataaggttattggtgccgacaccaagaggaattgccatctgaacgaaaacattgagaaagggctgctgcaccgagccttcagcgttgtcttgtttaacaccaagaatcgaatcctgatacagcagaggtcggacacgaaagtcacgtttcctgggtattttaccgactcctgtagtagccacccattatacaacccagcagaactggaagaaaaggatgccatcggagtgaggagggcagcccagaggcgtctgcaagcagagctgggaattcctggggaacagatttctccagaggacattgtgttcatgacaatctatcaccacaaggcaaaatcagacagaatttggggagagcatgaaatttgttaccttctgcttgtgaggaaaaacgtcactctgaacccggatcccagtgaaacgaaaagcatcctctacctgtcccaggaggagctgtgggagctgctggagagggaggcgaggggtgaagtcaaagtcaccccctggctaagaaccattgccgagaggtttctgtaccggtggtggcctcacctggatgacgtgaccccgtttgtggagcttcacaaaatacacagagtgtgagaggcagggaggtcgagtcagccatgtgtaatgccctcagtgcaggcagacgcaccattgaggcaatgatacaccctctccaaaaaacagggcaaaaggggcacttgattgcccatcatgtataaatcactatttcaaccttttcatcaactttgtcatatcttcattttcccttttccttatttccatatttctcatctgcctggttgcagggaggaaatttaacatttcctttgtcccaatttccattttataagcacttgtttgattaacagcagctgatcctgaaagtcttggggagatcttgagagtcctgaagcaggcagactagcctggctggaccatgaggctgtctccccacagctttatccaagcctccaaggtcaggatgggatctctgtatcatgtttttctttttaaatcacttatttcagagtgcaacacaaggctgcatttttaaaaaaaaagacacattcaatcttgcatcctaatacaagcagtacggaagatgcgtatgatctcagccaagtgactcgacgtttatccacttctgttcatttgatcgtttcagtaatatgcttacaaataaagacatacttgctttaaaacatactgttgttgtttaacacaaagtaaactatatgttaagttttggtgtttaatacagagaaagaatttcaaaaaccagacctggtattttttttttttttttcacacggagtctctctctgtcacccaggctggagtgcagtggcacgatctcggctcactgcaacctccgcctctgggctcaagcaattctcctgccttagcctcccgagcagctaggattacagatgcccaccaccacgcatggctaatttttgtatttttagtagagatggggtttcaccatgttggccaggctggtctcgaactcctgacctcctgatctgcccacctcggcctcccaaagtgctggaactacaggcttgagcccctgcgcccagcccagccctggtaaatttttaaaattgccacatgtaatccagaagtgtgattaactaaagtcctttcctcagctataatgttgattgtgtgacttgataacttatccgtggtggctcttggacccctgtgtgtctttggagctccaggagcacacggacccctgggcaggtccctccgaccccacagctcttcaccccaacgctcc

SEQ ID NO: 286096 - DNA, 1353 bp, Homo sapiens
gagttccacatctgatacccaggagtctccagcttccaagagaggtcgggtcacagccagcagctatgtctgacataaatcttgactgggttgacaggcgtcagttgcagcgcttggaggaaatgctgattgttgtggatgagaatgataaggttattggtgccgacaccaagaggaattgccatctgaacgaaaacattgagaaagggctgctgcaccgagccttcagcgttgtcttgtttaacaccaagaatcgaatcctgatacagcagaggtcggacacgaaagtcacgtttcctgggtattttaccgactcctgtagtagccacccattatacaacccagcagaactggaagaaaaggatgccatcggagtgaggagggcagcccagaggcgtctgcaagcagagctgggaattcctggggaacagatttctccagaggacattgtgttcatgacaatctatcaccacaaggcaaaatcagacagaatttggggagagcatgaaatttgttaccttctgcttgtgaggaaaaacgtcactctgaacccggatcccagtgaaacgaaaagcatcctctacctgtcccaggaggagctgtgggagctgctggagagggaggcgaggggtgaagtcaaagtcaccccctggctaagaaccattgccgagaggtttctgtaccggtggtggcctcacctggatgacgtgaccccgtttgtggagcttcacaaaatacacagagtgtgagaggcagggaggtcgagtcagccatgtgtaatgccctcagtgcaggcagacgcaccattgaggcaatgatacaccctctccaaaaaacagggcaaaaggggcacttgattgcccatcatgtataaatcactatttcaaccttttcatcaactttgtcatatcttcattttcccttttccttatttccatatttctcatctgcctggttgcagggaggaaatttaacatttcctttgtcccaatttccattttataagcacttgtttgattaacagcagctgatcctgaaagtcttggggagatcttgagagtcctgaagcaggcagactagcctggctggaccatgaggctgtctccccacagctttatccaagcctccaaggtcaggatgggatctctgtatcatgtttttctttttaaatcacttatttcagagtgcaacacaaggctgcatttttaaaaaaaaagacacattcaatcttgcatcctaatacaagcagtacggaagatgcgtatgatctcagccaagtgactcgacgtttatccacttctgttcatttgatcgtttcagtaatatgcttacaaataaagacatacttgcttt

SEQ ID NO: 286097 - DNA, 1668 bp, Homo sapiens
tttttttttatcagcagttccatccttgagttgctgctctatgcttgcatgtgttcattttctgaggaaaacaaatgtgtttattttctctatttttctgtaaattctgtgttttacattagcgttgttaacactgcaccaatttctgtcaatagatttctccagaggacattgtgttcatgacaatctatcaccacaaggcaaaatcagacagaatttggggagagcatgaaatttgttaccttctgcttgtgaggaaaaacgtcactctgaacccggatcccagtgaaacgaaaagcatcctctacctgtcccaggaggagctgtgggagctgctggagagggaggcgaggggtgaagtcaaagtcaccccctggctaagaaccattgccgagaggtttctgtaccggtggtggcctcacctggatgacgtgaccccgtttgtggagcttcacaaaatacacagagtgtgagaggcagggaggtcgagtcagccatgtgtaatgccctcagtgcaggcagacgcaccattgaggcaatgatacaccctctccaaaaaacagggcaaaaggggcacttgattgcccatcatgtataaatcactatttcaaccttttcatcaactttgtcatatcttcattttcccttttccttatttccatatttctcatctgcctggttgcagggaggaaatttaacatttcctttgtcccaatttccattttataagcacttgtttgattaacagcagctgatcctgaaagtcttggggagatcttgagagtcctgaagcaggcagactagcctggctggaccatgaggctgtctccccacagctttatccaagcctccaaggtcaggatgggatctctgtatcatgtttttctttttaaatcacttatttcagagtgcaacacaaggctgcatttttaaaaaaaaagacacattcaatcttgcatcctaatacaagcagtacggaagatgcgtatgatctcagccaagtgactcgacgtttatccacttctgttcatttgatcgtttcagtaatatgcttacaaataaagacatacttgctttaaaacatactgttgttgtttaacacaaagtaaactatatgttaagttttggtgtttaatacagagaaagaatttcaaaaaccagacctggtattttttttttttttttcacacggagtctctctctgtcacccaggctggagtgcagtggcacgatctcggctcactgcaacctccgcctctgggctcaagcaattctcctgccttagcctcccgagcagctaggattacagatgcccaccaccacgcatggctaatttttgtatttttagtagagatggggtttcaccatgttggccaggctggtctcgaactcctgacctcctgatctgcccacctcggcctcccaaagtgctggaactacaggcttgagcccctgcgcccagcccagccctggtaaatttttaaaattgccacatgtaatccagaagtgtgattaactaaagtcctttcctcagctataatgttgattgtgtgacttgataacttatccgtggtggctcttggacccctgtgtgtctttggagctccaggagcacacggacccctgggcaggtccctccgaccccacagctcttcaccccaacgctcc

SEQ ID NO: 286098 - DNA, 1077 bp, Homo sapiens
tttttttttatcagcagttccatccttgagttgctgctctatgcttgcatgtgttcattttctgaggaaaacaaatgtgtttattttctctatttttctgtaaattctgtgttttacattagcgttgttaacactgcaccaatttctgtcaatagatttctccagaggacattgtgttcatgacaatctatcaccacaaggcaaaatcagacagaatttggggagagcatgaaatttgttaccttctgcttgtgaggaaaaacgtcactctgaacccggatcccagtgaaacgaaaagcatcctctacctgtcccaggaggagctgtgggagctgctggagagggaggcgaggggtgaagtcaaagtcaccccctggctaagaaccattgccgagaggtttctgtaccggtggtggcctcacctggatgacgtgaccccgtttgtggagcttcacaaaatacacagagtgtgagaggcagggaggtcgagtcagccatgtgtaatgccctcagtgcaggcagacgcaccattgaggcaatgatacaccctctccaaaaaacagggcaaaaggggcacttgattgcccatcatgtataaatcactatttcaaccttttcatcaactttgtcatatcttcattttcccttttccttatttccatatttctcatctgcctggttgcagggaggaaatttaacatttcctttgtcccaatttccattttataagcacttgtttgattaacagcagctgatcctgaaagtcttggggagatcttgagagtcctgaagcaggcagactagcctggctggaccatgaggctgtctccccacagctttatccaagcctccaaggtcaggatgggatctctgtatcatgtttttctttttaaatcacttatttcagagtgcaacacaaggctgcatttttaaaaaaaaagacacattcaatcttgcatcctaatacaagcagtacggaagatgcgtatgatctcagccaagtgactcgacgtttatccacttctgttcatttgatcgtttcagtaatatgcttacaaataaagacatacttgcttt

SEQ ID NO: 286099 - DNA, 2101 bp, Homo sapiens
cccaagatttcccgttcagagagacaccacattagaaacagatgattcaccttccatatctcagaactgtgctgcttcaacacaattgctgtcacttgtagagaaggtgtatgctaaatcctaatgtggttggtaacacatagcaaaaacgagatggcaatatctttcacataaagaggcatttgtgtgcatctatttcaggtcgggtcacagccagcagctatgtctgacataaatcttgactgggttgacaggcgtcagttgcagcgcttggaggaaatgctgattgttgtggatgagaatgataaggttattggtgccgacaccaagaggaattgccatctgaacgaaaacattgagaaagggctgctgcaccgagccttcagcgttgtcttgtttaacaccaagaatcgaatcctgatacagcagaggtcggacacgaaagtcacgtttcctgggtattttaccgactcctgtagtagccacccattatacaacccagcagaactggaagaaaaggatgccatcggagtgaggagggcagcccagaggcgtctgcaagcagagctgggaattcctggggaacagatttctccagaggacattgtgttcatgacaatctatcaccacaaggcaaaatcagacagaatttggggagagcatgaaatttgttaccttctgcttgtgaggaaaaacgtcactctgaacccggatcccagtgaaacgaaaagcatcctctacctgtcccaggaggagctgtgggagctgctggagagggaggcgaggggtgaagtcaaagtcaccccctggctaagaaccattgccgagaggtttctgtaccggtggtggcctcacctggatgacgtgaccccgtttgtggagcttcacaaaatacacagagtgtgagaggcagggaggtcgagtcagccatgtgtaatgccctcagtgcaggcagacgcaccattgaggcaatgatacaccctctccaaaaaacagggcaaaaggggcacttgattgcccatcatgtataaatcactatttcaaccttttcatcaactttgtcatatcttcattttcccttttccttatttccatatttctcatctgcctggttgcagggaggaaatttaacatttcctttgtcccaatttccattttataagcacttgtttgattaacagcagctgatcctgaaagtcttggggagatcttgagagtcctgaagcaggcagactagcctggctggaccatgaggctgtctccccacagctttatccaagcctccaaggtcaggatgggatctctgtatcatgtttttctttttaaatcacttatttcagagtgcaacacaaggctgcatttttaaaaaaaaagacacattcaatcttgcatcctaatacaagcagtacggaagatgcgtatgatctcagccaagtgactcgacgtttatccacttctgttcatttgatcgtttcagtaatatgcttacaaataaagacatacttgctttaaaacatactgttgttgtttaacacaaagtaaactatatgttaagttttggtgtttaatacagagaaagaatttcaaaaaccagacctggtattttttttttttttttcacacggagtctctctctgtcacccaggctggagtgcagtggcacgatctcggctcactgcaacctccgcctctgggctcaagcaattctcctgccttagcctcccgagcagctaggattacagatgcccaccaccacgcatggctaatttttgtatttttagtagagatggggtttcaccatgttggccaggctggtctcgaactcctgacctcctgatctgcccacctcggcctcccaaagtgctggaactacaggcttgagcccctgcgcccagcccagccctggtaaatttttaaaattgccacatgtaatccagaagtgtgattaactaaagtcctttcctcagctataatgttgattgtgtgacttgataacttatccgtggtggctcttggacccctgtgtgtctttggagctccaggagcacacggacccctgggcaggtccctccgaccccacagctcttcaccccaacgctcc

SEQ ID NO: 286100 - DNA, 394 bp, Homo sapiens
cccaagatttcccgttcagagagacaccacattagaaacagatgattcaccttccatatctcagaactgtgctgcttcaacacaattgctgtcacttgtagagaaggtgtatgctaaatcctaatgtggttggtaacacatagcaaaaacgagatggcaatatctttcacataaagaggcatttgtgtgcatctatttcaggtcgggtcacagccagcagctatgtctgacataaatcttgactgggttgacaggcgtcagttgcagcgcttggaggaaatgctgattgttgtggatgagaatgataaggttattggtgccgacaccaagaggaactggacagagaatatgggcgggggctacctttctctatatctttcgtctcagatgcact

SEQ ID NO: 286101 - DNA, 139 bp, Homo sapiens
cttggaggaaatgctgattgttgtggatgagaatgataaggttattggtgccgacaccaagaggaattgccatctgaacgaaaacattgagaaaggtagcccccgcccattttctctgtccagttcccagggttttccc

SEQ ID NO: 286102 - DNA, 3237 bp, Homo sapiens
ggcctgagttcggggccagcagccgtctacccggtgtcgcgttctgtgttgtggcggccctggatccggcgtcagggcgaccgggcggacgaggtggagccagagtctgtcaggcgggttggtgaagggcgcggggccgggcacggcgttgggagtgcgcggcagggaccggccaggcgggctgcaggcacctcagagcccgggacaccccctcaacgtccgcaggcgcgatgaaggcactgatcttagtggggggctatgggacgcggctacggccgctgacgctgagcaccccgaagccactggtggacttctgcaataagcccatcttgctgcaccaagtggaggcgctagccgcggcaggcgtggaccacgtgatcctggccgtgagctacatgtcgcaggtgctggagaaggaaatgaaggcacaggagcagaggctgggaatccgaatctccatgtcccatgaagaggagcctttggggacagctgggcccctggcgctggcccgtgacctactctctgagactgcagaccctttcttcgtcctcaacagtgacgtgatctgcgatttccccttccaagccatggtgcagttccaccggcaccatggccaggagggctccatcctggtgaccaaggtggaggaaccctccaagtacggtgtggtggtgtgtgaggctgacacaggccgcattcaccggttcgtggagaagccacaggtgtttgtgtccaataagatcaacgcaggcatgtacatcctgagccctgcagtgctgcggcgcatccagctgcagcctacgtccattgagaaggaggtcttccccattatggccaaggaggggcagctatatgccatggagttacagggcttctggatggacattgggcagcccaaggacttcctcactggcatgtgcctcttcctgcagtcactgaggcagaagcagcctgagcggctgtgctcaggccctggcattgtgggcaacgtgctggtggacccaagtgcccgcatcggccagaactgcagcattggccccaatgtgagcctgggacctggcgtggtggtcgaagatggtgtgtgtatccggcggtgcacggtgctgcgggatgcccggatccgttcccattcctggcttgagtcctgcattgtgggctggcgctgccgcgtgggtcagtgggtaagcctgtgggctgggctgggtggggagaggggcggggagtgtgcctgcctccctgacaaggcctatcctctcctggaggtacgcatggagaacgtgacagtgctgggtgaggacgtcatagttaatgatgagctctacctcaacggagccagcgtgctgccccacaagtctattggcgagtcagtgccagagcctcgtatcatcatgtgaggggatgcagtggggctggccgagccccggttttcccatcagcaaggggagtgctggcctgacacatcagaagaccctggacttgtcattatttgtctggggggcactgggtgaagctgaagctgttggacacctgccttctcatgtggacatcatctggcaggatccctgctgggcacaccccacaaaccccactccctcaagaagggccagggccagggctgtatggaataataatttaatgctcactgtggccctgactgaaagtcaagctcaggcacaattagggccatggctgggctcccaccaatgaggatacaggcaggcaaggaggttggatgtggtggtgtgggatacaggagaagggcaaagggagctcataaatagggcccagcctggctctgggttcaaaggtggaggttccaggatggcacaggctgtgagggctaggcagctgaggaggtagtactcgtattggctcccttctcccagtcctctacagacacgatggtggttttgcagaagaagcagtccttgttgttcatcaggtgctggttgatacaggctctacaacaggggaggggatgaggactgccctgcatgtacctactgctctccccaccaccaagctgtggggcccacttacttgcaggacttgtggccacagggctggaacacagcagagatggggtgggcatagcagatggggcagaggtcctcctcactggtgggctgcagggaggagagtgaagggtgggctggagttggatgcctggctatgtggatgtccgttgtgcctgtgtaggagtgcacacatattcaagtggcatggacctgtgcaccgtgttcccactcaccagggaggcagctgctgcctgggcagatgcagaggtcaggtgcgccagcatctgttccacttgggccagctcatcggcactgatataatccgcatctggggagtggtaggtagtgtcaagtcagaggtagctgaggatgtgatgcctcttgaatattcccagcctaggactttgctgttcttaaggctcctgacccgacccagccccagatttccctgacctgccccaccagcccactcacagctctgcagggagaagcgcttccggtcaggggctggcagagcagtgccaggtgctgggggctctggctgtcccaggagatagcatattgagcgtagctggaagcagggatctgccaggagcactgatgtggcttgctctctcctaggtaggggagggtgcaagggcagtcagaaggcttggggcctggctaaaagtctctcttgggattgccaatgaggagtgccatggctcgtacatgatcaccccccctgcatcctttccgtctccctgcttcccaaaccccaagtcctgtattctagtaaggtgccacacagcctgtttttttttttttttttcttgagacgagtctcgctctgttgcccaggctggagtgcgatggcacgatctcggctcactgcaacctccacctcccgggttcaagtgattctcctgctttagcctcccgagtagctggaattgcagacgcccaccaccacgcccggctaattgttgttgtatttttagtagagacagggtttcaccaggttggccaggctggtctcgaattcctgacctcaggtgatccacctgccttggcttcccaaagtgctgggattacaggcgtgagccaccgcgcccggcctggggtaccactttaagaaggctcaggcgaaccaccttaagatagtgagagtctgcctgccccataatattatcagtccttcaaagtcacttcaaataaacactaacagcagcttggagac

SEQ ID NO: 286103 - DNA, 6131 bp, Homo sapiens
  misc_feature (5424)..(5424): n is a, c, g, or t
ggcctgagttcggggccagcagccgtctacccggtgtcgcgttctgtgttgtggcggccctggatccggcgtcagggcgaccgggcggacgaggtggagccagagtctgtcaggcgggcgcgatgaaggcactgatcttagtggggggctatgggacgcggctacggccgctgacgctgagcaccccgaagccactggtggacttctgcaataagcccatcttgctgcaccaagtggaggcgctagccgcggcaggcgtggaccacgtgatcctggccgtgagctacatgtcgcaggtgctggagaaggaaatgaaggcacaggagcagaggctgggaatccgaatctccatgtcccatgaagaggagcctttggggacagctgggcccctggcgctggcccgtgacctactctctgagactgcagaccctttcttcgtcctcaacagtgacgtgatctgcgatttccccttccaagccatggtgcagttccaccggcaccatggccaggagggctccatcctggtgaccaaggtggaggaaccctccaagtacggtgtggtggtgtgtgaggctgacacaggccgcattcaccggttcgtggagaagccacaggtgtttgtgtccaataagatcaacgcaggcatgtacatcctgagccctgcagtgctgcggcgcatccagctgcagcctacgtccattgagaaggaggtcttccccattatggccaaggaggggcagctatatgccatggagttacagggcttctggatggacattgggcagcccaaggacttcctcactggcatgtgcctcttcctgcagtcactgaggcagaagcagcctgagcggctgtgctcaggccctggcattgtgggcaacgtgctggtggacccaagtgcccgcatcggccagaactgcagcattggccccaatgtgagcctgggacctggcgtggtggtcgaagatggtgtgtgtatccggcggtgcacggtgctgcgggatgcccggatccgttcccattcctggcttgagtcctgcattgtgggctggcgctgccgcgtgggtcagtgggtacgcatggagaacgtgacagtgctgggtgaggacgtcatagttaatgatgagctctacctcaacggagccagcgtgctgccccacaagtctattggcgagtcagtgccagagcctcgtatcatcatgtgaggggatgcagtggggctggccgagccccggttttcccatcagcaaggggagtgctggcctgacacatcagaagaccctggacttgtcattatttgtctggggggcactgggtgaagctgaagctgttggacacctgccttctcatgtggacatcatctggcaggatccctgctgggcacaccccacaaaccccactccctcaagaagggccagggccagggctgtatggaataataatttaatgctcactgtggccctgactgaaagtcaagctcaggcacaattagggccatggctgggctcccaccaatgaggatacaggcaggcaaggaggttggatgtggtggtgtgggatacaggagaagggcaaagggagctcataaatagggcccagcctggctctgggttcaaaggtggaggttccaggatggcacaggctgtgagggctaggcagctgaggaggtagtactcgtattggctcccttctcccagtcctctacagacacgatggtggttttgcagaagaagcagtccttgttgttcatcaggtgctggttgatacaggctctacaacaggggaggggatgaggactgccctgcatgtacctactgctctccccaccaccaagctgtggggcccacttacttgcaggacttgtggccacagggctggaacacagcagagatggggtgggcatagcagatggggcagaggtcctcctcactggtgggctgcagggaggagagtgaagggtgggctggagttggatgcctggctatgtggatgtccgttgtgcctgtgtaggagtgcacacatattcaagtggcatggacctgtgcaccgtgttcccactcaccagggaggcagctgctgcctgggcagatgcagaggtcaggtgcgccagcatctgttccacttgggccagctcatcggcactgatataatccgcatctggggagtggtaggtagtgtcaagtcagaggtagctgaggatgtgatgcctcttgaatattcccagcctaggactttgctgttcttaaggctcctgacccgacccagccccagatttccctgacctgccccaccagcccactcacagctctgcagggagaagcgcttccggtcaggggctggcagagcagtgccaggtgctgggggctctggctgtcccaggagatagcatattgagcgtagctggaagcagggatctgccaggagcactgatgtggcttgctctctcctaggtaggggagggtgcaagggcagtcagaaggcttggggcctggctaaaagtctctcttgggattgccaatgaggagtgccatggctcgtacatgatcaccccccctgcatcctttccgtctccctgcttcccaaaccccaagtcctgtattctagtaaggtgccacacagcctgtttttttttttttttttcttgagacgagtctcgctctgttgcccaggctggagtgcgatggcacgatctcggctcactgcaacctccacctcccgggttcaagtgattctcctgctttagcctcccgagtagctggaattgcagacgcccaccaccacgcccggctaattgttgttgtatttttagtagagacagggtttcaccaggttggccaggctggtctcgaattcctgacctcaggtgatccacctgccttggcttcccaaagtgctgggattacaggcgtgagccaccgcgcccggcctggggtaccactttaagaaggctcaggcgaaccaccttaagatagtgagagtctgcctgccccataatattatcagtccttcaaagtcacttcaaataaacactaacagcagcttggagacattcttccagactcccccttttactccccgaggaaaaacgagcggcggagagctgccagccaaaggctgacggggactttggggttggccttgctccccatctggcggtcatgcggggccattgggcacaaagggatgtagccgccccgcctcctcaaacgggaaccaataggagcccgggccccgcccctggggggagtatttaggagccgatcaggaactcgcttggagagggctagcgaagccgaagggagcgcggctaagagtgccgcaccgcctcacaacctgggaaccggagagtaggggccgtcggctggcaagaacccgccgtgcctcctcggcaagggccatccggtgccacccatgtcgcactagagcagaagagggtgagtcctggaactgcaacctgcacagagctgctctgtactgtccctggtggtcgccgccatgacctggttggtgctgctggggacactgctctgcatgctgcgcgttgggttaggcaccccggactccgagggtttcccgccccgtgcgctccacaactgcccctacaaatgtatctgcgctgccgacctgctaagctgcactggcctagggctgcaggacgtgccagccgagttacctgccgctactgcggacctcgacctgagccacaacgcgctccagcgcctgcgccccggctggttggcgcccctcttccagctgcgcgccctgcacctagaccacaacgaactagatgcgctgggtcgcggcgtcttcgtcaacgccagcggcctgaggctgctcgatctatcatctaacacgttgcgggcgcttggccgccacgacctcgacgggctgggggcgctggagaagctgcttctgttcaataaccgcttggtgcacttggacgagcatgccttccacggcctgcgcgcgctcagccatctctacctgggctgcaacgaactcgcctcgttctccttcgaccacctgcacggtctgagcgccacccacctgcttactctggacctctcctccaaccggctgggacacatctccgtacctgagctggccgcgctgccggccttcctcaagaacggcctctacttgcacaacaaccctttgccttgcgactgccgcctctaccacctgctacagcgctggcaccagcggggcctgagcgccgtgcgcgactttgcgcgcgagtacgtatgcttggccttcaaggtacccgcgtcccgcgtgcgcttcttccagcacagccgcgtctttgagaactgctcgtcggccccagctcttggcctagagcggccggaagagcacctgtacgcgctggtgggtcggtccctgaggctttactgcaacaccagcgtcccggccatgcgcattgcctgggtttcgccgcagcaggagcttctcagggcgccaggatcccgcgatggcagcatcgcggtgctggccgacggcagcttggccataggcaacgtacaggagcagcatgcgggactcttcgtgtgcctggccactgggccccgcctgcaccacaaccagacgcacgagtacaacgtgagcgtgcactttccgcgcccagagcccgaggctttcaacacaggcttcaccacactgctgggctgtgccgtgggccttgtgctcgtgctgctctacctgttcgccccaccctgccgctgctgccgccgtgcctgccgctgccgccgctggccccaaacacccagcccgctccaagagctgagcgcacagtcctcagtactcagcaccacaccgccagacgcacccagccgcaaggccagcgtccacaagcacgtagtctttctggagccaggccggaggggcctcaatggccgcgtgcagctggcagtagctgaggaattcgatctctacaaccctggaggcctgcagctgaaggctggctctgagtccgccagctccataggctccgagggtcccatgacaacctagactgcccagggctcccccacccaggcccccaccctcttgctgctcgccctgctccctgcttcggtccagagaactggcagatactggtgggaagcactgtgcctggccccccagcttcctgtatgggcctcgaaacacaatgggccttctcgctcactggtagagacaggggttgtggtccccaacctgccttctgctctgcccctgcacaggacccaaaggccccaggccctgcaaggtgtgctagttcctgctttcccgcggacttcctagtgcccaaatgccctgtgaggctgagagacccaggcccctgtggctttcaacacagcacagctgtggaagtggctgtgttcttctacagcctgtggaagaacccctgtagcagagcctcccgtccaccctcaggggctgagncagctctcgaggagtggtgctcaagagctgacgcagggccacctccccttcccaagggggtgggagggagtgggcccacagggaaaagaaggcggctctgaaggaagatctcgcccacaccccaggacagaaagaggaaacaagcccgccctctggtgaaatgggactccctccatccaccaacacccaacctcctgaaagcttcacaacttcacgcagagtccggtgggcaggcaccaggcaggaaaggctcctcaagaggttcctggtggtctggcctaagccccagccagaggccctgctctctctggcctggggcatccacccgttgttctgaaggcagagcccattctgtgggctcacaagacacagtgaaggggatcatggcctgcacccctgcttttcagcagtaaaaagcccgaaaagcctggcgagcatggccgagctgggagggccgagccggaactccacgtccctcgagagcaggagcctcttaagggctggcactggtctcagcctaatggctgaggcggtaccctggcttcatatgcatctcactgctcccactgcaggggggcagggaaggggggtctgggagcccttcatgtgtgggggccgagctgggggcccccatggccatcctggacctcgctgctccagagtttaataaaggtagcacatgcttattgctagagcctttgcagaca

SEQ ID NO: 286104 - DNA, 3156 bp, Homo sapiens
ggcctgagttcggggccagcagccgtctacccggtgtcgcgttctgtgttgtggcggccctggatccggcgtcagggcgaccgggcggacgaggtggagccagagtctgtcaggcgggttggtgaagggcgcggggccgggcacggcgttgggagtgcgcggcagggaccggccaggcgggctgcaggcacctcagagcccgggacaccccctcaacgtccgcaggcgcgatgaaggcactgatcttagtggggggctatgggacgcggctacggccgctgacgctgagcaccccgaagccactggtggacttctgcaataagcccatcttgctgcaccaagtggaggcgctagccgcggcaggcgtggaccacgtgatcctggccgtgagctacatgtcgcaggtgctggagaaggaaatgaaggcacaggagcagaggctgggaatccgaatctccatgtcccatgaagaggagcctttggggacagctgggcccctggcgctggcccgtgacctactctctgagactgcagaccctttcttcgtcctcaacagtgacgtgatctgcgatttccccttccaagccatggtgcagttccaccggcaccatggccaggagggctccatcctggtgaccaaggtggaggaaccctccaagtacggtgtggtggtgtgtgaggctgacacaggccgcattcaccggttcgtggagaagccacaggtgtttgtgtccaataagatcaacgcaggcatgtacatcctgagccctgcagtgctgcggcgcatccagctgcagcctacgtccattgagaaggaggtcttccccattatggccaaggaggggcagctatatgccatggagttacagggcttctggatggacattgggcagcccaaggacttcctcactggcatgtgcctcttcctgcagtcactgaggcagaagcagcctgagcggctgtgctcaggccctggcattgtgggcaacgtgctggtggacccaagtgcccgcatcggccagaactgcagcattggccccaatgtgagcctgggacctggcgtggtggtcgaagatggtgtgtgtatccggcggtgcacggtgctgcgggatgcccggatccgttcccattcctggcttgagtcctgcattgtgggctggcgctgccgcgtgggtcagtgggtacgcatggagaacgtgacagtgctgggtgaggacgtcatagttaatgatgagctctacctcaacggagccagcgtgctgccccacaagtctattggcgagtcagtgccagagcctcgtatcatcatgtgaggggatgcagtggggctggccgagccccggttttcccatcagcaaggggagtgctggcctgacacatcagaagaccctggacttgtcattatttgtctggggggcactgggtgaagctgaagctgttggacacctgccttctcatgtggacatcatctggcaggatccctgctgggcacaccccacaaaccccactccctcaagaagggccagggccagggctgtatggaataataatttaatgctcactgtggccctgactgaaagtcaagctcaggcacaattagggccatggctgggctcccaccaatgaggatacaggcaggcaaggaggttggatgtggtggtgtgggatacaggagaagggcaaagggagctcataaatagggcccagcctggctctgggttcaaaggtggaggttccaggatggcacaggctgtgagggctaggcagctgaggaggtagtactcgtattggctcccttctcccagtcctctacagacacgatggtggttttgcagaagaagcagtccttgttgttcatcaggtgctggttgatacaggctctacaacaggggaggggatgaggactgccctgcatgtacctactgctctccccaccaccaagctgtggggcccacttacttgcaggacttgtggccacagggctggaacacagcagagatggggtgggcatagcagatggggcagaggtcctcctcactggtgggctgcagggaggagagtgaagggtgggctggagttggatgcctggctatgtggatgtccgttgtgcctgtgtaggagtgcacacatattcaagtggcatggacctgtgcaccgtgttcccactcaccagggaggcagctgctgcctgggcagatgcagaggtcaggtgcgccagcatctgttccacttgggccagctcatcggcactgatataatccgcatctggggagtggtaggtagtgtcaagtcagaggtagctgaggatgtgatgcctcttgaatattcccagcctaggactttgctgttcttaaggctcctgacccgacccagccccagatttccctgacctgccccaccagcccactcacagctctgcagggagaagcgcttccggtcaggggctggcagagcagtgccaggtgctgggggctctggctgtcccaggagatagcatattgagcgtagctggaagcagggatctgccaggagcactgatgtggcttgctctctcctaggtaggggagggtgcaagggcagtcagaaggcttggggcctggctaaaagtctctcttgggattgccaatgaggagtgccatggctcgtacatgatcaccccccctgcatcctttccgtctccctgcttcccaaaccccaagtcctgtattctagtaaggtgccacacagcctgtttttttttttttttttcttgagacgagtctcgctctgttgcccaggctggagtgcgatggcacgatctcggctcactgcaacctccacctcccgggttcaagtgattctcctgctttagcctcccgagtagctggaattgcagacgcccaccaccacgcccggctaattgttgttgtatttttagtagagacagggtttcaccaggttggccaggctggtctcgaattcctgacctcaggtgatccacctgccttggcttcccaaagtgctgggattacaggcgtgagccaccgcgcccggcctggggtaccactttaagaaggctcaggcgaaccaccttaagatagtgagagtctgcctgccccataatattatcagtccttcaaagtcacttcaaataaacactaacagcagcttggagac

SEQ ID NO: 286105 - DNA, 6239 bp, Homo sapiens
  misc_feature (5532)..(5532): n is a, c, g, or t
ggcctgagttcggggccagcagccgtctacccggtgtcgcgttctgtgttgtggcggccctggatccggcgtcagggcgaccgggcggacgaggtggagccagagtctgtcaggcgggttggtgaagggcgcggggccgggcacggcgttgggagtgcgcggcagggaccggccaggcgggctgcaggcacctcagagcccgggacaccccctcaacgtccgcaggcgcgatgaaggcactgatcttagtggggggctatgggacgcggctacggccgctgacgctgagcaccccgaagccactggtggacttctgcaataagcccatcttgctgcaccaagtggaggcgctagccgcggcaggcgtggaccacgtgatcctggccgtgagctacatgtcgcaggtgctggagaaggaaatgaaggcacaggagcagaggctgggaatccgaatctccatgtcccatgaagaggagcctttggggacagctgggcccctggcgctggcccgtgacctactctctgagactgcagaccctttcttcgtcctcaacagtgacgtgatctgcgatttccccttccaagccatggtgcagttccaccggcaccatggccaggagggctccatcctggtgaccaaggtggaggaaccctccaagtacggtgtggtggtgtgtgaggctgacacaggccgcattcaccggttcgtggagaagccacaggtgtttgtgtccaataagatcaacgcaggcatgtacatcctgagccctgcagtgctgcggcgcatccagctgcagcctacgtccattgagaaggaggtcttccccattatggccaaggaggggcagctatatgccatggagttacagggcttctggatggacattgggcagcccaaggacttcctcactggcatgtgcctcttcctgcagtcactgaggcagaagcagcctgagcggctgtgctcaggccctggcattgtgggcaacgtgctggtggacccaagtgcccgcatcggccagaactgcagcattggccccaatgtgagcctgggacctggcgtggtggtcgaagatggtgtgtgtatccggcggtgcacggtgctgcgggatgcccggatccgttcccattcctggcttgagtcctgcattgtgggctggcgctgccgcgtgggtcagtgggtacgcatggagaacgtgacagtgctgggtgaggacgtcatagttaatgatgagctctacctcaacggagccagcgtgctgccccacaagtctattggcgagtcagtgccagagcctcgtatcatcatgtgaggggatgcagtggggctggccgagccccggttttcccatcagcaaggggagtgctggcctgacacatcagaagaccctggacttgtcattatttgtctggggggcactgggtgaagctgaagctgttggacacctgccttctcatgtggacatcatctggcaggatccctgctgggcacaccccacaaaccccactccctcaagaagggccagggccagggctgtatggaataataatttaatgctcactgtggccctgactgaaagtcaagctcaggcacaattagggccatggctgggctcccaccaatgaggatacaggcaggcaaggaggttggatgtggtggtgtgggatacaggagaagggcaaagggagctcataaatagggcccagcctggctctgggttcaaaggtggaggttccaggatggcacaggctgtgagggctaggcagctgaggaggtagtactcgtattggctcccttctcccagtcctctacagacacgatggtggttttgcagaagaagcagtccttgttgttcatcaggtgctggttgatacaggctctacaacaggggaggggatgaggactgccctgcatgtacctactgctctccccaccaccaagctgtggggcccacttacttgcaggacttgtggccacagggctggaacacagcagagatggggtgggcatagcagatggggcagaggtcctcctcactggtgggctgcagggaggagagtgaagggtgggctggagttggatgcctggctatgtggatgtccgttgtgcctgtgtaggagtgcacacatattcaagtggcatggacctgtgcaccgtgttcccactcaccagggaggcagctgctgcctgggcagatgcagaggtcaggtgcgccagcatctgttccacttgggccagctcatcggcactgatataatccgcatctggggagtggtaggtagtgtcaagtcagaggtagctgaggatgtgatgcctcttgaatattcccagcctaggactttgctgttcttaaggctcctgacccgacccagccccagatttccctgacctgccccaccagcccactcacagctctgcagggagaagcgcttccggtcaggggctggcagagcagtgccaggtgctgggggctctggctgtcccaggagatagcatattgagcgtagctggaagcagggatctgccaggagcactgatgtggcttgctctctcctaggtaggggagggtgcaagggcagtcagaaggcttggggcctggctaaaagtctctcttgggattgccaatgaggagtgccatggctcgtacatgatcaccccccctgcatcctttccgtctccctgcttcccaaaccccaagtcctgtattctagtaaggtgccacacagcctgtttttttttttttttttcttgagacgagtctcgctctgttgcccaggctggagtgcgatggcacgatctcggctcactgcaacctccacctcccgggttcaagtgattctcctgctttagcctcccgagtagctggaattgcagacgcccaccaccacgcccggctaattgttgttgtatttttagtagagacagggtttcaccaggttggccaggctggtctcgaattcctgacctcaggtgatccacctgccttggcttcccaaagtgctgggattacaggcgtgagccaccgcgcccggcctggggtaccactttaagaaggctcaggcgaaccaccttaagatagtgagagtctgcctgccccataatattatcagtccttcaaagtcacttcaaataaacactaacagcagcttggagacattcttccagactcccccttttactccccgaggaaaaacgagcggcggagagctgccagccaaaggctgacggggactttggggttggccttgctccccatctggcggtcatgcggggccattgggcacaaagggatgtagccgccccgcctcctcaaacgggaaccaataggagcccgggccccgcccctggggggagtatttaggagccgatcaggaactcgcttggagagggctagcgaagccgaagggagcgcggctaagagtgccgcaccgcctcacaacctgggaaccggagagtaggggccgtcggctggcaagaacccgccgtgcctcctcggcaagggccatccggtgccacccatgtcgcactagagcagaagagggtgagtcctggaactgcaacctgcacagagctgctctgtactgtccctggtggtcgccgccatgacctggttggtgctgctggggacactgctctgcatgctgcgcgttgggttaggcaccccggactccgagggtttcccgccccgtgcgctccacaactgcccctacaaatgtatctgcgctgccgacctgctaagctgcactggcctagggctgcaggacgtgccagccgagttacctgccgctactgcggacctcgacctgagccacaacgcgctccagcgcctgcgccccggctggttggcgcccctcttccagctgcgcgccctgcacctagaccacaacgaactagatgcgctgggtcgcggcgtcttcgtcaacgccagcggcctgaggctgctcgatctatcatctaacacgttgcgggcgcttggccgccacgacctcgacgggctgggggcgctggagaagctgcttctgttcaataaccgcttggtgcacttggacgagcatgccttccacggcctgcgcgcgctcagccatctctacctgggctgcaacgaactcgcctcgttctccttcgaccacctgcacggtctgagcgccacccacctgcttactctggacctctcctccaaccggctgggacacatctccgtacctgagctggccgcgctgccggccttcctcaagaacggcctctacttgcacaacaaccctttgccttgcgactgccgcctctaccacctgctacagcgctggcaccagcggggcctgagcgccgtgcgcgactttgcgcgcgagtacgtatgcttggccttcaaggtacccgcgtcccgcgtgcgcttcttccagcacagccgcgtctttgagaactgctcgtcggccccagctcttggcctagagcggccggaagagcacctgtacgcgctggtgggtcggtccctgaggctttactgcaacaccagcgtcccggccatgcgcattgcctgggtttcgccgcagcaggagcttctcagggcgccaggatcccgcgatggcagcatcgcggtgctggccgacggcagcttggccataggcaacgtacaggagcagcatgcgggactcttcgtgtgcctggccactgggccccgcctgcaccacaaccagacgcacgagtacaacgtgagcgtgcactttccgcgcccagagcccgaggctttcaacacaggcttcaccacactgctgggctgtgccgtgggccttgtgctcgtgctgctctacctgttcgccccaccctgccgctgctgccgccgtgcctgccgctgccgccgctggccccaaacacccagcccgctccaagagctgagcgcacagtcctcagtactcagcaccacaccgccagacgcacccagccgcaaggccagcgtccacaagcacgtagtctttctggagccaggccggaggggcctcaatggccgcgtgcagctggcagtagctgaggaattcgatctctacaaccctggaggcctgcagctgaaggctggctctgagtccgccagctccataggctccgagggtcccatgacaacctagactgcccagggctcccccacccaggcccccaccctcttgctgctcgccctgctccctgcttcggtccagagaactggcagatactggtgggaagcactgtgcctggccccccagcttcctgtatgggcctcgaaacacaatgggccttctcgctcactggtagagacaggggttgtggtccccaacctgccttctgctctgcccctgcacaggacccaaaggccccaggccctgcaaggtgtgctagttcctgctttcccgcggacttcctagtgcccaaatgccctgtgaggctgagagacccaggcccctgtggctttcaacacagcacagctgtggaagtggctgtgttcttctacagcctgtggaagaacccctgtagcagagcctcccgtccaccctcaggggctgagncagctctcgaggagtggtgctcaagagctgacgcagggccacctccccttcccaagggggtgggagggagtgggcccacagggaaaagaaggcggctctgaaggaagatctcgcccacaccccaggacagaaagaggaaacaagcccgccctctggtgaaatgggactccctccatccaccaacacccaacctcctgaaagcttcacaacttcacgcagagtccggtgggcaggcaccaggcaggaaaggctcctcaagaggttcctggtggtctggcctaagccccagccagaggccctgctctctctggcctggggcatccacccgttgttctgaaggcagagcccattctgtgggctcacaagacacagtgaaggggatcatggcctgcacccctgcttttcagcagtaaaaagcccgaaaagcctggcgagcatggccgagctgggagggccgagccggaactccacgtccctcgagagcaggagcctcttaagggctggcactggtctcagcctaatggctgaggcggtaccctggcttcatatgcatctcactgctcccactgcaggggggcagggaaggggggtctgggagcccttcatgtgtgggggccgagctgggggcccccatggccatcctggacctcgctgctccagagtttaataaaggtagcacatgcttattgctagagcctttgcagaca

SEQ ID NO: 286106 - DNA, 2177 bp, Homo sapiens
ggcctgagttcggggccagcagccgtctacccggtgtcgcgttctgtgttgtggcggccctggatccggcgtcagggcgaccgggcggacgaggtggagccagagtctgtcaggcgggttggtgaagggcgcggggccgggcacggcgttgggagtgcgcggcagggaccggccaggcgggctgcaggcacctcagagcccgggacaccccctcaacgtccgcaggcgcgatgaaggcactgatcttagtggggggctatgggacgcggctacggccgctgacgctgagcaccccgaagccactggtggacttctgcaataagcccatcttgctgcaccaagtggaggcgctagccgcggcaggcgtggaccacgtgatcctggccgtgagctacatgtcgcaggtgctggagaaggaaatgaaggcacaggagcagaggctgggaatccgaatctccatgtcccatgaagaggagcctttggggacagctgggcccctggcgctggcccgtgacctactctctgagactgcagaccctttcttcgtcctcaacagtgacgtgatctgcgatttccccttccaagccatggtgcagttccaccggcaccatggccaggagggctccatcctggtgaccaaggtggaggaaccctccaagtacggtgtggtggtgtgtgaggctgacacaggccgcattcaccggttcgtggagaagccacaggtgtttgtgtccaataagatcaacgcaggcatgtacatcctgagccctgcagtgctgcggcgcatccagctgcagcctacgtccattgagaaggaggtcttccccattatggccaaggaggggcagctatatgccatggagttacagggcttctggatggacattgggcagcccaaggacttcctcactggcatgtgcctcttcctgcagtcactgaggcagaagcagcctgagcggctgtgctcaggccctggcattgtgggcaacgtgctggtggacccaagtgcccgcatcggccagaactgcagcattggccccaatgtgagcctgggacctggcgtggtggtcgaagatggtgtgtgtatccggcggtgcacggtgctgcgggatgcccggatccgttcccattcctggcttgagtcctgcattgtgggctggcgctgccgcgtgggtcagtgggtacgcatggagaacgtgacagtgctgggtgaggacgtcatagttaatgatgagctctacctcaacggagccagcgtgctgccccacaagtctattggcgagtcagtgccagagcctcgtatcatcatgtgaggggatgcagtggggctggccgagccccggttttcccatcagcaaggggagtgctggcctgacacatcagaagaccctggacttgtcattatttgtctggggggcactgggtgaagctgaagctgttggacacctgccttctcatgtggacatcatctggcaggatccctgctgggcacaccccacaaaccccactccctcaagaagggccagggccagggctgtatggaataataatttaatgctcactgtgaaaaaaaaaaaaaaaaaaaaaaaaaaaaaaaaaaaaaaaaaaaaaaaaaaacaaaaaaaaaaaaaaaaaagacacgaaaaaaaaaccagggaacgccacagacaaaacagggcccagcgtcggcggcaggacgcaagcagcgagcgcggagaggaaagcctgcaccgggagcagcggatgatcaatacccaacacccccccggcacgggaaacgcggcagcccgaccacgtccggcacggcgagagggccagccgcaccggtagcgccactgagactcaggacacccccgccgacaggccggcgagaacccgatgtgacgaggcaccacgcggaggaggatcgagaacgcctgacagccctgccgctgggaactgagcgagcacacgcagggaagcggagagcgaacggaccaacgtcaagcgacaccgacagcaccagcgcgaggacacgacgaagcgactgaagagcgaaagaaacgccggccggcagcagcgcgcgcgaagccagacacggacgcagccgcgcccgcacgccacggcaagcgaagaggacacgcaagcagagagaccgccggccgacaacgaggcagagtgagacaagcacggaaagg

SEQ ID NO: 286107 - DNA, 2765 bp, Homo sapiens
ggcctgagttcggggccagcagccgtctacccggtgtcgcgttctgtgttgtggcggccctggatccggcgtcagggcgaccgggcggacgaggtggagccagagtctgtcaggcgggttggtgaagggcgcggggccgggcacggcgttgggagtgcgcggcagggaccggccaggcgggctgcaggcacctcagagcccgggacaccccctcaacgtccgcaggcgcgatgaaggcactgatcttagtggggggctatgggacgcggctacggccgctgacgctgagcaccccgaagccactggtggacttctgcaataagcccatcttgctgcaccaagtggaggcgctagccgcggcaggcgtggaccacgtgatcctggccgtgagctacatgtcgcaggtgctggagaaggaaatgaaggcacaggagcagaggctgggaatccgaatctccatgtcccatgaagaggagcctttggggacagctgggcccctggcgctggcccgtgacctactctctgagactgcagaccctttcttcgtcctcaacagtgacgtgatctgcgatttccccttccaagccatggtgcagttccaccggcaccatggccaggagggctccatcctggtgaccaaggtggaggaaccctccaagtacggtgtggtggtgtgtgaggctgacacaggccgcattcaccggttcgtggagaagccacaggtgtttgtgtccaataagatcaacgcaggcatgtacatcctgagccctgcagtgctgcggcgcatccagctgcagcctacgtccattgagaaggaggtcttccccattatggccaaggaggggcagctatatgccatggagttacagggcttctggatggacattgggcagcccaaggacttcctcactggcatgtgcctcttcctgcagtcactgaggcagaagcagcctgagcggctgtgctcaggccctggcattgtgggcaacgtgctggtggacccaagtgcccgcatcggccagaactgcagcattggccccaatgtgagcctgggacctggcgtggtggtcgaagatggtgtgtgtatccggcggtgcacggtgctgcgggatgcccggatccgttcccattcctggcttgagtcctgcattgtgggctggcgctgccgcgtgggtcagtgggtacgcatggagaacgtgacagtgctgggtgaggacgtcatagttaatgatgagctctacctcaacggagccagcgtgctgccccacaagtctattggcgagtcagtgccagagcctcgtatcatcatgtgaggggatgcagtggggctggccgagccccggttttcccatcagcaaggggagtgctggcctgacacatcagaagaccctggacttgtcattatttgtctggggggcactgggtgaagctgaagctgttggacacctgccttctcatgtggacatcatctggcaggatccctgctgggcacaccccacaaaccccactccctcaagaagggccagggccagggctgtatggaataataatttaatgctcactgtggccctgactgaaagtcaagctcaggcacaattagggccatggctgggctcccaccaatgaggatacaggcaggcaaggaggttggatgtggtggtgtgggatacaggagaagggcaaagggagctcataaatagggcccagcctggctctgggttcaaaggtggaggttccaggatggcacaggctgtgagggctaggcagctgaggaggtagtactcgtattggctcccttctcccagtcctctacagacacgatggtggttttgcagaagaagcagtccttgttgttcatcaggtgctggttgatacaggctctacaacaggggaggggatgaggactgccctgcatgtacctactgctctccccaccaccaagctgtggggcccacttacttgcaggacttgtggccacagggctggaacacagcagagatggggtgggcatagcagatggggcagaggtcctcctcactggtgggctgcagggaggagagtgaagggtgggctggagttggatgcctggctatgtggatgtccgttgtgcctgtgtaggagtgcacacatattcaagtggcatggacctgtgcaccgtgttcccactcaccagggaggcagctgctgcctgggcagatgcagaggtcaggtgcgccagcatctgttccacttgggccagctcatcggcactgatataatccgcatctggggagtggtaggtagtgtcaagtcagaggtagctgaggatgtgatgcctcttgaatattcccagcctaggactttgctgttcttaaggctcctgacccgacccagccccagatttccctgacctgccccaccagcccactcacagctctgcagggagaagcgcttccggtcaggggctggcagagcagtgccaggtgctgggggctctggctgtcccaggagatagcatattgagcgtagctggaagcagggatctgccaggagcactgatgtggcttgctctctcctaggtaggggagggtgcaagggcagtcagaaggcttggggcctggctaaaagtctctcttgggattgccaatgaggagtgccatggctcgtacatgatcaccccccctgcatcctttccgtctccctgcttcccaaaccccaagtcctgtattctagtaaggtgccacacagcgctgggcaacaagagcaaaactccatctcaaaaaaaa

SEQ ID NO: 286108 - DNA, 3028 bp, Homo sapiens
ggcctgagttcggggccagcagccgtctacccggtgtcgcgttctgtgttgtggcggccctggatccggcgtcaggacaccccctcaacgtccgcaggcgcgatgaaggcactgatcttagtggggggctatgggacgcggctacggccgctgacgctgagcaccccgaagccactggtggacttctgcaataagcccatcttgctgcaccaagtggaggcgctagccgcggcaggcgtggaccacgtgatcctggccgtgagctacatgtcgcaggtgctggagaaggaaatgaaggcacaggagcagaggctgggaatccgaatctccatgtcccatgaagaggagcctttggggacagctgggcccctggcgctggcccgtgacctactctctgagactgcagaccctttcttcgtcctcaacagtgacgtgatctgcgatttccccttccaagccatggtgcagttccaccggcaccatggccaggagggctccatcctggtgaccaaggtggaggaaccctccaagtacggtgtggtggtgtgtgaggctgacacaggccgcattcaccggttcgtggagaagccacaggtgtttgtgtccaataagatcaacgcaggcatgtacatcctgagccctgcagtgctgcggcgcatccagctgcagcctacgtccattgagaaggaggtcttccccattatggccaaggaggggcagctatatgccatggagttacagggcttctggatggacattgggcagcccaaggacttcctcactggcatgtgcctcttcctgcagtcactgaggcagaagcagcctgagcggctgtgctcaggccctggcattgtgggcaacgtgctggtggacccaagtgcccgcatcggccagaactgcagcattggccccaatgtgagcctgggacctggcgtggtggtcgaagatggtgtgtgtatccggcggtgcacggtgctgcgggatgcccggatccgttcccattcctggcttgagtcctgcattgtgggctggcgctgccgcgtgggtcagtgggtacgcatggagaacgtgacagtgctgggtgaggacgtcatagttaatgatgagctctacctcaacggagccagcgtgctgccccacaagtctattggcgagtcagtgccagagcctcgtatcatcatgtgaggggatgcagtggggctggccgagccccggttttcccatcagcaaggggagtgctggcctgacacatcagaagaccctggacttgtcattatttgtctggggggcactgggtgaagctgaagctgttggacacctgccttctcatgtggacatcatctggcaggatccctgctgggcacaccccacaaaccccactccctcaagaagggccagggccagggctgtatggaataataatttaatgctcactgtggccctgactgaaagtcaagctcaggcacaattagggccatggctgggctcccaccaatgaggatacaggcaggcaaggaggttggatgtggtggtgtgggatacaggagaagggcaaagggagctcataaatagggcccagcctggctctgggttcaaaggtggaggttccaggatggcacaggctgtgagggctaggcagctgaggaggtagtactcgtattggctcccttctcccagtcctctacagacacgatggtggttttgcagaagaagcagtccttgttgttcatcaggtgctggttgatacaggctctacaacaggggaggggatgaggactgccctgcatgtacctactgctctccccaccaccaagctgtggggcccacttacttgcaggacttgtggccacagggctggaacacagcagagatggggtgggcatagcagatggggcagaggtcctcctcactggtgggctgcagggaggagagtgaagggtgggctggagttggatgcctggctatgtggatgtccgttgtgcctgtgtaggagtgcacacatattcaagtggcatggacctgtgcaccgtgttcccactcaccagggaggcagctgctgcctgggcagatgcagaggtcaggtgcgccagcatctgttccacttgggccagctcatcggcactgatataatccgcatctggggagtggtaggtagtgtcaagtcagaggtagctgaggatgtgatgcctcttgaatattcccagcctaggactttgctgttcttaaggctcctgacccgacccagccccagatttccctgacctgccccaccagcccactcacagctctgcagggagaagcgcttccggtcaggggctggcagagcagtgccaggtgctgggggctctggctgtcccaggagatagcatattgagcgtagctggaagcagggatctgccaggagcactgatgtggcttgctctctcctaggtaggggagggtgcaagggcagtcagaaggcttggggcctggctaaaagtctctcttgggattgccaatgaggagtgccatggctcgtacatgatcaccccccctgcatcctttccgtctccctgcttcccaaaccccaagtcctgtattctagtaaggtgccacacagcctgtttttttttttttttttcttgagacgagtctcgctctgttgcccaggctggagtgcgatggcacgatctcggctcactgcaacctccacctcccgggttcaagtgattctcctgctttagcctcccgagtagctggaattgcagacgcccaccaccacgcccggctaattgttgttgtatttttagtagagacagggtttcaccaggttggccaggctggtctcgaattcctgacctcaggtgatccacctgccttggcttcccaaagtgctgggattacaggcgtgagccaccgcgcccggcctggggtaccactttaagaaggctcaggcgaaccaccttaagatagtgagagtctgcctgccccataatattatcagtccttcaaagtcacttcaaataaacactaacagcagcttggagac

SEQ ID NO: 286109 - DNA, 3462 bp, Homo sapiens
ggcctgagttcggggccagcagccgtctacccggtgtcgcgttctgtgttgtggcggccctggatccggcgtcagggcgaccgggcggacgaggtggagccagagtctgtcaggcgggttggtgaagggcgcggggccgggcacggcgttgggagtgcgcggcagggaccggccaggcgggctgcaggcacctcagagcccgggacaccccctcaacgtccgcaggcgcgatgaaggcactgatcttagtggggggctatgggacgcggctacggccgctgacgctgagcaccccgaagccactggtggacttctgcaataagcccatcttgctgcaccaagtggaggcgctagccgcggcaggcgtggaccacgtgatcctggccgtgagctacatgtcgcaggtgctggagaaggaaatgaaggcacaggagcagagggtgaggcacagactcttggcccttattctcggtccccgcccaacttcccatcctggtagaacctgactgggggggcctcttccttccagctgggaatccgaatctccatgtcccatgaagaggagcctttggggacagctgggcccctggcgctggcccgtgacctactctctgagactgcagaccctttcttcgtcctcaacagtgacgtgatctgcgatttccccttccaagccatggtgcagttccaccggcaccatggccaggagggctccatcctggtaaggcgccaggtcttctctctcttgacactttcaccctccatgcccagcctcccatgccccctagccttcatctgccttcggatgttatggatacagagctgtgcagtatgtatctttaagcacttggggcagagtctcttgagatctggaacggcatgtgtatcaaggcttaggaacactggactaggtccgaggtccccttccttgcattcaggtgaccaaggtggaggaaccctccaagtacggtgtggtggtgtgtgaggctgacacaggccgcattcaccggttcgtggagaagccacaggtgtttgtgtccaataagatcaacgcaggcatgtacatcctgagccctgcagtgctgcggcgcatccagctgcagcctacgtccattgagaaggaggtcttccccattatggccaaggaggggcagctatatgccatggagttacagggcttctggatggacattgggcagcccaaggacttcctcactggcatgtgcctcttcctgcagtcactgaggcagaagcagcctgagcggctgtgctcaggccctggcattgtgggcaacgtgctggtggacccaagtgcccgcatcggccagaactgcagcattggccccaatgtgagcctgggacctggcgtggtggtcgaagatggtgtgtgtatccggcggtgcacggtgctgcgggatgcccggatccgttcccattcctggcttgagtcctgcattgtgggctggcgctgccgcgtgggtcagtgggtacgcatggagaacgtgacagtgctgggtgaggacgtcatagttaatgatgagctctacctcaacggagccagcgtgctgccccacaagtctattggcgagtcagtgccagagcctcgtatcatcatgtgaggggatgcagtggggctggccgagccccggttttcccatcagcaaggggagtgctggcctgacacatcagaagaccctggacttgtcattatttgtctggggggcactgggtgaagctgaagctgttggacacctgccttctcatgtggacatcatctggcaggatccctgctgggcacaccccacaaaccccactccctcaagaagggccagggccagggctgtatggaataataatttaatgctcactgtggccctgactgaaagtcaagctcaggcacaattagggccatggctgggctcccaccaatgaggatacaggcaggcaaggaggttggatgtggtggtgtgggatacaggagaagggcaaagggagctcataaatagggcccagcctggctctgggttcaaaggtggaggttccaggatggcacaggctgtgagggctaggcagctgaggaggtagtactcgtattggctcccttctcccagtcctctacagacacgatggtggttttgcagaagaagcagtccttgttgttcatcaggtgctggttgatacaggctctacaacaggggaggggatgaggactgccctgcatgtacctactgctctccccaccaccaagctgtggggcccacttacttgcaggacttgtggccacagggctggaacacagcagagatggggtgggcatagcagatggggcagaggtcctcctcactggtgggctgcagggaggagagtgaagggtgggctggagttggatgcctggctatgtggatgtccgttgtgcctgtgtaggagtgcacacatattcaagtggcatggacctgtgcaccgtgttcccactcaccagggaggcagctgctgcctgggcagatgcagaggtcaggtgcgccagcatctgttccacttgggccagctcatcggcactgatataatccgcatctggggagtggtaggtagtgtcaagtcagaggtagctgaggatgtgatgcctcttgaatattcccagcctaggactttgctgttcttaaggctcctgacccgacccagccccagatttccctgacctgccccaccagcccactcacagctctgcagggagaagcgcttccggtcaggggctggcagagcagtgccaggtgctgggggctctggctgtcccaggagatagcatattgagcgtagctggaagcagggatctgccaggagcactgatgtggcttgctctctcctaggtaggggagggtgcaagggcagtcagaaggcttggggcctggctaaaagtctctcttgggattgccaatgaggagtgccatggctcgtacatgatcaccccccctgcatcctttccgtctccctgcttcccaaaccccaagtcctgtattctagtaaggtgccacacagcctgtttttttttttttttttcttgagacgagtctcgctctgttgcccaggctggagtgcgatggcacgatctcggctcactgcaacctccacctcccgggttcaagtgattctcctgctttagcctcccgagtagctggaattgcagacgcccaccaccacgcccggctaattgttgttgtatttttagtagagacagggtttcaccaggttggccaggctggtctcgaattcctgacctcaggtgatccacctgccttggcttcccaaagtgctgggattacaggcgtgagccaccgcgcccggcctggggtaccactttaagaaggctcaggcgaaccaccttaagatagtgagagtctgcctgccccataatattatcagtccttcaaagtcacttcaaataaacactaacagcagcttggagac

SEQ ID NO: 286110 - DNA, 2965 bp, Homo sapiens
ggcctgagttcggggccagcagccgtctacccggtgtcgcgttctgtgttgtggcggccctggatccggcgtcagggcgaccgggcggacgaggtggagccagagtctgtcaggcgggttggtgaagggcgcggggccgggcacggcgttgggagtgcgcggcagggaccggccaggcgggctgcaggcacctcagagcccgggacaccccctcaacgtccgcaggcgcgatgaaggcactgatcttagtggggggctatgggacgcggctacggccgctgacgctgagcaccccgaagccactggtggacttctgcaataagcccatcttgctgcaccaagtggaggcgctagccgcggcaggcgtggaccacgtgatcctggccgtgagctacatgtcgcaggtgctggagaaggaaatgaaggcacaggagcagaggctgggaatccgaatctccatgtcccatgaagaggagcctttggggacagctgggcccctggcgctggcccgtgacctactctctgagactgcagaccctttcttcgtcctcaacagcaggcatgtacatcctgagccctgcagtgctgcggcgcatccagctgcagcctacgtccattgagaaggaggtcttccccattatggccaaggaggggcagctatatgccatggagttacagggcttctggatggacattgggcagcccaaggacttcctcactggcatgtgcctcttcctgcagtcactgaggcagaagcagcctgagcggctgtgctcaggccctggcattgtgggcaacgtgctggtggacccaagtgcccgcatcggccagaactgcagcattggccccaatgtgagcctgggacctggcgtggtggtcgaagatggtgtgtgtatccggcggtgcacggtgctgcgggatgcccggatccgttcccattcctggcttgagtcctgcattgtgggctggcgctgccgcgtgggtcagtgggtacgcatggagaacgtgacagtgctgggtgaggacgtcatagttaatgatgagctctacctcaacggagccagcgtgctgccccacaagtctattggcgagtcagtgccagagcctcgtatcatcatgtgaggggatgcagtggggctggccgagccccggttttcccatcagcaaggggagtgctggcctgacacatcagaagaccctggacttgtcattatttgtctggggggcactgggtgaagctgaagctgttggacacctgccttctcatgtggacatcatctggcaggatccctgctgggcacaccccacaaaccccactccctcaagaagggccagggccagggctgtatggaataataatttaatgctcactgtggccctgactgaaagtcaagctcaggcacaattagggccatggctgggctcccaccaatgaggatacaggcaggcaaggaggttggatgtggtggtgtgggatacaggagaagggcaaagggagctcataaatagggcccagcctggctctgggttcaaaggtggaggttccaggatggcacaggctgtgagggctaggcagctgaggaggtagtactcgtattggctcccttctcccagtcctctacagacacgatggtggttttgcagaagaagcagtccttgttgttcatcaggtgctggttgatacaggctctacaacaggggaggggatgaggactgccctgcatgtacctactgctctccccaccaccaagctgtggggcccacttacttgcaggacttgtggccacagggctggaacacagcagagatggggtgggcatagcagatggggcagaggtcctcctcactggtgggctgcagggaggagagtgaagggtgggctggagttggatgcctggctatgtggatgtccgttgtgcctgtgtaggagtgcacacatattcaagtggcatggacctgtgcaccgtgttcccactcaccagggaggcagctgctgcctgggcagatgcagaggtcaggtgcgccagcatctgttccacttgggccagctcatcggcactgatataatccgcatctggggagtggtaggtagtgtcaagtcagaggtagctgaggatgtgatgcctcttgaatattcccagcctaggactttgctgttcttaaggctcctgacccgacccagccccagatttccctgacctgccccaccagcccactcacagctctgcagggagaagcgcttccggtcaggggctggcagagcagtgccaggtgctgggggctctggctgtcccaggagatagcatattgagcgtagctggaagcagggatctgccaggagcactgatgtggcttgctctctcctaggtaggggagggtgcaagggcagtcagaaggcttggggcctggctaaaagtctctcttgggattgccaatgaggagtgccatggctcgtacatgatcaccccccctgcatcctttccgtctccctgcttcccaaaccccaagtcctgtattctagtaaggtgccacacagcctgtttttttttttttttttcttgagacgagtctcgctctgttgcccaggctggagtgcgatggcacgatctcggctcactgcaacctccacctcccgggttcaagtgattctcctgctttagcctcccgagtagctggaattgcagacgcccaccaccacgcccggctaattgttgttgtatttttagtagagacagggtttcaccaggttggccaggctggtctcgaattcctgacctcaggtgatccacctgccttggcttcccaaagtgctgggattacaggcgtgagccaccgcgcccggcctggggtaccactttaagaaggctcaggcgaaccaccttaagatagtgagagtctgcctgccccataatattatcagtccttcaaagtcacttcaaataaacactaacagcagcttggagac

SEQ ID NO: 286111 - DNA, 2441 bp, Homo sapiens
gactcctagaggattcccaggcaaagctcctacaacgcaggcattaccatctgagccctgcagtgctgcggcgcatctgcagcctacgtccattgagaaggaggtcttccccattatggccaaggaggggcagctatatgccatggagttacagggcttctggatggacattgggcagcccaaggacttcctcactggcatgtgcctcttcctgcagtcactgaggcagaagcagcctgagcggctgtgctcaggccctggcattgtgggcaacgtgctggtggacccaagtgcccgcatcggccagaactgcagcattggccccaatgtgagcctgggacctggcgtggtggtcgaagatggtgtgtgtatccggcggtgcacggtgctgcgggatgcccggatccgttcccattcctggcttgagtcctgcattgtgggctggcgctgccgcgtgggtcagtgggtacgcatggagaacgtgacagtgctgggtgaggacgtcatagttaatgatgagctctacctcaacggagccagcgtgctgccccacaagtctattggcgagtcagtgccagagcctcgtatcatcatgtgaggggatgcagtggggctggccgagccccggttttcccatcagcaaggggagtgctggcctgacacatcagaagaccctggacttgtcattatttgtctggggggcactgggtgaagctgaagctgttggacacctgccttctcatgtggacatcatctggcaggatccctgctgggcacaccccacaaaccccactccctcaagaagggccagggccagggctgtatggaataataatttaatgctcactgtggccctgactgaaagtcaagctcaggcacaattagggccatggctgggctcccaccaatgaggatacaggcaggcaaggaggttggatgtggtggtgtgggatacaggagaagggcaaagggagctcataaatagggcccagcctggctctgggttcaaaggtggaggttccaggatggcacaggctgtgagggctaggcagctgaggaggtagtactcgtattggctcccttctcccagtcctctacagacacgatggtggttttgcagaagaagcagtccttgttgttcatcaggtgctggttgatacaggctctacaacaggggaggggatgaggactgccctgcatgtacctactgctctccccaccaccaagctgtggggcccacttacttgcaggacttgtggccacagggctggaacacagcagagatggggtgggcatagcagatggggcagaggtcctcctcactggtgggctgcagggaggagagtgaagggtgggctggagttggatgcctggctatgtggatgtccgttgtgcctgtgtaggagtgcacacatattcaagtggcatggacctgtgcaccgtgttcccactcaccagggaggcagctgctgcctgggcagatgcagaggtcaggtgcgccagcatctgttccacttgggccagctcatcggcactgatataatccgcatctggggagtggtaggtagtgtcaagtcagaggtagctgaggatgtgatgcctcttgaatattcccagcctaggactttgctgttcttaaggctcctgacccgacccagccccagatttccctgacctgccccaccagcccactcacagctctgcagggagaagcgcttccggtcaggggctggcagagcagtgccaggtgctgggggctctggctgtcccaggagatagcatattgagcgtagctggaagcagggatctgccaggagcactgatgtggcttgctctctcctaggtaggggagggtgcaagggcagtcagaaggcttggggcctggctaaaagtctctcttgggattgccaatgaggagtgccatggctcgtacatgatcaccccccctgcatcctttccgtctccctgcttcccaaaccccaagtcctgtattctagtaaggtgccacacagcctgtttttttttttttttttcttgagacgagtctcgctctgttgcccaggctggagtgcgatggcacgatctcggctcactgcaacctccacctcccgggttcaagtgattctcctgctttagcctcccgagtagctggaattgcagacgcccaccaccacgcccggctaattgttgttgtatttttagtagagacagggtttcaccaggttggccaggctggtctcgaattcctgacctcaggtgatccacctgccttggcttcccaaagtgctgggattacaggcgtgagccaccgcgcccggcctggggtaccactttaagaaggctcaggcgaaccaccttaagatagtgagagtctgcctgccccataatattatcagtccttcaaagtcacttcaaataaacactaacagcagcttggagac

SEQ ID NO: 286112 - DNA, 2172 bp, Homo sapiens
gaaaaaatttgtgtggccacaagaggtgacaaagccccaaatatacaaaagggccccaaattaaactgggacctggcgtggtggtcgaagatggtgtgtgtatccggcggtgcacggtgctgcgggatgcccggatccgttcccattcctggcttgagtcctgcattgtgggctggcgctgccgcgtgggtcagtgggtacgcatggagaacgtgacagtgctgggtgaggacgtcatagttaatgatgagctctacctcaacggagccagcgtgctgccccacaagtctattggcgagtcagtgccagagcctcgtatcatcatgtgaggggatgcagtggggctggccgagccccggttttcccatcagcaaggggagtgctggcctgacacatcagaagaccctggacttgtcattatttgtctggggggcactgggtgaagctgaagctgttggacacctgccttctcatgtggacatcatctggcaggatccctgctgggcacaccccacaaaccccactccctcaagaagggccagggccagggctgtatggaataataatttaatgctcactgtggccctgactgaaagtcaagctcaggcacaattagggccatggctgggctcccaccaatgaggatacaggcaggcaaggaggttggatgtggtggtgtgggatacaggagaagggcaaagggagctcataaatagggcccagcctggctctgggttcaaaggtggaggttccaggatggcacaggctgtgagggctaggcagctgaggaggtagtactcgtattggctcccttctcccagtcctctacagacacgatggtggttttgcagaagaagcagtccttgttgttcatcaggtgctggttgatacaggctctacaacaggggaggggatgaggactgccctgcatgtacctactgctctccccaccaccaagctgtggggcccacttacttgcaggacttgtggccacagggctggaacacagcagagatggggtgggcatagcagatggggcagaggtcctcctcactggtgggctgcagggaggagagtgaagggtgggctggagttggatgcctggctatgtggatgtccgttgtgcctgtgtaggagtgcacacatattcaagtggcatggacctgtgcaccgtgttcccactcaccagggaggcagctgctgcctgggcagatgcagaggtcaggtgcgccagcatctgttccacttgggccagctcatcggcactgatataatccgcatctggggagtggtaggtagtgtcaagtcagaggtagctgaggatgtgatgcctcttgaatattcccagcctaggactttgctgttcttaaggctcctgacccgacccagccccagatttccctgacctgccccaccagcccactcacagctctgcagggagaagcgcttccggtcaggggctggcagagcagtgccaggtgctgggggctctggctgtcccaggagatagcatattgagcgtagctggaagcagggatctgccaggagcactgatgtggcttgctctctcctaggtaggggagggtgcaagggcagtcagaaggcttggggcctggctaaaagtctctcttgggattgccaatgaggagtgccatggctcgtacatgatcaccccccctgcatcctttccgtctccctgcttcccaaaccccaagtcctgtattctagtaaggtgccacacagcctgtttttttttttttttttcttgagacgagtctcgctctgttgcccaggctggagtgcgatggcacgatctcggctcactgcaacctccacctcccgggttcaagtgattctcctgctttagcctcccgagtagctggaattgcagacgcccaccaccacgcccggctaattgttgttgtatttttagtagagacagggtttcaccaggttggccaggctggtctcgaattcctgacctcaggtgatccacctgccttggcttcccaaagtgctgggattacaggcgtgagccaccgcgcccggcctggggtaccactttaagaaggctcaggcgaaccaccttaagatagtgagagtctgcctgccccataatattatcagtccttcaaagtcacttcaaataaacactaacagcagcttggagac

SEQ ID NO: 286113 - DNA, 1115 bp, Homo sapiens
ggcctgagttcggggccagcagccgtctacccggtgtcgcgttctgtgttgtggcggccctggatccggcgtcagggcgaccgggcggacgaggtggagccagagtctgtcaggcgggttggtgaagggcgcggggccgggcacggcgttgggagtgcgcggcagggaccggccaggcgggctgcaggcacctcagagcccgggacaccccctcaacgtccgcaggcgcgatgaaggcactgatcttagtggggggctatgggacgcggctacggccgctgacgctgagcaccccgaagccactggtggacttctgcaataagcccatcttgctgcaccaagtggaggcgctagccgcggcaggcgtggaccacgtgatcctggccgtgagctacatgtcgcaggtgctggagaaggaaatgaaggcacaggagcagaggctgggaatccgaatctccatgtcccatgaagaggagcctttggggacagctgggcccctggcgctggcccgtgacctactctctgagactgcagaccctttcttcgtcctcaacagtgacgtgatctgcgatttccccttccaagccatggtgcagttccaccggcaccatggccaggagggctccatcctggtgaccaaggtggaggaaccctccaagtacggtgtggtggtgtgtgaggctgacacaggccgcattcaccggttcgtggagaagccacaggtgtttgtgtccaataagatcaacgcaggcatgtacatcctgagccctgcagtgctgcggcgcatccagctgcagcctacgtccattgagaaggaggtcttccccattatggccaaggaggggcagctatatgccatggagttacagggcttctggatggacattgggcagcccaaggacttcctcactggcatgtgcctcttcctgcagtcactgaggcagaagcagcctgagcggctgtgctcaggccctggcattgtgggcaacgtgctggtggacccaagtgcccgcatcggccagaactgcagcattggccccaatgtgagcaggaatgggaacggatccgggcatcccgcagcaccgtgcaccgccggatacacacaccatcttcga

SEQ ID NO: 286114 - DNA, 2087 bp, Homo sapiens
gccataatggggaagactccttctcaatggacgtaggctgcagctggatgcgccgcagcactgcaggtctcaggatgtacatgcctgcgttgatcttattggacacaaacacctgtggcttctccacgaaccggtgctgggtgaggacgtcatagttaatgatgagctctacctcaacggagccagcgtgctgccccacaagtctattggcgagtcagtgccagagcctcgtatcatcatgtgaggggatgcagtggggctggccgagccccggttttcccatcagcaaggggagtgctggcctgacacatcagaagaccctggacttgtcattatttgtctggggggcactgggtgaagctgaagctgttggacacctgccttctcatgtggacatcatctggcaggatccctgctgggcacaccccacaaaccccactccctcaagaagggccagggccagggctgtatggaataataatttaatgctcactgtggccctgactgaaagtcaagctcaggcacaattagggccatggctgggctcccaccaatgaggatacaggcaggcaaggaggttggatgtggtggtgtgggatacaggagaagggcaaagggagctcataaatagggcccagcctggctctgggttcaaaggtggaggttccaggatggcacaggctgtgagggctaggcagctgaggaggtagtactcgtattggctcccttctcccagtcctctacagacacgatggtggttttgcagaagaagcagtccttgttgttcatcaggtgctggttgatacaggctctacaacaggggaggggatgaggactgccctgcatgtacctactgctctccccaccaccaagctgtggggcccacttacttgcaggacttgtggccacagggctggaacacagcagagatggggtgggcatagcagatggggcagaggtcctcctcactggtgggctgcagggaggagagtgaagggtgggctggagttggatgcctggctatgtggatgtccgttgtgcctgtgtaggagtgcacacatattcaagtggcatggacctgtgcaccgtgttcccactcaccagggaggcagctgctgcctgggcagatgcagaggtcaggtgcgccagcatctgttccacttgggccagctcatcggcactgatataatccgcatctggggagtggtaggtagtgtcaagtcagaggtagctgaggatgtgatgcctcttgaatattcccagcctaggactttgctgttcttaaggctcctgacccgacccagccccagatttccctgacctgccccaccagcccactcacagctctgcagggagaagcgcttccggtcaggggctggcagagcagtgccaggtgctgggggctctggctgtcccaggagatagcatattgagcgtagctggaagcagggatctgccaggagcactgatgtggcttgctctctcctaggtaggggagggtgcaagggcagtcagaaggcttggggcctggctaaaagtctctcttgggattgccaatgaggagtgccatggctcgtacatgatcaccccccctgcatcctttccgtctccctgcttcccaaaccccaagtcctgtattctagtaaggtgccacacagcctgtttttttttttttttttcttgagacgagtctcgctctgttgcccaggctggagtgcgatggcacgatctcggctcactgcaacctccacctcccgggttcaagtgattctcctgctttagcctcccgagtagctggaattgcagacgcccaccaccacgcccggctaattgttgttgtatttttagtagagacagggtttcaccaggttggccaggctggtctcgaattcctgacctcaggtgatccacctgccttggcttcccaaagtgctgggattacaggcgtgagccaccgcgcccggcctggggtaccactttaagaaggctcaggcgaaccaccttaagatagtgagagtctgcctgccccataatattatcagtccttcaaagtcacttcaaataaacactaacagcagcttggagac

SEQ ID NO: 286115 - DNA, 180 bp, Homo sapiens
  misc_feature (21)..(21): n is a, c, g, or t
ctggttgactctcgaggatcnccggaatacacagcggaagcttggggaacagtccatacctggggtgacagggaaggaagatggagcagtaggggaactgaccgtggagagaactggtgtaacacagcatcacaaggctggggagaccagagtttcacgacagagaagacagtcaaaaag

SEQ ID NO: 286116 - DNA, 824 bp, Homo sapiens
gccttttacagaagtggctccagggagcatccacatctgcctctcggggcccacggggcccaggccagctacagaagcaccctgctttccatgggaaaatgctgcaaatgggggagaaaggagagaagggtttcagactgcaaagacccttcgacatcagctagcaccaagttccatcatgtaaataaactgaagggcttcagaccgggagtgaagccaagcaggtgatagaagtgtttgtaggaggatttttttgacataaacatgaaatggagcgagtggtaacgccatccgtctcctgcccagacctccccactgtcactgtccagcctgaagccgccctggtgaagcaggtggaggagcagctccaggcccggctccccggcctccctccctcagctccagggcactcacgtgcttgaaacagctgacgggagcagccttgtaactgtgatccttcaggaacttcccccagtcgaagcccaagaccagagctgcagagcagagaggacgagtcagactaggagcctgcgcagcagccactccaggagcctggaccccaagggccctgtgggacctgcagaggtgatcccaacatgcaggcaaatttgggaagcagtgttgcagatgctggtcccagctactgggaaacaaggtaagatgaggcccctgagatgaggttccagcctcaattccgccattctcctcctacagagccacactaggtatgtcattctacctccttggacctcagtatacttatcaataaatgtgtgggttcaacaccacatccaagaatctttccatctctaaagattctataa

SEQ ID NO: 286117 - DNA, 584 bp, Homo sapiens
agagaggccgggagctcgggcggccggacggaggagggacgaggcagcgcgcgggggagcgcgccctcgccctggcccctccgagtcttcgactagtccttgcaacttcttggcgtgataatcgggaaaagttggcccgtgccaggtttccgacagggatcaaacaggaaaatgcatggcacattattaatgagacttgagaagggggcatctctctgtgatctgtctgtctacggacctcattcattctcctctctcttccacaaagagaactcacaaaggcctgtgaccagagggtgcttaaaatttcagagacgaatgtgaatattactttcaaatctccaacaggaaactatgccaaagtcacatccatcttgagaaggcctcagaggagctgtaaggaagctgaggggacctgctctcaagaggcatctccaggagagagacagaaacccaaacagatgtgactgtgatgagtaaaaatgagagaactcagacagcctaatcgggagcagcctcagtccattctgagcagaaaggaattggctgtctttctgaaattctgaaaatgagaaatttcaaac

SEQ ID NO: 286118 - DNA, 468 bp, Homo sapiens
gggccggggctcaggtgaggggcgcagcggggtggcagggcctcccctgctctcactggctgtgctggttgcaccctctgggagtgagtctcgtcgcaggcgtcagaacaaggcagtttttgcagtgctgtgtgaagggctcgtgtgttcatcctgggaatgacctcgtgagcactcactgtccctgaggactaggacagctcctagctggaagtaggtgccagtcagtcagggtgggcagcccacgttctgcacagtagcgtggccccacaagtgacgtgagcatcgctaccactgtgggagactgtgcatccacccgcgatcctgactgcatagctcgtctctcagacggaggcgccagcaccctccccgtggctgtttcttcagtacctccattttcctttcattggaattgcccttctggcattccctttttgttttcgtttttctttttttagagacggagtc

SEQ ID NO: 286119 - DNA, 201 bp, Homo sapiens
ttttaggagtcttctgcagagagaaaactcgggttgttgtttaatcatcagagacactcagttgtagctggagacatgaagacatataacagacacgtctataaacttcatcatgaaagctaccatgaaatgtattccaagaagtacaaaatgttcatctattgatatgttgacaagataacttttactcatagggtggga

SEQ ID NO: 286120 - DNA, 378 bp, Homo sapiens
tgttctatgcaaaagccttgataatgtctcctctgcctggccccagcttcctgagcccctaagctgaccctgtagggaagggtgggactttcagccctgctgagggtcacatcccctcccagctggagaggaacccagcccccacactcgggggaggaaacccagtgggaggtggcagggaagccacccacaggtttctaagtttagccccctgctacagaccactcccttcacccgcctccttggcccagagccaggcatgacctcatcctttgctctaagactccaccctgctggccactggcctgctttgtagacagggggccaggctggcaagcaacttggacatgaaaagagatgggacaccaagcacccaga

SEQ ID NO: 286121 - DNA, 534 bp, Homo sapiens
cctggaccgcatggtgcccatctccaagcagcccaaggagaagatccaggccatcatcgagtcctgcagccggcagttccctgagttccaggagcgggcccgcaagcgcatccgcacgtacctcaagtcctgccgtcgcatgaagaagaacggcatggagatgaccagacccacgccaccccatctgacctcggccatggcagaaaacatcctggcagctgcctgtgagagcgagacaagaaaggcagccaagcggatgcgtctagagatctaccagtcctcacaggatgagcccatagccctggacaagcagcactcgcgggactccgcagccatcacccactccacctactcactgccagcctcctcctactcccaggaccctgtgtacgccaacggcggcctcaactacagttaccgcgggtacggggccttgagcagcaacctgcagccccctgcctccctccaaacaggaaaccacagtaatgggcccacggacctcagcatgaaaggcggggcctctaccacctccac

SEQ ID NO: 286122 - DNA, 279 bp, Homo sapiens
ccacatcaagacaccatcacatctataatcctagcactttgggcagatcacctgagagctgagtgcagagcattcagaaaccaagacagaaagtcaacgccatctcctggaaaaaaaggaagggtggaaaacgttgaagctaagtggcattagagttaacttaaaccatgcactggttggcattcctggttctcccccttcctctctggccatgccatcccatcccaactgccgtgcatcctcctctatcttatcattaaatgctggcactcctcaagg

SEQ ID NO: 286123 - DNA, 941 bp, Homo sapiens
cgcacctcggcgcccaaggcccgtagccgcgcagtttcctcgggcgtcaggccgccgcgcagcccggccgtatacacgggccccgcgggctcgcagagcaggagcgcgcccgcctcagtccccgacggggcctcaatgcctggctcggcctgcagccgccgcagccagcggtcctgcagccccagtagctcggcgtacggcacccgacccaggcgcaccagccgaacggcgggttgccgcatcgtgcccaccgttgcgtccgcggggccccgccctctccgtgggcctgggggcgtggcctgaggggcggggactcgggggcacaccccgagccgcagctcccaggtgcgtgttaaaagctggaggggggatatgtgatcccaggaccaaaagcgcggggccagactcatcggttcattcaacaaccagtatttagtgcctgctgtgttctgcaggccctgccataggcgcttgatacagcggtgcatagcgtatgaaaaagatctgtcctggctgagcatccgtaatataaaaatctgaaatctgaaatgctccaaaatcctaaactttttgagtgctgacattatgccacaaatggaaaatttcatacctgaccttatgtgagttgcagtcaaaacacaggtgcacaacacccagttcatgcaacatccccaatgggaaaaaagacccccccagctctcttctgctgcagtttttctgctcacacctggatttccccatgcattcccacaaaaagtaattaaatggcatgcgtgcaggctggacacgccaacaacaggtttcccacaatgccccacatggggccaagacctgtgtgcattactcactgcatttttttgcttattctctgctgtgtggtataaatatattgttgaaaatgtcaaaaagacctaaagatacccctgtgaatatcagtgata

SEQ ID NO: 286124 - DNA, 5184 bp, Homo sapiens
tgtgcgccggggaggcgccggcttgtactcggcagcgcgggaataaagtttgctgatttggtgtctagcctggatgcctgggttgcaggcctgcttgtggtggcgctccacagtcatccggctgaaggagacctgttggactggatcttctcgggttttctttcagatattgttttgtatttacccatgaagacattgttttttggactttgcaaataggacatttcaaagatgagtgaaaaaaaattggaaacaactgcacagcagcggaaatgtcctgaatggatgaatgtgcagaataaaagatgtgctgtagaagaaagaaaggcatgtgttcggaagagtgtttttgaagatgacctccccttcttagaattcactggatccattgtgtatagttacgatgctagtgattgctctttcctgtcagaagatattagcatgagtctatcagatggggatgtggtgggatttgacatggagtggccaccattatacaatagagggaaacttggcaaagttgcactaattcagttgtgtgtttctgagagcaaatgttacttgttccacgtttcttccatgtcagtttttccccagggattaaaaatgttgcttgaaaataaagcagttaaaaaggcaggtgtaggaattgaaggagatcagtggaaacttctacgtgactttgatatcaaattgaagaattttgtggagttgacagatgttgccaataaaaagctgaaatgtacagagacctggagccttaacagtctggttaaacacctcttaggtaaacagctcctgaaagacaagtctatccgctgtagcaattggagtaaatttcctctcactgaggaccagaaactgtatgcagccactgatgcttatgctggttttattatttaccgaaatttagagattttggatgatactgtgcaaaggtttgctataaataaagaggaagaaatcctacttagcgacatgaacaaacagttgacttcaatctctgaggaagtgatggatctggctaagcatcttcctcatgctttcagtaaattggaaaacccacggagggtttctatcttactaaaggatatttcagaaaatctatattcactgaggaggatgataattgggtctactaacattgagactgaactgaggcccagcaataatttaaacttattatcctttgaagattcaactactgggggagtacaacagaaacaaattagagaacatgaagttttaattcacgttgaagatgaaacatgggacccaacacttgatcatttagctaaacatgatggagaagatgtacttggaaataaagtggaacgaaaagaagatggatttgaagatggagtagaagacaacaaattgaaagagaatatggaaagagcttgtttgatgtcgttagatattacagaacatgaactccaaattttggaacagcagtctcaggaagaatatcttagtgatattgcttataaatctactgagcatttatctcccaatgataatgaaaacgatacgtcctatgtaattgagagtgatgaagatttagaaatggagatgcttaagcatttatctcccaatgataatgaaaacgatacgtcctatgtaattgagagtgatgaagatttagaaatggagatgcttaagtctttagaaaacctcaatagtggcacggtagaaccaactcattctaaatgcttaaaaatggaaagaaatctgggtcttcctactaaagaagaagaagaagatgatgaaaatgaagctaatgaaggggaagaagatgatgataaggactttttgtggccagcacccaatgaagagcaagttacttgcctcaagatgtactttggccattccagttttaaaccagttcagtggaaagtgattcattcagtattagaagaaagaagagataatgttgctgtcatggcaactggatatggaaagagtttgtgcttccagtatccacctgtttatgtaggcaagattggccttgttatctctccccttatttctctgatggaagaccaagtgctacagcttaaaatgtccaacatcccagcttgcttccttggatcagcacagtcagaaaatgttctaacagatattaaattaggtaaataccggattgtatacgtaactccagaatactgttcaggtaacatgggcctgctccagcaacttgaggctgatattggtatcacgctcattgctgtggatgaggctcactgtatttctgagtgggggcatgattttagggattcattcaggaagttgggctccctaaagacagcactgccaatggttccaatcgttgcacttactgctactgcaagttcttcaatccgggaagacattgtacgttgcttaaatctgagaaatcctcagatcacctgtactggttttgatcgaccaaacctgtatttagaagttaggcgaaaaacagggaatatccttcaggatctgcagccatttcttgtcaaaacaagttcccactgggaatttgaaggtccaacaatcatctactgtccttctagaaaaatgacacaacaagttacaggtgaacttaggaaacttaatctatcctgtggaacataccatgcgggcatgagttttagcacaaggaaagacattcatcataggtttgtaagagatgaaattcagtgtgtcatagctaccatagcttttggaatgggcattaataaagctgacattcgccaagtcattcattacggtgctcctaaggacatggaatcatattatcaggagattggtagagctggtcgtgatggacttcaaagttcttgtcacgtcctctgggctcctgcagacattaacttaaataggcaccttcttactgagatacgtaatgagaagtttcgattatacaaattaaagatgatggcaaagatggaaaaatatcttcattctagcagatgtaggagacaaatcatcttgtctcattttgaggacaaacaagtacaaaaagcctccttgggaattatgggaactgaaaaatgctgtgataattgcaggtccagattggatcattgctattccatggatgactcagaggatacatcctgggactttggtccacaagcatttaagcttttgtctgctgtggacatcttaggcgaaaaatttggaattgggcttccaattttatttctccgaggatctaattctcagcgtcttgccgatcaatatcgcaggcacagtttatttggcactggcaaggatcaaacagagagttggtggaaggctttttcccgtcagctgatcactgagggattcttggtagaagtttctcggtataacaaatttatgaagatttgcgcccttacgaaaaagggtagaaattggcttcataaagctaatacagaatctcagagcctcatccttcaagctaatgaagaattgtgtccaaagaagtttcttctgcctagttcgaaaactgtatcttcgggcaccaaagagcattgttataatcaagtaccagttgaattaagtacagagaagaagtctaacttggagaagttatattcttataaaccatgtgataagatttcttctgggagtaacatttctaaaaaaagtatcatggtacagtcaccagaaaaagcttacagttcctcacagcctgttatttcggcacaagagcaggagactcagattgtgttatatggcaaattggtagaagctaggcagaaacatgccaataaaatggatgttcccccagctattctggcaacaaacaagatactggtggatatggccaaaatgagaccaactacggttgaaaacgtaaaaaggattgatggtgtttctgaaggcaaagctgccatgttggcccctctgttggaagtcatcaaacatttctgccaaacaaatagtgttcagacagacctcttttcaagtacaaaacctcaagaagaacagaagacgagtctggtagcaaaaaataaaatatgcacactttcacagtctatggccatcacatactctttattccaagaaaagaagatgcctttgaagagcatagctgagagcaggattctgcctctcatgacaattggcatgcacttatcccaagcggtgaaagctggctgcccccttgatttggagcgagcaggcctgactccagaggttcagaagattattgctgatgttatccgaaaccctcccgtcaactcagatatgagtaaaattagcctaatcagaatgttagttcctgaaaacattgacacgtaccttatccacatggcaattgagatccttaaacatggtcctgacagcggacttcaaccttcatgtgatgtcaacaaaaggagatgttttcccggttctgaagagatctgttcaagttctaagagaagcaaggaagaagtaggcatcaatactgagacttcatctgcagagagaaagagacgattacctgtgtggtttgccaaaggaagtgataccagcaagaaattaatggacaaaacgaaaaggggaggtctttttagttaagctggcaattaccagaacaattatgtttcttgctgtattataagaggatagctatattttatttctgaagagtaaggagtagtattttggcttaaaaatcattctaattacaaagttcactgtttattgaagaactggcatcttaaatcagccttccgcaattcatgtagtttctgggtcttctgggagcctacgtgagtacatcacctaacagaatattaaattagacttcctgtaagattgctttaagaaactgttactgtcctgttttctaatctctttattaaaacagtgtatttggaaaatgttatgtgctctgatttgatatagataacagattagtagttacatggtaattatgtgatataaaatattcatatattatcaaaattctgttttgtaaatgtaagaaagcatagttattttacaaattgtttttactgtcttttgaagaagttcttaaatacgttgttaaatggtattagttgaccagggcagtgaaaatgaaaccgcattttgggtgccattaaatagggaaaaaacatgtaaaaaatgtaaaatggagaccaattgcactaggcaagtgtatattttgtattttatatacaatttctattatttttcaagtaataaaacaatgtttttcatactgaa

SEQ ID NO: 286125 - DNA, 5445 bp, Homo sapiens
tgtgcgccggggaggcgccggcttgtactcggcagcgcgggaataaagtttgctgatttggtgtctagcctggatgcctgggttgcaggcctgcttgtggtggcgctccacagtcatccggctgaaggagacctgttggactggatcttctcgggttttctttcagatattgttttgtatttacccatgaagacattgttttttggactttgcaaataggacatttcaaagatgagtgaaaaaaaattggaaacaactgcacagcagcggaaatgtcctgaatggatgaatgtgcagaataaaagatgtgctgtagaagaaagaaaggcatgtgttcggaagagtgtttttgaagatgacctccccttcttagaattcactggatccattgtgtatagttacgatgctagtgattgctctttcctgtcagaagatattagcatgagtctatcagatggggatgtggtgggatttgacatggagtggccaccattatacaatagagggaaacttggcaaagttgcactaattcagttgtgtgtttctgagagcaaatgttacttgttccacgtttcttccatgtcagtttttccccagggattaaaaatgttgcttgaaaataaagcagttaaaaaggcaggtgtaggaattgaaggagatcagtggaaacttctacgtgactttgatatcaaattgaagaattttgtggagttgacagatgttgccaataaaaagctgaaatgtacagagacctggagccttaacagtctggttaaacacctcttaggtaaacagctcctgaaagacaagtctatccgctgtagcaattggagtaaatttcctctcactgaggaccagaaactgtatgcagccactgatgcttatgctggttttattatttaccgaaatttagagattttggatgatactgtgcaaaggtttgctataaataaagaggaagaaatcctacttagcgacatgaacaaacagttgacttcaatctctgaggaagtgatggatctggctaagcatcttcctcatgctttcagtaaattggaaaacccacggagggtttctatcttactaaaggatatttcagaaaatctatattcactgaggaggatgataattgggtctactaacattgagactgaactgaggcccagcaataatttaaacttattatcctttgaagattcaactactgggggagtacaacagaaacaaattagagaacatgaagttttaattcacgttgaagatgaaacatgggacccaacacttgatcatttagctaaacatgatggagaagatgtacttggaaataaagtggaacgaaaagaagatggatttgaagatggagtagaagacaacaaattgaaagagaatatggaaagagcttgtttgatgtcgttagatattacagaacatgaactccaaattttggaacagcagtctcaggaagaatatcttagtgatattgcttataaatctactgagcatttatctcccaatgataatgaaaacgatacgtcctatgtaattgagagtgatgaagatttagaaatggagatgcttaagcatttatctcccaatgataatgaaaacgatacgtcctatgtaattgagagtgatgaagatttagaaatggagatgcttaagtctttagaaaacctcaatagtggcacggtagaaccaactcattctaaatgcttaaaaatggaaagaaatctgggtcttcctactaaagaagaagaagaagatgatgaaaatgaagctaatgaaggggaagaagatgatgataaggactttttgtggccagcacccaatgaagagcaagttacttgcctcaagatgtactttggccattccagttttaaaccagttcagtggaaagtgattcattcagtattagaagaaagaagagataatgttgctgtcatggcaactggatatggaaagagtttgtgcttccagtatccacctgtttatgtaggcaagattggccttgttatctctccccttatttctctgatggaagaccaagtgctacagcttaaaatgtccaacatcccagcttgcttccttggatcagcacagtcagaaaatgttctaacagatattaaattaggtaaataccggattgtatacgtaactccagaatactgttcaggtaacatgggcctgctccagcaacttgaggctgatattggtatcacgctcattgctgtggatgaggctcactgtatttctgagtgggggcatgattttagggattcattcaggaagttgggctccctaaagacagcactgccaatggttccaatcgttgcacttactgctactgcaagttcttcaatccgggaagacattgtacgttgcttaaatctgagaaatcctcagatcacctgtactggttttgatcgaccaaacctgtatttagaagttaggcgaaaaacagggaatatccttcaggatctgcagccatttcttgtcaaaacaagttcccactgggaatttgaaggtccaacaatcatctactgtccttctagaaaaatgacacaacaagttacaggtgaacttaggaaacttaatctatcctgtggaacataccatgcgggcatgagttttagcacaaggaaagacattcatcataggtttgtaagagatgaaattcagtgtgtcatagctaccatagcttttggaatgggcattaataaagctgacattcgccaagtcattcattacggtgctcctaaggacatggaatcatattatcaggagattggtagagctggtcgtgatggacttcaaagttcttgtcacgtcctctgggctcctgcagacattaacttaaataggcaccttcttactgagatacgtaatgagaagtttcgattatacaaattaaagatgatggcaaagatggaaaaatatcttcattctagcagatgtaggagacaaatcatcttgtctcattttgaggacaaacaagtacaaaaagcctccttgggaattatgggaactgaaaaatgctgtgataattgcaggtccagattggatcattgctattccatggatgactcagaggatacatcctgggactttggtccacaagcatttaagcttttgtctgctgtggacatcttaggcgaaaaatttggaattgggcttccaattttatttctccgaggatctaattctcagcgtcttgccgatcaatatcgcaggcacagtttatttggcactggcaaggatcaaacagagagttggtggaaggctttttcccgtcagctgatcactgagggattcttggtagaagtttctcggtataacaaatttatgaagatttgcgcccttacgaaaaagggtagaaattggcttcataaagctaatacagaatctcagagcctcatccttcaagctaatgaagaattgtgtccaaagaagtttcttctgcctagttcgaaaactgtatcttcgggcaccaaagagcattgttataatcaagtaccagttgaattaagtacagagaagaagtctaacttggagaagttatattcttataaaccatgtgataagatttcttctgggagtaacatttctaaaaaaagtatcatggtacagtcaccagaaaaagcttacagttcctcacagcctgttatttcggcacaagagcaggagactcagattgtgttatatggcaaattggtagaagctaggcagaaacatgccaataaaatggatgttcccccagctattctggcaacaaacaagatactggtggatatggccaaaatgagaccaactacggttgaaaacgtaaaaaggattgatggtgtttctgaaggcaaagctgccatgttggcccctctgttggaagtcatcaaacatttctgccaaacaaatagtgttcagacagacctcttttcaagtacaaaacctcaagaagaacagaagacgagtctggtagcaaaaaataaaatatgcacactttcacagtctatggccatcacatactctttattccaagaaaagaagatgcctttgaagagcatagctgagagcaggattctgcctctcatgacaattggcatgcacttatcccaagcggtgaaagctggctgcccccttgatttggagcgagcaggcctgactccagaggttcagaagattattgctgatgttatccgaaaccctcccgtcaactcagatatgagtaaaattagcctaatcagaatgttagttcctgaaaacattgacacgtaccttatccacatggcaattgagatccttaaacatggtcctgacagcggacttcaaccttcatgtgatgtcaacaaaaggagatgttttcccggttctgaagagatctgttcaagttctaagagaagcaaggaagaagtaggcatcaatactgagacttcatctgcagagagaaagagacgattacctgtgtggtttgccaaaggaagtgataccagcaagaaattaatggacaaaacgaaaaggggaggtctttttagttaagctggcaattaccagaacaattatgtttcttgctgtattataagaggatagctatattttatttctgaagagtaaggagtagtattttggcttaaaaatcattctaattacaaagttcactgtttattgaagaactggcatcttaaatcagccttccgcaattcatgtagtttctgggtcttctgggagcctacgtgagtacatcacctaacagaatattaaattagacttcctgtaagattgctttaagaaactgttactgtcctgttttctaatctctttattaaaacagtgtatttggaaaatgttatgtgctctgatttgatatagataacagattagtagttacatggtaattatgtgatataaaatattcatatattatcaaaattctgttttgtaaatgtaagaaagcatagttattttacaaattgtttttactgtcttttgaagaagttcttaaatacgttgttaaatggtattagttgaccagggcagtgaaaatgaaaccgcattttgggtgccattaaatagggaaaaaacatgtaaaaaatgtaaaatggagaccaattgcactaggcaagtgtatattttgtattttatatacaatttctattatttttcaagtaataaaacaatgtttttcatactgaatattatatatatattttttagctttcatttacttaattattttaagtacctttatttttccaggatgtcagaatttgattctaatctctcttatgtagcacatgtgacttaatttaaaacctatactgtgacacagagttgggtaaacgatgattatttaactttaagcagttcaccatccatttcaaagcctttgattggcttttttgtaaataaaaataacttgttaagaaacaaatatatctgtcatagaagaactag

SEQ ID NO: 286126 - DNA, 4481 bp, Homo sapiens
tgtgcgccggggaggcgccggcttgtactcggcagcgcgggaataaagtttgctgatttggtgtctagcctggatgcctgggttgcaggcctgcttgtggtggcgctccacagtcatccggctgaaggagacctgttggactggatcttctcgggttttctttcagatattgttttgtatttacccatgaagacattgttttttggactttgcaaataggacatttcaaagatgagtgaaaaaaaattggaaacaactgcacagcagcggaaatgtcctgaatggatgaatgtgcagaataaaagatgtgctgtagaagaaagaaaggcatgtgttcggaagagtgtttttgaagatgacctccccttcttagaattcactggatccattgtgtatagttacgatgctagtgattgctctttcctgtcagaagatattagcatgagtctatcagatggggatgtggtgggatttgacatggagtggccaccattatacaatagagggaaacttggcaaagttgcactaattcagttgtgtgtttctgagagcaaatgttacttgttccacgtttcttccatgtcagtttttccccagggattaaaaatgttgcttgaaaataaagcagttaaaaaggcaggtgtaggaattgaaggagatcagtggaaacttctacgtgactttgatatcaaattgaagaattttgtggagttgacagatgttgccaataaaaagctgaaatgtacagagacctggagccttaacagtctggttaaacacctcttaggtaaacagctcctgaaagacaagtctatccgctgtagcaattggagtaaatttcctctcactgaggaccagaaactgtatgcagccactgatgcttatgctggttttattatttaccgaaatttagagattttggatgatactgtgcaaaggtttgctataaataaagaggaagaaatcctacttagcgacatgaacaaacagttgacttcaatctctgaggaagtgatggatctggctaagcatcttcctcatgctttcagtaaattggaaaacccacggagggtttctatcttactaaaggatatttcagaaaatctatattcactgaggaggatgataattgggtctactaacattgagactgaactgaggcccagcaataatttaaacttattatcctttgaagattcaactactgggggagtacaacagaaacaaattagagaacatgaagttttaattcacgttgaagatgaaacatgggacccaacacttgatcatttagctaaacatgatggagaagatgtacttggaaataaagtggaacgaaaagaagatggatttgaagatggagtagaagacaacaaattgaaagagaatatggaaagagcttgtttgatgtcgttagatattacagaacatgaactccaaattttggaacagcagtctcaggaagaatatcttagtgatattgcttataaatctactgagcatttatctcccaatgataatgaaaacgatacgtcctatgtaattgagagtgatgaagatttagaaatggagatgcttaagcatttatctcccaatgataatgaaaacgatacgtcctatgtaattgagagtgatgaagatttagaaatggagatgcttaagtctttagaaaacctcaatagtggcacggtagaaccaactcattctaaatgcttaaaaatggaaagaaatctgggtcttcctactaaagaagaagaagaagatgatgaaaatgaagctaatgaaggggaagaagatgatgataaggactttttgtggccagcacccaatgaagagcaagttacttgcctcaagatgtactttggccattccagttttaaaccagttcagtggaaagtgattcattcagtattagaagaaagaagagataatgttgctgtcatggcaactggatatggaaagagtttgtgcttccagtatccacctgtttatgtaggcaagattggccttgttatctctccccttatttctctgatggaagaccaagtgctacagcttaaaatgtccaacatcccagcttgcttccttggatcagcacagtcagaaaatgttctaacagatattaaattaggtaaataccggattgtatacgtaactccagaatactgttcaggtaacatgggcctgctccagcaacttgaggctgatattggtatcacgctcattgctgtggatgaggctcactgtatttctgagtgggggcatgattttagggattcattcaggaagttgggctccctaaagacagcactgccaatggttccaatcgttgcacttactgctactgcaagttcttcaatccgggaagacattgtacgttgcttaaatctgagaaatcctcagatcacctgtactggttttgatcgaccaaacctgtatttagaagttaggcgaaaaacagggaatatccttcaggatctgcagccatttcttgtcaaaacaagttcccactgggaatttgaaggtccaacaatcatctactgtccttctagaaaaatgacacaacaagttacaggtgaacttaggaaacttaatctatcctgtggaacataccatgcgggcatgagttttagcacaaggaaagacattcatcataggtttgtaagagatgaaattcagtgtgtcatagctaccatagcttttggaatgggcattaataaagctgacattcgccaagtcattcattacggtgctcctaaggacatggaatcatattatcaggagattggtagagctggtcgtgatggacttcaaagttcttgtcacgtcctctgggctcctgcagacattaacttaaataggcaccttcttactgagatacgtaatgagaagtttcgattatacaaattaaagatgatggcaaagatggaaaaatatcttcattctagcagatgtaggagacaaatcatcttgtctcattttgaggacaaacaagtacaaaaagcctccttgggaattatgggaactgaaaaatgctgtgataattgcaggtccagattggatcattgctattccatggatgactcagaggatacatcctgggactttggtccacaagcatttaagcttttgtctgctgtggacatcttaggcgaaaaatttggaattgggcttccaattttatttctccgaggatctaattctcagcgtcttgccgatcaatatcgcaggcacagtttatttggcactggcaaggatcaaacagagagttggtggaaggctttttcccgtcagctgatcactgagggattcttggtagaagtttctcggtataacaaatttatgaagatttgcgcccttacgaaaaagggtagaaattggcttcataaagctaatacagaatctcagagcctcatccttcaagctaatgaagaattgtgtccaaagaagtttcttctgcctagttcgaaaactgtatcttcgggcaccaaagagcattgttataatcaagtaccagttgaattaagtacagagaagaagtctaacttggagaagttatattcttataaaccatgtgataagatttcttctgggagtaacatttctaaaaaaagtatcatggtacagtcaccagaaaaagcttacagttcctcacagcctgttatttcggcacaagagcaggagactcagattgtgttatatggcaaattggtagaagctaggcagaaacatgccaataaaatggatgttcccccagctattctggcaacaaacaagatactggtggatatggccaaaatgagaccaactacggttgaaaacgtaaaaaggattgatggtgtttctgaaggcaaagctgccatgttggcccctctgttggaagtcatcaaacatttctgccaaacaaatagtgttcagacagacctcttttcaagtacaaaacctcaagaagaacagaagacgagtctggtagcaaaaaataaaatatgcacactttcacagtctatggccatcacatactctttattccaagaaaagaagatgcctttgaagagcatagctgagagcaggattctgcctctcatgacaattggcatgcacttatcccaagcggtgaaagctggctgcccccttgatttggagcgagcaggcctgactccagaggttcagaagattattgctgatgttatccgaaaccctcccgtcaactcaggtgagaggcatggcctagctctgcacccttaatgacttgatgaagtaaacaagcaatccactatatttttcactgttaacagcattaatcctttatgctattatgaaaaccttacttttgtgattctttttcttgttttaggaaaacaatctttcttcccattatcactcagaggaaagtatactgagaaatttttttgttttgttttgttttttgagacagagtcttgcttccagcctgagtgacacccagagtgagaacctgtctc

SEQ ID NO: 286127 - DNA, 341 bp, Homo sapiens
ttattgaagtatgcagaatgtaaatgaattgtttttataactttggcacttgctgtatcttagaacattcttttgatgatttattttctgtagttttgggagagataagacattggaatgcgtttctaactacctttagaactttagaaactgataatttaggaggttattttcaggtgattaatttgacagcttgattaggcaaagaaaaaattgtgattttgagatttttgtttcttattttcttcacatttaaaagttttttgaaactttttttaatggacctttatatgtttaaatgcagtctaacttggagaagttatattcttataaaccatgtg

SEQ ID NO: 286128 - DNA, 390 bp, Homo sapiens
ggtgatctttagcatactttttaaatttttctgtttttttataggctggttttattatttaccgaaatttagagattttggatgatactgtgcaaaggtttgctataaataaaggtatgttaagatccataaataaaatgtgaattcactcttttgtgaggtttatctccaaaaaaggcaatattcacatatttgcaaagcatttagtactataacttcttgaatgtctgagcagtcctgacattagggtgggatccatcagggcccaagatgagtgtttcatctttgttacttgtggcaaagcagcccttacttcttttactttgtagcattgctatgtatttggcttctagagttggggctttgtggctttcttattgcagtgacaca

SEQ ID NO: 286129 - DNA, 360 bp, Homo sapiens
aatgtaaggttttcattctgctaaatatgtttgtcaaactgtgttgtgatttgttctcagtgtgtcatagctaccatagcttttggaatgggcattaataaagctgacattcgccaagtcattcattacggtgctcctaaggacatggaatcatattatcaggagattggtagagctggtcgtgatggacttcaaagttcttgtcacgtcctctgggctcctgcagacattaacttaaataggtaaaaaaaatttattgtttttactcttgcagatttctttctttctttccatataaacctcaaaagtgtttgaggctatttccagtatcccaagtaatttgtgagtgcatttaaagta

SEQ ID NO: 286130 - DNA, 384 bp, Homo sapiens
aatagtttattttcatattttagctactttacatactcgggtataatgaactttattcatagcttctgaagcagttggcacatttgagatattttttacttggctaattgttatgctaaatcttttgatttctaaagatacatgcctttgctaagctttcttcaaatgttattatttttatttagattggatcattgctattccatggatgactcagaggatacatcctgggactttggtccacaagcatttaagcttttgtctgctgtggacatcttaggcgaaaaatttggaattgggcttccaattttatttctccgaggatctgtaagtatatatctgtgaattcccttcatagatcttcttttacttctattacacttt

SEQ ID NO: 286131 - DNA, 204 bp, Homo sapiens
gaaaagaactgtggtaagtaaagagtttgatgacttatgcattttgttaaaatatgatgttatcttagtctgcaaatgtattgagattctgaaaataaaatccacttctaacaattgctttgaaagaatctatacttctctgtgtaaaggaataaaattgaatgtttgacgtggggttatcaacttgagaatggaatgataagg

SEQ ID NO: 286132 - DNA, 454 bp, Homo sapiens
aattttgagaagcagtttgagctcatttcctgcatgtttagttctaggtgcaatgttttaaggggaagacttacactatgaagctagcccagaagagggtgactagagtactgaggagtttctacctggaagggctgtaaggaagacaactgctatgttgtgagcggctctatggagaggcccatgtggagggaagtgaggaaggcctctgcaaacagtccaggaggaagtgaagccctcagtccaacagcctgtgtggaactgaaccctgcaaacaactctgtgtgtgagcttggaagtggatccatattcagtcaaaccttgagatgggacaccatgctctgctaacacttgattgtggtcccagctaggccactgctgaagtcttgactcagagaaacgatgatatagtaaatgtttgttgtttcaagttggtaagttttgggataatttt

SEQ ID NO: 286133 - DNA, 657 bp, Homo sapiens
tcggtgaggcgggtcctacggtatgcagacagtttcgacactttggactcagcgcacctcggccgaatctcgatgtctatcaacatgcgagacattgtagtaatagctctactcgcaatccttcgaactctcatagacatcctgatatgctgctcatgtgagcctgtgtctattgttgcttctacctgtttgctctcccacatcctgcggctgcatgtgaagctgcaggcccctcctagcattactcataaatgctgtcgttggttagcgagtacactgggccgtcgttttttacaaacgtcttgcactgggaaacacctgtcgttacccaactattgtcgccttgcatctacatccccctttcgcatcgcgcctggtgggatggggtggctgatacccaattcctcctcctgggcctgctgccttctcagggccacctggaagcacacgacaatgagtcatcctccagcactccagaatcagctttgccaaaacacagaagccccacccatcccagacaccatgattcactagctctggaggttcaagtcacagtgtactctggcaggaaggcactgtgctagcacagcgaacacattgctctgcagagaatctgctctcctccagtcggatggaatccctctgttgcacatccca

SEQ ID NO: 286134 - DNA, 1676 bp, Homo sapiens
gcggcaacccgccgttcggctggtgcgcctgggtcgggtgccgtacgccgagctactggggctgcaggaccgctggctgcggcggctgcaggccgagccaggcattgaggccccgtcggggactgaggcgggcgcgctcctgctctgcgagcccgcggggcccgtgtatacggccgggctgcgcggcggcctgacgcccgaggaaactgcgcggctacgggccttgggcgccgaggtgcgcgtcacaggccgcggtggcctggccaccttccacggcccgggccagctgctttgccacccggtactcgacctgcggcgtctcggcctgcgcttgcgcatgcacgtagcgtcgctggaggcgtgcgccgtgcgcctgtgcgagctccagggcctgcaggacgcccgcgcgcggcccccgccctacactggcgtctggctagacgatcgcaagatctgcgcgatcggagtccgctgtggaaggcacatcacatcccacggcctggctctcaactgctctaccgacctcacgtggtttgagcacatcgtgccctgtggactggttgggtcaggcgtcacttccttgagtaaggagctccagaggcacgtcaccgtggaagaagtaatgccacctttccttgtggcctttaaggagatctacaagtgcacactgatctcagaggacagccccaactgaagagtactcataacagccaggatgctcctgccttgggaagcatgaagtctgacttgagtcacctactgaaacccagattttagacctggcctgtcattcactgatcatgaaactaaggacataccatgagctctgagccactattttcatatgtatcctgttttatttatatctttcccacctacctcagagatactagatgtgacaatactgtgaaaagcaacacatgctatataaaacattagcactgctattgacagaagtgtctcagagaaattcagatgtcatagattgttatttctcgattgttgatgtcatagattgtcatttctcgattgttgcttcctcaatactgtgtctaactgagcaattctgggctctagttcctttgattttgtgggaatcaaatctctgaatggcccaggtgaaggtgatgtgatgtagtgctttttcattctcaagagacctgggttctttctgcaataaagggaaaagggaagaaccttctaagaataaaatgggatcttaccttcctgggtttgattccccaagtttgataatttagcagtttttagttgggttaccctgagctaggccaaagactggaggaaggataagaataatttctcacactgtacaaatgccaaagatagaagtgagtttttcttatatgagacctctaaatttgtaaggctgcgtattatctgttgctgtgtaacaaatcatcaaaacttagtgacttaacagtaaacattaattatctcgtttgtgggtcaggaatttgggggaagcttagctgggtgtttctaggttagggtctcacacgaacttgcagttaagatgtcagctggaactgcacttattcaaaggcttggctgggctggaggatcagcgctccatatggtgcattcacttgcgtggttggttatggttgctgacaagaggcctcagttccttaccgtgtggacctccctatagggtt

SEQ ID NO: 286135 - DNA, 1714 bp, Homo sapiens
gcggcaacccgccgttcggctggtgcgcctgggtcgggtgccgtacgccgagctactggggctgcaggaccgctggctgcggcggctgcaggccgagccaggcattgaggccccgtcggggactgaggcgggcgcgctcctgctctgcgagcccgcggggcccgtgtatacggccgggctgcgcggcggcctgacgcccgaggaaactgcgcggctacgggccttgggcgccgaggtgcgcgtcacaggccgcggtggcctggccaccttccacggcccgggccagctgctttgccacccggtactcgacctgcggcgtctcggcctgcgcttgcgcatgcacgtagcgtcgctggaggcgtgcgccgtgcgcctgtgcgagctccagggcctgcaggacgcccgcgcgcggcccccgccctacactggcgtctggctagacgatcgcaagatctgcgcgatcggtgagcgccgcggcgcagggcggtacctgagagccgaggagtccgctgtggaaggcacatcacatcccacggcctggctctcaactgctctaccgacctcacgtggtttgagcacatcgtgccctgtggactggttgggtcaggcgtcacttccttgagtaaggagctccagaggcacgtcaccgtggaagaagtaatgccacctttccttgtggcctttaaggagatctacaagtgcacactgatctcagaggacagccccaactgaagagtactcataacagccaggatgctcctgccttgggaagcatgaagtctgacttgagtcacctactgaaacccagattttagacctggcctgtcattcactgatcatgaaactaaggacataccatgagctctgagccactattttcatatgtatcctgttttatttatatctttcccacctacctcagagatactagatgtgacaatactgtgaaaagcaacacatgctatataaaacattagcactgctattgacagaagtgtctcagagaaattcagatgtcatagattgttatttctcgattgttgatgtcatagattgtcatttctcgattgttgcttcctcaatactgtgtctaactgagcaattctgggctctagttcctttgattttgtgggaatcaaatctctgaatggcccaggtgaaggtgatgtgatgtagtgctttttcattctcaagagacctgggttctttctgcaataaagggaaaagggaagaaccttctaagaataaaatgggatcttaccttcctgggtttgattccccaagtttgataatttagcagtttttagttgggttaccctgagctaggccaaagactggaggaaggataagaataatttctcacactgtacaaatgccaaagatagaagtgagtttttcttatatgagacctctaaatttgtaaggctgcgtattatctgttgctgtgtaacaaatcatcaaaacttagtgacttaacagtaaacattaattatctcgtttgtgggtcaggaatttgggggaagcttagctgggtgtttctaggttagggtctcacacgaacttgcagttaagatgtcagctggaactgcacttattcaaaggcttggctgggctggaggatcagcgctccatatggtgcattcacttgcgtggttggttatggttgctgacaagaggcctcagttccttaccgtgtggacctccctatagggtt

SEQ ID NO: 286136 - DNA, 1308 bp, Homo sapiens
ggtgatctaatccagttttctcatcgccctgagagggacaccaaagcccggagagtggagggtatctactctaagaccctttggcttgccttgcaggagtccgctgtggaaggcacatcacatcccacggcctggctctcaactgctctaccgacctcacgtggtttgagcacatcgtgccctgtggactggttgggtcaggcgtcacttccttgagtaaggagctccagaggcacgtcaccgtggaagaagtaatgccacctttccttgtggcctttaaggagatctacaagtgcacactgatctcagaggacagccccaactgaagagtactcataacagccaggatgctcctgccttgggaagcatgaagtctgacttgagtcacctactgaaacccagattttagacctggcctgtcattcactgatcatgaaactaaggacataccatgagctctgagccactattttcatatgtatcctgttttatttatatctttcccacctacctcagagatactagatgtgacaatactgtgaaaagcaacacatgctatataaaacattagcactgctattgacagaagtgtctcagagaaattcagatgtcatagattgttatttctcgattgttgatgtcatagattgtcatttctcgattgttgcttcctcaatactgtgtctaactgagcaattctgggctctagttcctttgattttgtgggaatcaaatctctgaatggcccaggtgaaggtgatgtgatgtagtgctttttcattctcaagagacctgggttctttctgcaataaagggaaaagggaagaaccttctaagaataaaatgggatcttaccttcctgggtttgattccccaagtttgataatttagcagtttttagttgggttaccctgagctaggccaaagactggaggaaggataagaataatttctcacactgtacaaatgccaaagatagaagtgagtttttcttatatgagacctctaaatttgtaaggctgcgtattatctgttgctgtgtaacaaatcatcaaaacttagtgacttaacagtaaacattaattatctcgtttgtgggtcaggaatttgggggaagcttagctgggtgtttctaggttagggtctcacacgaacttgcagttaagatgtcagctggaactgcacttattcaaaggcttggctgggctggaggatcagcgctccatatggtgcattcacttgcgtggttggttatggttgctgacaagaggcctcagttccttaccgtgtggacctccctatagggtt

SEQ ID NO: 286137 - DNA, 860 bp, Homo sapiens
gcggcaacccgccgttcggctggtgcgcctgggtcgggtgccgtacgccgagctactggggctgcaggaccgctggctgcggcggctgcaggccgagccaggcattgaggccccgtcggggactgaggcgggcgcgctcctgctctgcgagcccgcggggcccgtgtatacggccgggctgcgcggcggcctgacgcccgaggaaactgcgcggctacgggccttgggcgccgaggtgcgcgtcacaggccgcggtggcctggccaccttccacggcccgggccagctgctttgccacccggtactcgacctgcggcgtctcggcctgcgcttgcgcatgcacgtagcgtcgctggaggcgtgcgccgtgcgcctgtgcgagctccagggcctgcaggacgcccgcgcgcggcccccgccctacactggcgtctggctagacgatcgcaagatctgcgcgatcggtgagcgccgcggcgcagggcggtacctgagagccgaggtcggagcttgaggcctgggggcggggtctgacggggctggaccaatggaggtgagggccgggaggaggcgtatctagcgcgggttttgaatcacagctacccgctgcgtttgagtttttaagccccttttcagatatcgtatattcagaagcagaaggctcctcacatctagtccaacacgcatttctgtgaagggagagacaagagaagtgaattgccaggttacgtcctgcgaatgacaatgtcatggcaaataagggtgctaattttcaaacttttttttttttttttttgagacagagtctcgctttgtcacccaggctggagtgcagtggcgcaatctcggcccactgcaag

SEQ ID NO: 286138 - DNA, 397 bp, Homo sapiens
gcggccgctaccccgaccactcggtggacaggagagaaggttcaaggtcaatgatgggagaacgagaaggacaggtaagtctgaagctacagtggtagccacagaatttcccatagaatgggttcttttcccttcagcgtgccttcttcctgccctttctttgagcaagaggcaaaatgaggaaagagaaaagtaaagcactagaaaagtctaggtttgtggaatggaaatttgggattatttggggttagtcttggctgtcagtccaaacagttactctgaagctgtttttagccttgaccctggggttctgtgtgccacactcaccacacatgtgcaacagtgccagggaaccttgggatgtgacctggctctgctgggaagtgtctagtgagcc

SEQ ID NO: 286139 - DNA, 3313 bp, Homo sapiens
ggcgccttcctggagcgcggggagatgtaaagatagacaaataattttcccaatgagactgtagaagagagagcaattggccaatgaggactgcggggcgggaccctgtgccgcggcggagtccaagatggcggcgtgcggttccgctgtgtgaaacgagcgcggggcggcgggttactcagctccgcggagacgacctccgacgacccgcaacaatgaagggaaaagagcgctcgccagtgaaggccaaacgctcccgtggtggtgaggactcgacttcccgcggtgagcggagcaagaagttagggggctctggtggcagcaatgggagcagcagcggaaagaccgatagcggcggtgggtcgcggcggagtctcctcctggacaagtccagcagtcgaggtggcagccgcgagtatgataccggtgggggcagctccagtagccgcttgcatagttatagctccccgagcaccaaaaattcttcgggcgggggcgagtcgcgcagcagctcccggggtggaggcggggagtcacgttcctctggggccgcctcctcagctcccggcggcggggacggcgcggaatacaagactctgaagataagcgagttggggtcccagcttagtgacgaagcggtggaggacggcctgtttcatgagttcaaacgcttcggtgatgtaagtgtgaaaatcagtcatctgtcgggttctggcagcggggatgagcgggtagcctttgtgaacttccggcggccagaggacgcgcgggcggccaagcatgccagaggccgcctggtgctctatgaccggcctctgaagatagaagctgtgtatgtgagccggcgccgcagccgctcccctttagacaaagatacttatcctccatcagccagtgtggtcggggcctctgtaggtggtcaccggcacccccctggaggtggtggaggccagagatcactttcccctggtggcgctgctttgggatacagagactaccggctgcagcagttggctcttggccgcctgccccctccacctccgccaccattgcctcgagacctggagagagaaagagactacccgttctatgagagagtgcgccctgcatacagtcttgagccaagggtgggagctggagcaggtgctgctcctttcagagaagtggatgagatttcacccgaggatgatcagcgagctaaccggacgctcttcttgggcaacctagacatcactgtaacggagagtgatttaagaagggcgtttgatcgctttggagtcatcacagaagtagatatcaagaggccttctcgcggccagactagtacttacggctttctcaaatttgagaacttagatatgtctcaccgggccaaattagcaatgtctggcaaaattataattcggaatcctatcaaaattggttatggtaaagctacacccaccacccgcctctgggtgggaggcctgggaccttgggttcctcttgctgccctggcacgagaatttgatcgatttggcaccatacgcaccatagactaccgaaaaggtgatagttgggcatatatccagtatgaaagcctggatgcagcgcatgctgcctggacccatatgcggggcttcccacttggtggcccagatcgacgccttagagtagactttgccgacaccgaacatcgttaccagcagcagtatctgcagcctctgcccttgactcattatgagctggtgacagatgcttttggacatcgggcaccagaccctttgaggggtgctcgggataggacaccacccttactatacagagatcgtgatagggacctttatcctgactctgattgggtgccacccccacccccagtccgagaacgcagcactcggactgcagctacttctgtgcctgcttatgagccactggatagcctagatcgcaggcgggatggttggtccttggaccgggacagaggtgatcgagatctgcccagcagcagagaccagcctaggaagcgaaggctgcctgaggagagtggaggacgtcatctggataggtctcctgagagtgaccgcccacgaaaacgtcactgcgctccttctcctgaccgcagtccagaattgagcagtagccgggatcgttacaacagcgacaatgatcgatcttcccgtcttctcttggaaaggccctctccaatcagagacggacgaggtagtttggagaagagccagggtgacaagcgagaccgtaaaaactctgcatcagctgaacgagataggaagcaccggacaactgctcccactgagggaaaaagccctctgaaaaaagaagaccgctctgatgggagtgcacctagcaccagcactgcttcctccaagctgaagtccccgtcccagaaacaggatggggggacagcccctgtggcatcagcctctcccaaactctgtttggcctggcagggcatgcttctactgaagaacagcaactttccttccaacatgcatctgttgcagggtgacctccaagtggctagtagtcttcttgtggagggttcaactggaggcaaagtggcccagctcaagatcactcagcgtctccgtttggaccagcccaagttggatgaagtaactcgacgcatcaaagtagcagggcccaatggttatgccattcttttggctgtgcctggaagttctgacagccggtcctcctcttcctcagctgcatcagacactgccacttctactcagaggccacttaggaaccttgtgtcctatttaaagcaaaagcaggcagccggggtgatcagcctccctgtggggggcaacaaagacaaggaaaacaccggggtccttcatgccttcccaccttgtgagttctcccagcagttcctggattcccctgccaaggcactggccaaatctgaagaagattacctggtcatgatcattgtccgtgcaaaactggttgaacagcggatgaagatatggaattcaaagctctaatggacctttttgaagagaagttgtggcttatgtggagtttacatgggcctctgatggaagaaagctaatctgtttagtatttgtgcattttactaaaatggcagcttaaagttgtgtatctgctattgtgatgccaatgccggtgttttaagtggaaaaaaaatgacctctttgatttgtgctgtgtacacaagatttctggaaaagtaaagaaaaaccctttttatggctcacacagcttaagagtagctgtctctcaaacgtgcgctcacagttgagctgcttttgttttattctaaataaattgtttcttttgagga

SEQ ID NO: 286140 - DNA, 3424 bp, Homo sapiens
ggcgccttcctggagcgcggggagatgtaaagatagacaaataattttcccaatgagactgtagaagagagagcaattggccaatgaggactgcggggcgggaccctgtgccgcggcggagtccaagatggcggcgtgcggttccgctgtgtgaaacgagcgcggggcggcgggttactcagctccgcggagacgacctccgacgacccgcaacaatgaagggaaaagagcgctcgccagtgaaggccaaacgctcccgtggtggtgaggactcgacttcccgcggtgagcggagcaagaagttagggggctctggtggcagcaatgggagcagcagcggaaagaccgatagcggcggtgggtcgcggcggagtctcctcctggacaagtccagcagtcgaggtggcagccgcgagtatgataccggtgggggcagctccagtagccgcttgcatagttatagctccccgagcaccaaaaattcttcgggcgggggcgagtcgcgcagcagctcccggggtggaggcggggagtcacgttcctctggggccgcctcctcagctcccggcggcggggacggcgcggaatacaagactctgaagataagcgagttggggtcccagcttagtgacgaagcggtggaggacggcctgtttcatgagttcaaacgcttcggtgatgtaagtgtgaaaatcagtcatctgtcgggttctggcagcggggatgagcgggtagcctttgtgaacttccggcggccagaggacgcgcgggcggccaagcatgccagaggccgcctggtgctctatgaccggcctctgaagatagaagctgtgtatgtgagccggcgccgcagccgctcccctttagacaaagatacttatcctccatcagccagtgtggtcggggcctctgtaggtggtcaccggcacccccctggaggtggtggaggccagagatcactttcccctggtggcgctgctttgggatacagagactaccggctgcagcagttggctcttggccgcctgccccctccacctccgccaccattgcctcgagacctggagagagaaagagactacccgttctatgagagagtgcgccctgcatacagtcttgagccaagggtgggagctggagcaggtgctgctcctttcagagaagtggatgagatttcacccgaggatgatcagcgagctaaccggacgctcttcttgggcaacctagacatcactgtaacggagagtgatttaagaagggcgtttgatcgctttggagtcatcacagaagtagatatcaagaggccttctcgcggccagactagtacttacggctttctcaaatttgagaacttagatatgtctcaccgggccaaattagcaatgtctggcaaaattataattcggaatcctatcaaaattggttatggtaaagctacacccaccacccgcctctgggtgggaggcctgggaccttgggttcctcttgctgccctggcacgagaatttgatcgatttggcaccatacgcaccatagactaccgaaaaggtgatagttgggcatatatccagtatgaaagcctggatgcagcgcatgctgcctggacccatatgcggggcttcccacttggtggcccagatcgacgccttagagtagactttgccgacaccgaacatcgttaccagcagcagtatctgcagcctctgcccttgactcattatgagctggtgacagatgcttttggacatcgggcaccagaccctttgaggggtgctcgggataggacaccacccttactatacagagatcgtgatagggacctttatcctgactctgattgggtgccacccccacccccagtccgagaacgcagcactcggactgcagctacttctgtgcctgcttatgagccactggatagcctagatcgcaggcgggatggttggtccttggaccgggacagaggtgatcgagatctgcccagcagcagagaccagcctaggaagcgaaggctgcctgaggagagtggaggacgtcatctggataggtctcctgagagtgaccgcccacgaaaacgtcactgcgctccttctcctgaccgcagtccagaattgagcagtagccgggatcgttacaacagcgacaatgatcgatcttcccgtcttctcttggaaaggccctctccaatcagagacggacgaggtagtttggagaagagccagggtgacaagcgagaccgtaaaaactctgcatcagctgaacgagataggaagcaccggacaactgctcccactgagggaaaaagccctctgaaaaaagaagaccgctctgatgggagtgcacctagcaccagcactgcttcctccaagctgaagtccccgtcccagaaacaggatggggggacagcccctgtggcatcagcctctcccaaactctgtttggcctggcagggcatgcttctactgaagaacagcaactttccttccaacatgcatctgttgcagggtgacctccaagtggctagtagtcttcttgtggagggttcaactggaggcaaagtggcccagctcaagatcactcagcgtctccgtttggaccagcccaagttggatgaagtaactcgacgcatcaaagtagcagggcccaatggttatgccattcttttggctgtgcctggaagttctgacagccggtcctcctcttcctcagctgcatcagacactgccacttctactcagaggccacttaggaaccttgtgtcctatttaaagcaaaagcaggcagccggggtgatcagcctccctgtggggggcaacaaagacaaggaaaacaccggggtccttcatgccttcccaccttgtgagttctcccagcagttcctggattcccctgccaaggcactggccaaatctgaagaagattacctggtcatgatcattgtccgtgggtttggttttcagataggagttaggtatgagaacaagaagagagaaaacttggcgctgaccctgttatagtggttatagtggtgtccctaaagggaggaaatgatttcagcaaaactggttgaacagcggatgaagatatggaattcaaagctctaatggacctttttgaagagaagttgtggcttatgtggagtttacatgggcctctgatggaagaaagctaatctgtttagtatttgtgcattttactaaaatggcagcttaaagttgtgtatctgctattgtgatgccaatgccggtgttttaagtggaaaaaaaatgacctctttgatttgtgctgtgtacacaagatttctggaaaagtaaagaaaaaccctttttatggctcacacagcttaagagtagctgtctctcaaacgtgcgctcacagttgagctgcttttgttttattctaaataaattgtttcttttgagga

SEQ ID NO: 286141 - DNA, 3363 bp, Homo sapiens
ggcgccttcctggagcgcggggagatgtaaagatagacaaataattttcccaatgagactgtagaagagagagcaattggccaatgaggactgcggggcgggaccctgtgccgcggcggagtccaagatggcggcgtgcggttccgctgtgtgaaacgagcgcggggcggcgggttactcagctccgcggagacgacctccgacgacccgcaacaatgaagggaaaagagcgctcgccagtgaaggccaaacgctcccgtggtggtgaggactcgacttcccgcggtgagcggagcaagaagttagggggctctggtggcagcaatgggagcagcagcggaaagaccgatagcggcggtgggtcgcggcggagtctcctcctggacaagtccagcagtcgaggtggcagccgcgagtatgataccggtgggggcagctccagtagccgcttgcatagttatagctccccgagcaccaaaaattcttcgggcgggggcgagtcgcgcagcagctcccggggtggaggcggggagtcacgttcctctggggccgcctcctcagctcccggcggcggggacggcgcggaatacaagactctgaagataagcgagttggggtcccagcttagtgacgaagcggtggaggacggcctgtttcatgagttcaaacgcttcggtgatgtaagtgtgaaaatcagtcatctgtcgggttctggcagcggggatgagcgggtagcctttgtgaacttccggcggccagaggacgcgcgggcggccaagcatgccagaggccgcctggtgctctatgaccggcctctgaagatagaagctgtgtatgtgagccggcgccgcagccgctcccctttagacaaagatacttatcctccatcagccagtgtggtcggggcctctgtaggtggtcaccggcacccccctggaggtggtggaggccagagatcactttcccctggtggcgctgctttgggatacagagactaccggctgcagcagttggctcttggccgcctgccccctccacctccgccaccattgcctcgagacctggagagagaaagagactacccgttctatgagagagtgcgccctgcatacagtcttgagccaagggtgggagctggagcaggtgctgctcctttcagagaagtggatgagatttcacccgaggatgatcagcgagctaaccggacgctcttcttgggcaacctagacatcactgtaacggagagtgatttaagaagggcgtttgatcgctttggagtcatcacagaagtagatatcaagaggccttctcgcggccagactagtacttacggctttctcaaatttgagaacttagatatgtctcaccgggccaaattagcaatgtctggcaaaattataattcggaatcctatcaaaattggttatggtaaagctacacccaccacccgcctctgggtgggaggcctgggaccttgggttcctcttgctgccctggcacgagaatttgatcgatttggcaccatacgcaccatagactaccgaaaaggtgatagttgggcatatatccagtatgaaagcctggatgcagcgcatgctgcctggacccatatgcggggcttcccacttggtggcccagatcgacgccttagagtagactttgccgacaccgaacatcgttaccagcagcagtatctgcagcctctgcccttgactcattatgagctggtgacagatgcttttggacatcgggcaccagaccctttgaggggtgctcgggataggacaccacccttactatacagagatcgtgatagggacctttatcctgactctgattgggtgccacccccacccccagtccgagaacgcagcactcggactgcagctacttctgtgcctgcttatgagccactggatagcctagatcgcaggcgggatggttggtccttggaccgggacagaggtgatcgagatctgcccagcagcagagaccagcctaggaagcgaaggctgcctgaggagagtggaggacgtcatctggataggtctcctgagagtgaccgcccacgaaaacgtcactgcgctccttctcctgaccgcagtccagaattgagcagtagccgggatcgttacaacagcgacaatgatcgatcttcccgtcttctcttggaaaggccctctccaatcagagacggacgaggtagtttggagaagagccagggtgacaagcgagaccgtaaaaactctgcatcagctgaacgagataggaagcaccggacaactgctcccactgagggaaaaagccctctgaaaaaagaagaccgctctgatgggagtgcacctagcaccagcactgcttcctccaagctgaagtccccgtcccagaaacaggatggggggacagcccctgtggcatcagcctctcccaaactctgtttggcctggcagggcatgcttctactgaagaacagcaactttccttccaacatgcatctgttgcagggtgacctccaagtggctagtagtcttcttgtggagggttcaactggaggcaaagtggcccagctcaagatcactcagcgtctccgtttggaccagcccaagttggatgaagtaactcgacgcatcaaagtagcagggcccaatggttatgccattcttttggctgtgcctggaagttctgacagccggtcctcctcttcctcagctgcatcagacactgccacttctactcagaggccacttaggaaccttgtgtcctatttaaagcaaaagcaggcagccggggtgatcagcctccctgtggggggcaacaaagacaaggaaaacaccggggtccttcatgccttcccaccttgtgagttctcccagcagttcctggattcccctgccaaggcactggccaaatctgaagaagattacctggtcatgatcattgtccgtggtgcgtcctaaagtccatgtgtaacttgtatttactactttgacatggttcctgttttgtgatgtgtaatgggatacagcatcagatgcaattttctttttagttgttagttgtagcattttcttttttatatttttataaacgtctttaaaatagaaatcaggacagtttagctatttttttgtttgtttagctattattttaagtgaaagggatgccctaaaggtagcaggcaggcagacagatttgctttaattaggagttcccacccttatgagtaattttttttctctattcagttgttttttttttaatcttgagcttaaaaaatcctcagagttacaaaaccaaaattttgaaaagtcagaatttggagaaaggagtccactgaccatataaagagagtaatagccacct

SEQ ID NO: 286142 - DNA, 1357 bp, Homo sapiens
ccagtgggtattattggtgctttttgaagttgaggtgaaccatccaggaaggtcttgttaatgttatgttcatctataatggcataggggaaatatatatatttttaatattgtaaacatttgtactgaataacctttttttccccccctccgcaagcaaaactggttgaacagcggatgaagatatggaattcaaagctctaatggacctttttgaagagaagttgtggcttatgtggagtttacatgggcctctgatggaagaaagctaatctgtttagtatttgtgcattttactaaaatggcagcttaaagttgtgtatctgctattgtgatgccaatgccggtgttttaagtggaaaaaaaatgacctctttgatttgtgctgtgtacacaagatttctggaaaagtaaagaaaaaccctttttatggctcacacagcttaagagtagctgtctctcaaacgtgcgctcacagttgagctgcttttgttttattctaaataaattgtttcttttgaggaaaatgtttttctgcctggaagtgaattgacggcaaacctttgacccctttgtttgcagccgagggggtgcttgctgctgctcagatcttgtatgtcttgagcaagaagcagggagaccatcaatttcattttgactatcacggtgtgtcaattctgaaggatcactagtgttactgttgaccccctttgtttgcagtgaaggggatcatttgcttctcggttctcaacgtgatgaggaaatggtgctgtttgctggcacgcaagaagccggggcaggcaccctaagcctcaccacagtgcctgagtcgggggcttttgctggtttgaagagctggagttgctgaaatttaagttttgatttattttgttcacccatcacgtttggccttagtttcatttttaatttgaagaaaagtttgaaattgctttatcttgcacttaacatttgcaccaaattgccaaaagaaggagaaatgctccgtttgctttttaaatgttaatgatgatgttaataaagcctttcctgacacatttgaggagctcctccgtctccaggggcttcttaccagagttatgcagtgatgggtttagttctgaatggatgaagagttcctgagagctagcgtttgtaattagaaccgttacttggtatctgtgccttatttgacctttggttccacatgccttggatgtgcatgcaccgtgacggtttcataggtacgaacgcacactcaggcccagtcacttcggttggtagtacagattgtgaggaaaaagatggaggcatccttaaggaggaaaaatgtttgcctttagttcctgcattatcctgt

SEQ ID NO: 286143 - DNA, 1344 bp, Homo sapiens
aatctctcagtttcagcaaagatcttataaagaattttgttgctttcttaaattcatgaaagaaatgtaagcaattgaggtgtgtaattttcttgcccgtattctctatattaaaaaaaaataagaatatggttctatgaatttcttgtgctatttttgctttccttgaattattaaaatatgttgcatagaactaatattgttttcttttttatttttatacaggaaggagagaaatattgttcatgtaatgtgttacctttttttgtctgtgtgatctacaagagcatggctgaaatgttaccatttttaactagtgttttgactgaagattattatgaaaagttttacttttgttagattcctaattaaaaatgcctatactcttttataggagtttcaacttttgcaatttggtaataacagatttaggtaagtaaaaaatgagaatctcatacagttctgaagatctaagtttggttgagaatttaatgtttcatcaccagtaaattcaattaaagacttttgattcaattaaagactcagttctgcctacacctgcaagaactgagttgatctgtacatcaacatttctgatgtttctttggtagttgctgctggagtcagaagttaggaacaaatctaatggcctttgtaatgtcctctgtcatttcacggaggaatgacttagaggaacaaagctttcctgtgatttctttcttcaacagatggctaatggcacagcattgcagttagaatcttgtttaagatactaggagcacgtcctggactaaaaatttctacataagctttagcaacaaccttatagcttcctttgacttttttgtagagcttacagaatgtatggctgcctaagtaatagtctctgaattaatgggtaaaaaatatattatgagttttttatcctcacgtatggtgctaggctatactggatttgggctaacaaaagcttgttaacttttttttgtctcattgacagaagtattttatatctcatattttacattacataggtgtgtgtgtgtgtatgaaataaaagtttgaaaataaagtgatatactcttttttaatctgctctgtggtagtctatctttttccataaaaacaatgagatcatgacccaacaaatttatttcagaactcacatatatacctgtagctttttcttttcaggtaatggtcttcagaaatttgacttgtcttctcggagtattgaactatttaaacattttattttaagaagtatacaaagacacataggacattaaacatgttatagttttgttgcttgtctttttcatttgagtaagatattctatgccc

SEQ ID NO: 286144 - DNA, 1281 bp, Homo sapiens
aggggaatccaggaactgctgggagaactcacaaggtgggaaggcatgaaggagattacctggtcatgatcattgtccgtgcaaaactggttgaacagcggatgaagatatggaattcaaagctctaatggacctttttgaagagaagttgtggcttatgtggagtttacatgggcctctgatggaagaaagctaatctgtttagtatttgtgcattttactaaaatggcagcttaaagttgtgtatctgctattgtgatgccaatgccggtgttttaagtggaaaaaaaatgacctctttgatttgtgctgtgtacacaagatttctggaaaagtaaagaaaaaccctttttatggctcacacagcttaagagtagctgtctctcaaacgtgcgctcacagttgagctgcttttgttttattctaaataaattgtttcttttgaggaaaatgtttttctgcctggaagtgaattgacggcaaacctttgacccctttgtttgcagccgagggggtgcttgctgctgctcagatcttgtatgtcttgagcaagaagcagggagaccatcaatttcattttgactatcacggtgtgtcaattctgaaggatcactagtgttactgttgaccccctttgtttgcagtgaaggggatcatttgcttctcggttctcaacgtgatgaggaaatggtgctgtttgctggcacgcaagaagccggggcaggcaccctaagcctcaccacagtgcctgagtcgggggcttttgctggtttgaagagctggagttgctgaaatttaagttttgatttattttgttcacccatcacgtttggccttagtttcatttttaatttgaagaaaagtttgaaattgctttatcttgcacttaacatttgcaccaaattgccaaaagaaggagaaatgctccgtttgctttttaaatgttaatgatgatgttaataaagcctttcctgacacatttgaggagctcctccgtctccaggggcttcttaccagagttatgcagtgatgggtttagttctgaatggatgaagagttcctgagagctagcgtttgtaattagaaccgttacttggtatctgtgccttatttgacctttggttccacatgccttggatgtgcatgcaccgtgacggtttcataggtacgaacgcacactcaggcccagtcacttcggttggtagtacagattgtgaggaaaaagatggaggcatccttaaggaggaaaaatgtttgcctttagttcctgcattatcctgt

SEQ ID NO: 286145 - DNA, 524 bp, Homo sapiens
ccagtgggtattattggtgctttttgaagttgaggtgaaccatccaggaaggtcttgttaatgttatgttcatctataatggcataggggaaatatatatatttttaatattgtaaacatttgtactgaataacctttttttccccccctccgcaagcaaaactggttgaacagcggatgaagatatggaattcaaagctctaatggacctttttgaagagaagttgtggcttatgtggagtttacatgggcctctgatggaagaaagctaatctgtttagtatttgtgcattttactaaaatggcagcttaaagttgtgtatctgctattgtgatgccaatgccggtgttttaagtggaaaaaaaatgacctctttgatttgtgctgtgtacacaagatttctggaaaagtaaagaaaaaccctttttatggctcacacagcttaagagtagctgtctctcaaacgtgcgctcacagttgagctgcttttgttttattctaaataaattgtttcttttgagga

SEQ ID NO: 286146 - DNA, 1962 bp, Homo sapiens
ggcgccttcctggagcgcggggagatgtaaagatagacaaataattttcccaatgagactgtagaagagagagcaattggccaatgaggactgcggggcgggaccctgtgccgcggcggagtccaagatggcggcgtgcggttccgctgtgtgaaacgagcgcggggcggcgggttactcagctccgcggagacgacctccgacgacccgcaacaatgaagggaaaagagcgctcgccagtgaaggccaaacgctcccgtggtggtgaggactcgacttcccgcggtgagcggagcaagaagttagggggctctggtggcagcaatgggagcagcagcggaaagaccgatagcggcggtgggtcgcggcggagtctcctcctggacaagtccagcagtcgaggtggcagccgcgagtatgataccggtgggggcagctccagtagccgcttgcatagttatagctccccgagcaccaaaaattcttcgggcgggggcgagtcgcgcagcagctcccggggtggaggcggggagtcacgttcctctggggccgcctcctcagctcccggcggcggggacggcgcggaatacaagactctgaagataagcgagttggggtcccagcttagtgacgaagcggtggaggacggcctgtttcatgagttcaaacgcttcggtgatgtaagtgtgaaaatcagtcatctgtcgggttctggcagcggggatgagcgggtagcctttgtgaacttccggcggccagaggacgcgcgggcggccaagcatgccagaggccgcctggtgctctatgaccggcctctgaagatagaagctgtgtatgtgagccggcgccgcagccgctcccctttagacaaagatacttatcctccatcagccagtgtggtcggggcctctgtaggtggtcaccggcacccccctggaggtggtggaggccagagatcactttcccctggtggcgctgctttgggatacagagactaccggctgcagcagttggctcttggccgcctgccccctccacctccgccaccattgcctcgagacctggagagagaaagagactacccgttctatgagagagtgcgccctgcatacagtcttgagccaagggtgggagctggagcaggtgctgctcctttcagagaagtggatgagatttcacccgaggatgatcagcgagctaaccggacgctcttcttgggcaacctagacatcactgtaacggagagtgatttaagaagggcgtttgatcgctttggagtcatcacagaagtagatatcaagaggccttctcgcggccagactagtacttacggctttctcaaatttgagaacttagatatgtctcaccgggccaaattagcaatgtctggcaaaattataattcggaatcctatcaaaattggttatggtaaacaacaaccttatagcttcctttgacttttttgtagagcttacagaatgtatggctgcctaagtaatagtctctgaattaatgggtaaaaaatatattatgagttttttatcctcacgtatggtgctaggctatactggatttgggctaacaaaagcttgttaacttttttttgtctcattgacagaagtattttatatctcatattttacattacataggtgtgtgtgtgtgtatgaaataaaagtttgaaaataaagtgatatactcttttttaatctgctctgtggtagtctatctttttccataaaaacaatgagatcatgacccaacaaatttatttcagaactcacatatatacctgtagctttttcttttcaggtaatggtcttcagaaatttgacttgtcttctcggagtattgaactatttaaacattttattttaagaagtatacaaagacacataggacattaaacatgttatagttttgttgcttgtctttttcatttgagtaagatattctatgccc

SEQ ID NO: 286147 - DNA, 1392 bp, Homo sapiens
  misc_feature (794)..(794): n is a, c, g, or t
  misc_feature (802)..(802): n is a, c, g, or t
  misc_feature (804)..(804): n is a, c, g, or t
  misc_feature (837)..(838): n is a, c, g, or t
aatctctcagtttcagcaaagatcttataaagaattttgttgctttcttaaattcatgaaagaaatgtaagcaattgaggtgtgtaattttcttgcccgtattctctatattaaaaaaaaataagaatatggttctatgaatttcttgtgctatttttgctttccttgaattattaaaatatgttgcatagaactaatattgttttcttttttatttttatacaggaaggagagaaatattgttcatgtaatgtgttacctttttttgtctgtgtgatctacaagagcatggctgaaatgttaccatttttaactagtgttttgactgaagattattatgaaaagttttacttttgttagattcctaattaaaaatgcctatactcttttataggagtttcaacttttgcaatttggtaataacagatttaggtaagtaaaaaatgagaatctcatacagttctgaagatctaagtttggttgagaatttaatgtttcatcaccagtaaattcaattaaagacttttgattcaattaaagactcagttctgcctacacctgcaagaactgagttgatctgtacatcaacatttctgatgtttctttggtagttgctgctggagtcagaagttaggaacaaatctaatggcctttgtaatgtcctctgtcatttcacggaggaatgacttagaggaacaaagctttcctgtgatttctttcttcaacagatggctaatggcacagcattgcagttagaatcttttggggtttttcttcttttaacaagaaaaatnaccttaangnggaggggcgccaaacccggtgggttccctggannctaaaaatttctacataagctttagcaacaaccttatagcttcctttgacttttttgtagagcttacagaatgtatggctgcctaagtaatagtctctgaattaatgggtaaaaaatatattatgagttttttatcctcacgtatggtgctaggctatactggatttgggctaacaaaagcttgttaacttttttttgtctcattgacagaagtattttatatctcatattttacattacataggtgtgtgtgtgtgtatgaaataaaagtttgaaaataaagtgatatactcttttttaatctgctctgtggtagtctatctttttccataaaaacaatgagatcatgacccaacaaatttatttcagaactcacatatatacctgtagctttttcttttcaggtaatggtcttcagaaatttgacttgtcttctcggagtattgaactatttaaacattttattttaagaagtatacaaagacacataggacattaaacatgttatagttttgttgcttgtctttttcatttgagtaagatattctatgccc

SEQ ID NO: 286148 - DNA, 4146 bp, Homo sapiens
ggcgccttcctggagcgcggggagatgtaaagatagacaaataattttcccaatgagactgtagaagagagagcaattggccaatgaggactgcggggcgggaccctgtgccgcggcggagtccaagatggcggcgtgcggttccgctgtgtgaaacgagcgcggggcggcgggttactcagctccgcggagacgacctccgacgacccgcaacaatgaagggaaaagagcgctcgccagtgaaggccaaacgctcccgtggtggtgaggactcgacttcccgcggtgagcggagcaagaagttagggggctctggtggcagcaatgggagcagcagcggaaagaccgatagcggcggtgggtcgcggcggagtctcctcctggacaagtccagcagtcgaggtggcagccgcgagtatgataccggtgggggcagctccagtagccgcttgcatagttatagctccccgagcaccaaaaattcttcgggcgggggcgagtcgcgcagcagctcccggggtggaggcggggagtcacgttcctctggggccgcctcctcagctcccggcggcggggacggcgcggaatacaagactctgaagataagcgagttggggtcccagcttagtgacgaagcggtggaggacggcctgtttcatgagttcaaacgcttcggtgatgtaagtgtgaaaatcagtcatctgtcgggttctggcagcggggatgagcgggtagcctttgtgaacttccggcggccagaggacgcgcgggcggccaagcatgccagaggccgcctggtgctctatgaccggcctctgaagatagaagctgtgtatgtgagccggcgccgcagccgctcccctttagacaaagatacttatcctccatcagccagtgtggtcggggcctctgtaggtggtcaccggcacccccctggaggtggtggaggccagagatcactttcccctggtggcgctgctttgggatacagagactaccggctgcagcagttggctcttggccgcctgccccctccacctccgccaccattgcctcgagacctggagagagaaagagactacccgttctatgagagagtgcgccctgcatacagtcttgagccaagggtgggagctggagcaggtgctgctcctttcagagaagtggatgagatttcacccgaggatgatcagcgagctaaccggacgctcttcttgggcaacctagacatcactgtaacggagagtgatttaagaagggcgtttgatcgctttggagtcatcacagaagtagatatcaagaggccttctcgcggccagactagtacttacggctttctcaaatttgagaacttagatatgtctcaccgggccaaattagcaatgtctggcaaaattataattcggaatcctatcaaaattggttatggtaaagctacacccaccacccgcctctgggtgggaggcctgggaccttgggttcctcttgctgccctggcacgagaatttgatcgatttggcaccatacgcaccatagactaccgaaaaggtgatagttgggcatatatccagtatgaaagcctggatgcagcgcatgctgcctggacccatatgcggggcttcccacttggtggcccagatcgacgccttagagtagactttgccgacaccgaacatcgttaccagcagcagtatctgcagcctctgcccttgactcattatgagctggtgacagatgcttttggacatcgggcaccagaccctttgaggggtgctcgggataggacaccacccttactatacagagatcgtgatagggacctttatcctgactctgattgggtgccacccccacccccagtccgagaacgcagcactcggactgcagctacttctgtgcctgcttatgagccactggatagcctagatcgcaggcgggatggttggtccttggaccgggacagaggtgatcgagatctgcccagcagcagagaccagcctaggaagcgaaggctgcctgaggagagtggaggacgtcatctggataggtctcctgagagtgaccgcccacgaaaacgtcactgcgctccttctcctgaccgcagtccagaattgagcagtagccgggatcgttacaacagcgacaatgatcgatcttcccgtcttctcttggaaaggccctctccaatcagagacggacgaggtagtttggagaagagccagggtgacaagcgagaccgtaaaaactctgcatcagctgaacgagataggaagcaccggacaactgctcccactgagggaaaaagccctctgaaaaaagaagaccgctctgatgggagtgcacctagcaccagcactgcttcctccaagctgaagtccccgtcccagaaacaggatggggggacagcccctgtggcatcagcctctcccaaactctgtttggcctggcagggcatgcttctactgaagaacagcaactttccttccaacatgcatctgttgcagggtgacctccaagtggctagtagtcttcttgtggagggttcaactggaggcaaagtggcccagctcaagatcactcagcgtctccgtttggaccagcccaagttggatgaagtaactcgacgcatcaaagtagcagggcccaatggttatgccattcttttggctgtgcctggaagttctgacagccggtcctcctcttcctcagctgcatcagacactgccacttctactcagaggccacttaggaaccttgtgtcctatttaaagcaaaagcaggcagccggggtgatcagcctccctgtggggggcaacaaagacaaggaaaacaccggggtccttcatgccttcccaccttgtgagttctcccagcagttcctggattcccctgccaaggcactggccaaatctgaagaagattacctggtcatgatcattgtccgtgcaaaactggttgaacagcggatgaagatatggaattcaaagctctaatggacctttttgaagagaagttgtggcttatgtggagtttacatgggcctctgatggaagaaagctaatctgtttagtatttgtgcattttactaaaatggcagcttaaagttgtgtatctgctattgtgatgccaatgccggtgttttaagtggaaaaaaaatgacctctttgatttgtgctgtgtacacaagatttctggaaaagtaaagaaaaaccctttttatggctcacacagcttaagagtagctgtctctcaaacgtgcgctcacagttgagctgcttttgttttattctaaataaattgtttcttttgaggaaaatgtttttctgcctggaagtgaattgacggcaaacctttgacccctttgtttgcagccgagggggtgcttgctgctgctcagatcttgtatgtcttgagcaagaagcagggagaccatcaatttcattttgactatcacggtgtgtcaattctgaaggatcactagtgttactgttgaccccctttgtttgcagtgaaggggatcatttgcttctcggttctcaacgtgatgaggaaatggtgctgtttgctggcacgcaagaagccggggcaggcaccctaagcctcaccacagtgcctgagtcgggggcttttgctggtttgaagagctggagttgctgaaatttaagttttgatttattttgttcacccatcacgtttggccttagtttcatttttaatttgaagaaaagtttgaaattgctttatcttgcacttaacatttgcaccaaattgccaaaagaaggagaaatgctccgtttgctttttaaatgttaatgatgatgttaataaagcctttcctgacacatttgaggagctcctccgtctccaggggcttcttaccagagttatgcagtgatgggtttagttctgaatggatgaagagttcctgagagctagcgtttgtaattagaaccgttacttggtatctgtgccttatttgacctttggttccacatgccttggatgtgcatgcaccgtgacggtttcataggtacgaacgcacactcaggcccagtcacttcggttggtagtacagattgtgaggaaaaagatggaggcatccttaaggaggaaaaatgtttgcctttagttcctgcattatcctgt

SEQ ID NO: 286149 - DNA, 4257 bp, Homo sapiens
ggcgccttcctggagcgcggggagatgtaaagatagacaaataattttcccaatgagactgtagaagagagagcaattggccaatgaggactgcggggcgggaccctgtgccgcggcggagtccaagatggcggcgtgcggttccgctgtgtgaaacgagcgcggggcggcgggttactcagctccgcggagacgacctccgacgacccgcaacaatgaagggaaaagagcgctcgccagtgaaggccaaacgctcccgtggtggtgaggactcgacttcccgcggtgagcggagcaagaagttagggggctctggtggcagcaatgggagcagcagcggaaagaccgatagcggcggtgggtcgcggcggagtctcctcctggacaagtccagcagtcgaggtggcagccgcgagtatgataccggtgggggcagctccagtagccgcttgcatagttatagctccccgagcaccaaaaattcttcgggcgggggcgagtcgcgcagcagctcccggggtggaggcggggagtcacgttcctctggggccgcctcctcagctcccggcggcggggacggcgcggaatacaagactctgaagataagcgagttggggtcccagcttagtgacgaagcggtggaggacggcctgtttcatgagttcaaacgcttcggtgatgtaagtgtgaaaatcagtcatctgtcgggttctggcagcggggatgagcgggtagcctttgtgaacttccggcggccagaggacgcgcgggcggccaagcatgccagaggccgcctggtgctctatgaccggcctctgaagatagaagctgtgtatgtgagccggcgccgcagccgctcccctttagacaaagatacttatcctccatcagccagtgtggtcggggcctctgtaggtggtcaccggcacccccctggaggtggtggaggccagagatcactttcccctggtggcgctgctttgggatacagagactaccggctgcagcagttggctcttggccgcctgccccctccacctccgccaccattgcctcgagacctggagagagaaagagactacccgttctatgagagagtgcgccctgcatacagtcttgagccaagggtgggagctggagcaggtgctgctcctttcagagaagtggatgagatttcacccgaggatgatcagcgagctaaccggacgctcttcttgggcaacctagacatcactgtaacggagagtgatttaagaagggcgtttgatcgctttggagtcatcacagaagtagatatcaagaggccttctcgcggccagactagtacttacggctttctcaaatttgagaacttagatatgtctcaccgggccaaattagcaatgtctggcaaaattataattcggaatcctatcaaaattggttatggtaaagctacacccaccacccgcctctgggtgggaggcctgggaccttgggttcctcttgctgccctggcacgagaatttgatcgatttggcaccatacgcaccatagactaccgaaaaggtgatagttgggcatatatccagtatgaaagcctggatgcagcgcatgctgcctggacccatatgcggggcttcccacttggtggcccagatcgacgccttagagtagactttgccgacaccgaacatcgttaccagcagcagtatctgcagcctctgcccttgactcattatgagctggtgacagatgcttttggacatcgggcaccagaccctttgaggggtgctcgggataggacaccacccttactatacagagatcgtgatagggacctttatcctgactctgattgggtgccacccccacccccagtccgagaacgcagcactcggactgcagctacttctgtgcctgcttatgagccactggatagcctagatcgcaggcgggatggttggtccttggaccgggacagaggtgatcgagatctgcccagcagcagagaccagcctaggaagcgaaggctgcctgaggagagtggaggacgtcatctggataggtctcctgagagtgaccgcccacgaaaacgtcactgcgctccttctcctgaccgcagtccagaattgagcagtagccgggatcgttacaacagcgacaatgatcgatcttcccgtcttctcttggaaaggccctctccaatcagagacggacgaggtagtttggagaagagccagggtgacaagcgagaccgtaaaaactctgcatcagctgaacgagataggaagcaccggacaactgctcccactgagggaaaaagccctctgaaaaaagaagaccgctctgatgggagtgcacctagcaccagcactgcttcctccaagctgaagtccccgtcccagaaacaggatggggggacagcccctgtggcatcagcctctcccaaactctgtttggcctggcagggcatgcttctactgaagaacagcaactttccttccaacatgcatctgttgcagggtgacctccaagtggctagtagtcttcttgtggagggttcaactggaggcaaagtggcccagctcaagatcactcagcgtctccgtttggaccagcccaagttggatgaagtaactcgacgcatcaaagtagcagggcccaatggttatgccattcttttggctgtgcctggaagttctgacagccggtcctcctcttcctcagctgcatcagacactgccacttctactcagaggccacttaggaaccttgtgtcctatttaaagcaaaagcaggcagccggggtgatcagcctccctgtggggggcaacaaagacaaggaaaacaccggggtccttcatgccttcccaccttgtgagttctcccagcagttcctggattcccctgccaaggcactggccaaatctgaagaagattacctggtcatgatcattgtccgtgggtttggttttcagataggagttaggtatgagaacaagaagagagaaaacttggcgctgaccctgttatagtggttatagtggtgtccctaaagggaggaaatgatttcagcaaaactggttgaacagcggatgaagatatggaattcaaagctctaatggacctttttgaagagaagttgtggcttatgtggagtttacatgggcctctgatggaagaaagctaatctgtttagtatttgtgcattttactaaaatggcagcttaaagttgtgtatctgctattgtgatgccaatgccggtgttttaagtggaaaaaaaatgacctctttgatttgtgctgtgtacacaagatttctggaaaagtaaagaaaaaccctttttatggctcacacagcttaagagtagctgtctctcaaacgtgcgctcacagttgagctgcttttgttttattctaaataaattgtttcttttgaggaaaatgtttttctgcctggaagtgaattgacggcaaacctttgacccctttgtttgcagccgagggggtgcttgctgctgctcagatcttgtatgtcttgagcaagaagcagggagaccatcaatttcattttgactatcacggtgtgtcaattctgaaggatcactagtgttactgttgaccccctttgtttgcagtgaaggggatcatttgcttctcggttctcaacgtgatgaggaaatggtgctgtttgctggcacgcaagaagccggggcaggcaccctaagcctcaccacagtgcctgagtcgggggcttttgctggtttgaagagctggagttgctgaaatttaagttttgatttattttgttcacccatcacgtttggccttagtttcatttttaatttgaagaaaagtttgaaattgctttatcttgcacttaacatttgcaccaaattgccaaaagaaggagaaatgctccgtttgctttttaaatgttaatgatgatgttaataaagcctttcctgacacatttgaggagctcctccgtctccaggggcttcttaccagagttatgcagtgatgggtttagttctgaatggatgaagagttcctgagagctagcgtttgtaattagaaccgttacttggtatctgtgccttatttgacctttggttccacatgccttggatgtgcatgcaccgtgacggtttcataggtacgaacgcacactcaggcccagtcacttcggttggtagtacagattgtgaggaaaaagatggaggcatccttaaggaggaaaaatgtttgcctttagttcctgcattatcctgt

SEQ ID NO: 286150 - DNA, 3293 bp, Homo sapiens
ggcgccttcctggagcgcggggagatgtaaagatagacaaataattttcccaatgagactgtagaagagagagcaattggccaatgaggactgcggggcgggaccctgtgccgcggcggagtccaagatggcggcgtgcggttccgctgtgtgaaacgagcgcggggcggcgggttactcagctccgcggagacgacctccgacgacccgcaacaatgaagggaaaagagcgctcgccagtgaaggccaaacgctcccgtggtggtgaggactcgacttcccgcggtgagcggagcaagaagttagggggctctggtggcagcaatgggagcagcagcggaaagaccgatagcggcggtgggtcgcggcggagtctcctcctggacaagtccagcagtcgaggtggcagccgcgagtatgataccggtgggggcagctccagtagccgcttgcatagttatagctccccgagcaccaaaaattcttcgggcgggggcgagtcgcgcagcagctcccggggtggaggcggggagtcacgttcctctggggccgcctcctcagctcccggcggcggggacggcgcggaatacaagactctgaagataagcgagttggggtcccagcttagtgacgaagcggtggaggacggcctgtttcatgagttcaaacgcttcggtgatgtaagtgtgaaaatcagtcatctgtcgggttctggcagcggggatgagcgggtagcctttgtgaacttccggcggccagaggacgcgcgggcggccaagcatgccagaggccgcctggtgctctatgaccggcctctgaagatagaagctgtgtatgtgagccggcgccgcagccgctcccctttagacaaagatacttatcctccatcagccagtgtggtcggggcctctgtaggtggtcaccggcacccccctggaggtggtggaggccagagatcactttcccctggtggcgctgctttgggatacagagactaccggctgcagcagttggctcttggccgcctgccccctccacctccgccaccattgcctcgagacctggagagagaaagagactacccgttctatgagagagtgcgccctgcatacagtcttgagccaagggtgggagctggagcaggtgctgctcctttcagagaagtggatgagatttcacccgaggatgatcagcgagctaaccggacgctcttcttgggcaacctagacatcactgtaacggagagtgatttaagaagggcgtttgatcgctttggagtcatcacagaagtagatatcaagaggccttctcgcggccagactagtacttacggctttctcaaatttgagaacttagatatgtctcaccgggccaaattagcaatgtctggcaaaattataattcggaatcctatcaaaattggttatggtaaagctacacccaccacccgcctctgggtgggaggcctgggaccttgggttcctcttgctgccctggcacgagaatttgatcgatttggcaccatacgcaccatagactaccgaaaaggtgatagttgggcatatatccagtatgaaagcctggatgcagcgcatgctgcctggacccatatgcggggcttcccacttggtggcccagatcgacgccttagagtagactttgccgacaccgaacatcgttaccagcagcagtatctgcagcctctgcccttgactcattatgagctggtgacagatgcttttggacatcgggcaccagaccctttgaggggtgctcgggataggacaccacccttactatacagagatcgtgatagggacctttatcctgactctgattgggtgccacccccacccccagtccgagaacgcagcactcggactgcagctacttctgtgcctgcttatgagccactggatagcctagatcgcaggcgggatggttggtccttggaccgggacagaggtgatcgagatctgcccagcagcagagaccagcctaggaagcgaaggctgcctgaggagagtggaggacgtcatctggataggtctcctgagagtgaccgcccacgaaaacgtcactgcgctccttctcctgaccgcagtccagaattgagcagtagccgggatcgttacaacagcgacaatgatcgatcttcccgtcttctcttggaaaggccctctccaatcagagacggacgaggtagtttggagaagagccagggtgacaagcgagaccgtaaaaactctgcatcagctgaacgagataggaagcaccggacaactgctcccactgagggaaaaagccctctgaaaaaagaagaccgctctgatgggagtgcacctagcaccagcactgcttcctccaagctgaagtccccgtcccagaaacaggatggggggacagcccctgtggcatcagcctctcccaaactctgtttggcctggcagggcatgcttctactgaagaacagcaactttccttccaacatgcatctgttgcagggtgacctccaagtggctagtagtcttcttgtggagggttcaactggaggcaaagtggcccagctcaagatcactcagcgtctccgtttggaccagcccaagttggatgaagtaactcgacgcatcaaagtagcagggcccaatggttatgccattcttttggctgtgcctggaagttctgacagccggtcctcctcttcctcagctgcatcagacactgccacttctactcagaggccacttaggaaccttgtgtcctatttaaagcaaaagcaggcagccggggtgatcagcctccctgtggggggcaacaaagacaaggaaaacaccggggtccttcatgccttcccaccttgtgagttctcccagcagttcctggattcccctgccaaggcactggccaaatctgaagaagattacctggtcatgatcattgtccgtgggtttggttttcagataggagttaggtatgagaacaagaagagagaaaacttggcgctgaccctgttatagtggttatagtggtgtccctaaagggaggaaatgatttcaggtaaccacagtgaaatgttaagctgaatgaagagttttatatgtatggtttaaacagagttgaaaagtgagattcctgaagtgttctttggctgtttaacaattatttgtatgagtgttttattaaaataacggctgctgtctttggtaacatagatgagggtggatttttaaatggctttgtatcgacccctttctacaataatggagtagtctatgttgctccatataaattac

SEQ ID NO: 286151 - DNA, 846 bp, Homo sapiens
gtgtcttaaatcttagctgttttgcataatgcatgatcctctctctctctctctgtctctttctctctctctctctccctctgtttttcagaggtgagggtcctgctgtgttacccaggccggagtgcagtgactacttacaggcacgatcatagtgcactagagccttgaactcccgggctccagtattactcctgcctcagcctcctgagtatctgggactataggagtgcaccaccattcctggcataatcctctttttatgttgagttgaagaaagtcacaagacgtgagacgctttatgttgcagttaatggtctcttcctcccttttctctgttcctgcaaatggacaattattccttctcacaaggtttttggcttcccacttcagcatgcctccagcagtgttctaaaattactctacaattgccaaagtaagagcagcagatgctctaaatctatttccaggacacccgtctcatgatcaaggtataaattctgcagtgatcaaaattcataaaggaaaatgaggctcctgcgtgtgtgtattagaagataattatgcaggcatgtagaagttgtattccagtttttattaacaaattcattacattatttaatgatttaaaaaaatctccctaagactaaaattaagaaaatcttagtaatgaagtatcattagaaaattaacttgttattgtggatttgaaatctctagctcctcatcgttattttaaaattctattgaaggatcattttgaagcacttatgaaaaacaaaaaaatttagaacataattttttgttatgcaaggtaattgcagctacaatttggattctaagaga

SEQ ID NO: 286152 - DNA, 692 bp, Homo sapiens
gtgtcttaaatcttagctgttttgcataatgcatgatcctctctctctctctctgtctctttctctctctctctctccctctgtttttcagaggtgagggtcctgctgtgttacccaggccggagtgcagtgactacttacaggcacgatcatagtgcactagagccttgaactcccgggctccagtattactcctgcctcagcctcctgagtatctgggactataggagtgcaccaccattcctggcataatcctctttttatgttgagttgaagaaagtcacaagacgtgagacgctttatgttgcagttaatggtctcttcctcccttttctctgttcctgcaaatggacaattattccttctcacaaggtttttggcttcccacttcagcatgcctccagcagtgttctaaaattactctacaattgccaaagtaagagcagcagatgctctaaatctatttccaggacacccgtctcatgatcaagaaatggggtccaaactccttggctgccagatgagcaagtaagtactggagtaaagatgctgcgcaaaaggcaaaatgatgtcaaagcagtgtaaactgatacagatcaaagaacaggagtggaaaattgcaagcagggatatgtagcggctctgtatggcccaatgtgctcaaaactctccagaggttgttaatttcctgg

SEQ ID NO: 286153 - DNA, 757 bp, Homo sapiens
gtgtcttaaatcttagctgttttgcataatgcatgatcctctctctctctctctgtctctttctctctctctctctccctctgtttttcagaggtgagggtcctgctgtgttacccaggccggagtgcagtgactacttacaggcacgatcatagtgcactagagccttgaactcccgggctccagtattactcctgcctcagcctcctgagtatctgggactataggagtgcaccaccattcctggcataatcctctttttatgttgagttgaagaaagtcacaagacgtgagacgctttatgttgcagttaatggtctcttcctcccttttctctgttcctgcaaatggacaattattccttctcacaaggtttttggcttcccacttcagcatgcctccagcagtgttctaaaattactctacaattgccaaagtaagagcagcagatgctctaaatctatttccaggacacccgtctcatgatcaagaacaactgctgctgacaagtacccaagagcatatctgtgcctcagtttcctaatttgtaaacggagataacaatagtacttccattttggagttgctgtgaggaaaaaactggagtaaagatgctgcgcaaaaggcaaaatgatgtcaaagcagtgtaaactgatacagatcaaagaacaggagtggaaaattgcaagcagggatatgtagcggctctgtatggcccaatgtgctcaaaactctccagaggttgttaatttcctgg

SEQ ID NO: 286154 - DNA, 917 bp, Homo sapiens
  misc_feature (643)..(643): n is a, c, g, or t
  misc_feature (648)..(648): n is a, c, g, or t
  misc_feature (654)..(654): n is a, c, g, or t
  misc_feature (685)..(685): n is a, c, g, or t
ggcctcgcctccggggctcgggatgagtcgcgggccccagctgagcggctccggctccaggcgcctgtcgctgcttctgccgtcgccaccgaagagcggccgccgcccctgagggaaggagggagggaagcagccgctgacccgtggcatgagctggatgcggtgtccgttgcaggactagggcgccgacatgaacctgcaccaggtgctgaccggggctgtgaaccctggcgaccactgcttctccgtgggcagcattggcgaccagcgcttcacggcttatgcatctggatgtgacattgtaatactgggaagcgattttgaaagattacagataatcccaggagctaaacatggaaatattcaagtgggatgtgtagactgttcaatgcaacaaggcaagattgcagcgtcttatggaaatgttatctccatttttgaaccagttaacctaccaaaacaaaagaaaaatttggaattatatagtcagtggcagaaaagtggccaattttttctggaatcaatagcacacaatataacctgggatcccacaggcagtcgtcttttaactggttccagctatttgcaactctggtccaatactaacttggagaagccaactgaagatgaaaatttaaataanacagntcttanctttggagattggaaatgcatttggcattgnaaaactgcttcccaagttcatttaatgaaattttcaccagatggagaattttttgccactgctgggaaggatgactgtcttttgacggttcggtataatgtagaaaactggcggacagctgttacttctccagatggaagttcagaaaaacaatcccaaggagacattgacttttcttttgtgtatctggcccatcctcgagcagtaaatggattttcctggcgtaaaacaa

SEQ ID NO: 286155 - DNA, 795 bp, Homo sapiens
  misc_feature (521)..(521): n is a, c, g, or t
  misc_feature (526)..(526): n is a, c, g, or t
  misc_feature (532)..(532): n is a, c, g, or t
  misc_feature (563)..(563): n is a, c, g, or t
gcggctgcccgaggtccagaggaagtgtgtggacagcgcggccttcctggccggactagggcgccgacatgaacctgcaccaggtgctgaccggggctgtgaaccctggcgaccactgcttctccgtgggcagcattggcgaccagcgcttcacggcttatgcatctggatgtgacattgtaatactgggaagcgattttgaaagattacagataatcccaggagctaaacatggaaatattcaagtgggatgtgtagactgttcaatgcaacaaggcaagattgcagcgtcttatggaaatgttatctccatttttgaaccagttaacctaccaaaacaaaagaaaaatttggaattatatagtcagtggcagaaaagtggccaattttttctggaatcaatagcacacaatataacctgggatcccacaggcagtcgtcttttaactggttccagctatttgcaactctggtccaatactaacttggagaagccaactgaagatgaaaatttaaataanacagntcttanctttggagattggaaatgcatttggcattgnaaaactgcttcccaagttcatttaatgaaattttcaccagatggagaattttttgccactgctgggaaggatgactgtcttttgacggttcggtataatgtagaaaactggcggacagctgttacttctccagatggaagttcagaaaaacaatcccaaggagacattgacttttcttttgtgtatctggcccatcctcgagcagtaaatggattttcctggcgtaaaacaa

SEQ ID NO: 286156 - DNA, 332 bp, Homo sapiens
gggagggaagcagccgctgacccgtggcatgagctggatgcggtgtccgttgcaggactagggcgccgacatgaacctgcaccaggtgctgaccggggctgtgaaccctggcgaccactgcttctccgtgggcagcattggcgaccagcgcttcacggtgagtgagggaggccctcgcgtcgcccgtggcccggcctttgcccgtcattctgggccgagcttggcccagaacgacgggcagaggcgcgaggtcttgtctccccaggggggtccttaccacccagaacccagcagacctggcccttgagaactaaggaagcaaaaccatgtcg

SEQ ID NO: 286157 - DNA, 232 bp, Homo sapiens
tggaaggtaagggttcatacgttccttactctgtcagccattatcaggtgactgctgtggctggcactgtgctctcagctagagggaagacaagataaattctgctctggaagaacttacattctggttagagagccagacaaatatgtaattatggtaagatgtgtcgggtgttacccagaggtgtaagtgtagatcccagagagcctgggacaggcagctccaggagagc

SEQ ID NO: 286158 - DNA, 413 bp, Homo sapiens
actgaaagttgcatgtgttttaaaggggcataagcttgtggagaacctttctctttggtttagctgcatcgatatgctgattttttaaaatgcactgaacatgcaaaaatgagtatattattgacctcaaatcaatgcccatcactgtttctatcttatacagtgagcttcttggctttttaatattttcattgtgaagttattccaatgaagacaaaattttgtcaaatttattacccagggagctttcaaaatgaagcagagagactttgaccgagcaatttcacttctggaattttattctacttatgcatacttatacatatgtgcaaagacatatatatctgaaagtttattattttttcgaagcattgtttatagggagaaaaagcaggtaacagcccaactgtcct

SEQ ID NO: 286159 - DNA, 1321 bp, Homo sapiens
  misc_feature (3)..(5): n is a, c, g, or t
ggnnnggggccggctgctcaggggaagcccaggctctccgacccagctaccgggaatggggcaccctttggagaagaaccccagcctggggtggggacgcaccggctctccgacagctcaaacacagacagatcttctagagccgagggaatttcttttcgcagaagccattactccccccgccccctaatcgccaccaagccctcctgctgaattctcgcctagcatcctgtcctttcctgtccagcactcacctccatttgtaatgatccatgcctgggagtatttgtttagtgctcacttccgtgacactgtggaagacaggctcagtctccctcactaacctgtgacctgggtcagttttgctccagagggaatccttacggcacagcagtgtacctgtatatagggatggtacgccatgaaggccctcagcaattgctggcaccttgatattggacttctcagcctccagaaacatgagaaatacatttcttttctttataaattacccagtctgtgctattaggttatagcaacacaaaatgaactgagacaagtacccatctattactgtgtctgagcccctgggtgggtttggaacagaggtaagttaaggtacagccgcaaggagctcactgtggaccagggaaggagacccacatctgaaatggatgcctcaatctaatcaccaactgctaggatagagttatacacagcatttggtttataattaaggtgatttttgagagaggagaatattttagtttacaaatctcctctttactaagacacacacacacaaagaaacaacacacacatacacatgttgagaagggcccaaatcatgactggctaggagagcaacagcctctagatggtttttccagattgtgaattaaagatctgctgggttggccaggcatggtggctcacgcctgtaatcctggcacttcaagagtctgaggagggcagatggcttgagcccaggattttgagaccggcctgggcaacatggtgaaaccctgtctctacaaaaaatataaaaattagctgggcgtggtgggtgcgtgcctgtggtcccagctacttgggaggctgaggcaggaagatcacctgagcccagggagatcaaggctgcagtgtgccatcatcacaccactgcactccagcctggatgacagagtgagaccttgtctcaaaagaaaaaaaaaaagatctactgagtctgtcttcagggacaagagcacagtttctcctaggatcttcacacctccctcaaaatgtgtacatttttactgattaaataatttaaaaatct

SEQ ID NO: 286160 - DNA, 475 bp, Homo sapiens
ggaattgtaaactgtgccactttcgcatgaataagattgactttgtcaattgatcactaacatttttcagattagttttaagctagatataattacagacatatcttagtttttgtgcagaatatcgtaatttgcagaagagtttcatgcacttaatctcagttgtataatgtaggcaaggagagctctctggcctctttttaaagatgatgggaccaagggagattgtgacttgcctaaggccacgttattgacatggcttattatagacagaatccagtttttagttcagatcttcctaattcaaaaataagcattcctcccaatggtatacccatcaatgtgtcaaaactgagccaataaaaaggcctaatttattattaggtgacagattgctgtggttccaaatatatgccttaattttatttgaaaaagaaaatgttgggaatagaatatttgtacccaactttgaatt

SEQ ID NO: 286161 - DNA, 1292 bp, Homo sapiens
gccgccggcaggacctggaggcccagatccgaggcctgcgtgaggaggtggagaagggtgagggcagactgcagaccacccacgaggagttgctgctgctgaggcgggagcggcgggagcacagcctggagctggaacgcgcacggtcagaggctggggaggcgctgagtgcgctgcggaggctgcagcggcgcgtctccgagctggaggaggagtcacgcctccaggacgccgacgtgtcggctgcctcgttgcagtcagaactggcccacagcctcgacgacggcgaccagggccagggcgccgacgcacccggagacaccccgaccacccggtccccaaagacccgaaaggcgtccagcccccagccttcacccccggaagagatcttagagccccccaagaagcgaacatccctcagtccagcggagatactggaggagaaggaggtggaagtggccaagctgcaagatgagatctcgctgcagcaggcagagctgcagtccctgcgggaagagctgcagaggcagaaggagctgcgggcgcaggaagaccctggggaggccctgcacagtgccctctcagaccgggacgaggccgtgaacaaggccctggagctgtccctgcagctcaaccgcgtctcgctggagcgagactccctgtctcgggagctgctgcgcgccatccgccagaaggtggcgctcacgcaggagctggaggcctggcaggacgacatgcaggtggtgatcgggcagcagctgcgctcacagcgccagaaggagctgagcgcctccgcgtcgtcgtcgaccccgcgccgtgccgcgccccgcttctcgctgcgcctgggccccgggcccgccggtggctttctcagtaacctcttccgaaggacctgacggctgggcccagagggctgcccttgcccacttaggggctcactttcctcttcaggccaatggagcgacagggcccagattgtcttccaaaagaagctgatgccctccccgccccaggatgctgggcaagggctcatcgggagcaggggctcatccggagcaggggccagctttgtggggcaggagctccaggtgggtggcaggggcaggtgaacagagctattttccgaattaatataggtctatcttttctagggcagggatggggctgggtatttatgtatcaagatcggacagagtaatatataaatcactccaccgatttggcccccattcatagaaagaaagagcatggtaaaaaagcctgaaactttatgtaaaaaaaaaaaaaaaaga

SEQ ID NO: 286162 - DNA, 1427 bp, Homo sapiens
aacaattactgaatgaggaggtagactgggcaggggaggagatggggctcttcgaggtgcggccctgctctataggcgaggaaactgtatatatccgctgagggaggtgcacggcccaaggcgcccagcgatccaggaacgggaacagcctgggccgctggggtgcggggctctccgcggcacccccgtgtggacctgccgcgggatgtcggcgttgcgtgcgtcccgctgaccgcccgcgcttccgtctgcgggaccgtccacagctggaacgcgcacggtcagaggctggggaggcgctgagtgcgctgcggaggctgcagcggcgcgtctccgagctggaggaggagtcacgcctccaggacgccgacgtgtcggctgcctcgttgcagtcagaactggcccacagcctcgacgacggcgaccagggccagggcgccgacgcacccggagacaccccgaccacccggtccccaaagacccgaaaggcgtccagcccccagccttcacccccggaagagatcttagagccccccaagaagcgaacatccctcagtccagcggagatactggaggagaaggaggtggaagtggccaagctgcaagatgagatctcgctgcagcaggcagagctgcagtccctgcgggaagagctgcagaggcagaaggagctgcgggcgcaggaagaccctggggaggccctgcacagtgccctctcagaccgggacgaggccgtgaacaaggccctggagctgtccctgcagctcaaccgcgtctcgctggagcgagactccctgtctcgggagctgctgcgcgccatccgccagaaggtggcgctcacgcaggagctggaggcctggcaggacgacatgcaggtggtgatcgggcagcagctgcgctcacagcgccagaaggagctgagcgcctccgcgtcgtcgtcgaccccgcgccgtgccgcgccccgcttctcgctgcgcctgggccccgggcccgccggtggctttctcagtaacctcttccgaaggacctgacggctgggcccagagggctgcccttgcccacttaggggctcactttcctcttcaggccaatggagcgacagggcccagattgtcttccaaaagaagctgatgccctccccgccccaggatgctgggcaagggctcatcgggagcaggggctcatccggagcaggggccagctttgtggggcaggagctccaggtgggtggcaggggcaggtgaacagagctattttccgaattaatataggtctatcttttctagggcagggatggggctgggtatttatgtatcaagatcggacagagtaatatataaatcactccaccgatttggcccccattcatagaaagaaagagcatggtaaaaaagcctgaaactttatgtaaaaaaaaaaaaaaaaga

SEQ ID NO: 286163 - DNA, 587 bp, Homo sapiens
atgctctaaatcctcgtgtaggacgcccaacatctggacgcacacagcatgactactagtgctgagcagccacccacagagggcatatgcacaaagacattaaatgtaaaagaaatggcctgtgctgagcaacagagaaagctgtatcagagataaaaccaaacagtaagcttcctatgacacagctccagtggaagaagagaaagcaccacctcattactgcaaggtggaaacagaagtccaagagagattctttgttaccacttgacatggatgggaatctaggcactccctgatggagagaagaaggactgcctcattatgctcaccatgtaacctacaatagcaccatggaagggggatgtggacgtctgttatcactgggtggttgtgaaagccctgactctattggcttctttggacataatgccagtggggagggggaagaatgcctcattaatgccatctgtgggtagaaatccaggctacccactttgctttttgatagtgtggtgggggatggggccacatatttttttctgcgatatttagcagaaatacaaagcagttattgccaacaaaaactg

SEQ ID NO: 286164 - DNA, 468 bp, Homo sapiens
ctgccaaaccctctggccctaacctatcatgtatgaaaggtgaaataggagcatactctgatttcacagttttaaccatcatcctgtgaccccaaaagtccatcacaggagggcatatgcacaaagacattaaatgtaaaagaaatggcctgtgctgagcaacagagaaagctgtatcagagataaaaccaaacagatgaattacctcacaggattgctggtcaaagacactcggagagactccaggcatgtgacaagtctctcatctgcagaccccattttcagctcatgaatgaattcctgagattcaccatccaacggcaggaaatgaattgtgtaagttcaaaagaagatcaggtgaagtggtacgaaattcggtgtttttcatgttttttgtttttattaatttactataatgttattcaaaacaacattcccaataaagcaaaacaaattagcactgtaaaa

SEQ ID NO: 286165 - DNA, 350 bp, Homo sapiens
atgctctaaatcctcgtgtaggacgcccaacatctggacgcacacagcatgactactagtgctgagcagccacccacaatgaattacctcacaggattgctggtcaaagacactcggagagactccaggcatgtgacaagtctctcatctgcagaccccattttcagctcatgaatgaattcctgagattcaccatccaacggcaggaaatgaattgtgtaagttcaaaagaagatcaggtgaagtggtacgaaattcggtgtttttcatgttttttgtttttattaatttactataatgttattcaaaacaacattcccaataaagcaaaacaaattagcactgtaaaa

SEQ ID NO: 286166 - DNA, 870 bp, Homo sapiens
  misc_feature (841)..(841): n is a, c, g, or t
gagctcctgcaggtgggagtcgactcacctgcagcaggcactcggcacaactccgcaggaccggctcacctgcaccgggcactcagcacagcctccagcatgcagcgcctccccgctgccacccgggccaccctgatcctcagcctggcctttgcctccctccactcggcttgctcggcagaagcaagcagcagcaacagctcaagcttgaccgctcaccacccagaccctgggaccctggagcagtgcctcaacgtggacttctgcccacaagcagcccggtgctgccgcacaggagtggacgagtacggctggatcgcggcagctgttggctggagcctctggttcctcaccctcatcctgctctgtgtggacaaactgatgaagctgactccagatgagcccaaggacttgcaagcgtgagacccaggctcggtgcacaaaatggtgatcgccaccaatttgtggctaatggggaaggggagtaaggctaacatggtttctattatttaagtcattttcacctttaagcttcagttacttttacaagggaaagaagaaagagcgggagaaccaaataaggcaagccagtgctgcccttgcatgtcactcccaagggcccctgggctgtgcccaggtaactcctctctcaagatagtccctctgtaatgtatcctgttttaacctttcttctaggcaccaagggaggtgcacaagaaactataagacttagtctcatcatcaacattttcagaagcaagtgctgggattacaggcgtgagccaccgcgcccggcctcacgtgttgtattttcattcatatttcctttgggacttctttntggcccatgcattatttataaatatgttg

SEQ ID NO: 286167 - DNA, 4728 bp, Homo sapiens
gcggccgcggaggcccgtccgattgctgctccgcgctccgagcggctgtcggcgtgcgctatcgccccgccctggttagtgtctagccggccggcgaggcctgcgcagttgcagcggccggggaagatggtggaggacggcgcggaggagctggaggatctggtgcacttctccgtgtctgagttgcctagtcgcggctacggcgtcatggaggagatccggcggcagggcaagctgtgcgacgtgaccctcaagattggggaccacaaattcagtgcccaccggattgtcttagcagcctcgatcccgtatttccatgctatgtttacaaatgacatgatggagtgcaagcaggatgagattgtaatgcaaggaatggacccaagtgccctggaggctctgatcaactttgcctacaacggcaaccttgccattgaccagcaaaatgtccagtcattgctgatgggggcgagcttcctgcagctgcagagcatcaaagacgcctgctgcacattccttcgagaacggcttcacccaaaaaaactgcctgggtgtgcgccagtttgctgagacaatgatgtgtgctgtgctgtacgacgctgccaacagcttcatccaccagcactttgtggaggtgtccatgtcagaagagttcctggccctgcccttggaagacgtgcttgagctggtgtctcgggatgagctgaatgtcaaatctgaggagcaggtctttgaagctgcattggcctgggtcagatacgaccgggagcagaggggtccctacctgcctgagctgctgtccaatatccgcctgcccctctgtcggccccagttcctttcagacagagtacagcaggatgacctggtgcgttgctgccacaaatgcagggacctggtagacgaagcaaaggactaccacctcatgccagagcgccggccccacctgccagctttcagaacccggccacgctgctgcacatccatcgctggacttatctacgctgtagggggcctcaactcagcaggtgattccctgaatgtggtggaagtgttcgaccccattgccaattgctgggagagatgccgtcccatgacaacagcccgcagccgcgttggcgtggctgtggtgaacgggcttctctatgccatcggaggatatgacggccagctacggctgagcactgtggaggcctacaacccggagacagacacatggaccagagtggggagcatgaatagcaagagaagtgccatggggacagtcgtgctggatgggcagatctacgtctgtgggggctacgatggcaactcttccctcagctccgtggagacctactcacctgagacggacaaatggacagtggtgacctcgatgagctcgaatcgcagtgctgctggggttacagtctttgagggcaggatatatgtgtcaggcggccatgatggtttgcagatcttcagcagtgtggaacactacaaccaccacacagccacctggcaccctgcagctggcatgctcaacaagcgctgccggcacggagccgcctccctggggagcaagatgtttgtctgcgggggctacgatggctctggcttcctcagcattgccgagatgtacagctctgtggcagaccagtggtgcctgattgtccccatgcacacgcgcaggagccgggtctccctgggtggccagctgtgggcgcctctacgctgttgggggctacgacggacagtcaaacctaagctcagtggagatgtatgacccagagacagactgctggacattcatggcccccatggcgtgccatgagggaggggtcggtgtgggctgcatccctctcctcaccatctaaggcagaggatgggatgtggtggggcagggatctggtacagacataggcgcttccttccaggaacagtccctcaggagaggcagtggaccagaagagatggcgaaacgtgagctcgccggaggtacagtttttccaggtgcttaagccctccccaactgtgccacccttgtgaccttcaggcttgggtcatcaagatgcacagcatggaacacaagctcctctggatcctgcagctggtgacatggaactgttttctggtccacatgaacacaggctccatccaggcccagctcctacccaccgcctctctgtgggccagctgttcacagaaggccttccatctgatgctccccatcgcctgcttgctctccagccgagtctggccaatttgccatggggaggctgcagtgtccaagcctgctggaaactgggatgtagctggggacgaaaggacagacccaagcgttctccctgcctgagatggtgtggccacagcagtggaaggctgcacacaggcacattccttcttccacagtggggcaccaaggattctgtcctcattgctgggtaagcagggagaagagaagttttccccatgtctaattttgggatttcagtgaggccttttccatctgtccaggagaacagaagggaaaaaaagatacttgaaagaaactgaaggaaatttaaacaaagaaacacttgaaagaaactggaaagaaaaataatttttttatgtgaacaaattttgcaagaagaaaaaagcataaaagacactaacggcaaatctatgtttaaatggaaaatcgtctaactggagaagggcggtatccaccccacattcggatcccagggtcctgaggcctcgcattgagctgggggttccctctgagccccagtgtgtgtggaatcagtgcactcttgactgggcctgtagtaaggtgctcatggggtttgtcttctcacccaccatcagaggacttttaaaatcataggcgtagagagttagctatctgctgaattactgccactcttcttggtgggggctcctagctgtggctgggggctccaggcgcccctgtgattacctcctactgccaccatggcgctcattcagattccccactctcactaacattgcttccttttttgaccagcaggaaacagcaggtctggccagattctcacttgcccatcaatctcgttcttggatgatttccctcattgtgatgcttctggggcacgttgaccatatgcacctctagaacctaaccagggcttccttctaccagctgtgggcgggcttggtctggtaaccttgtctgctctgccattccactgctcctccatccactcgccaatcccaagagtctggcctccctccagccctgggcagactgaccagcaaggtggacctttacattcaagcacagctggcttttatgacataaagaactaaaggccgaaagaatctcttgctgctgcaaagaacagattttatatttcttcctctaatcttggcaaatgacctttaccttttggaaagatttcatattgcttcctcctccctggataggacctaatgtagcacagcgggactcaaagaggaggacattttctcttgccagtgcactgggcagtggggctgtccttcaactgctgctgccaaaattggttttctaaaattcttccagtagagactaaaagaagattcaattcctgtaacccaagactgagtcttagggctccagtctccacctgcttggtttcctatcctttgctgcctgcctggggtggcctggaagcctgttcagaaaggcacaatgtggagcctggggtgtctcccccaccccaggaccgtcaggtttaccagtgtgtgcaatcgccatgtattcagagggaagtacctttgttacctacaacttaggagctaggcctctgctacaagcacttgaaaatgatatttttatttttaacgtctcaacaatctgatatcggatgtcgtttaacctgggctcgtggtagggctccagcatttctccctccttcctggtttgcctgtaggggtagactcggaaggtgggtggggtgtgcatttcctgttaggagtgtatcagtgcttgtcttattataagcccctttcttttgtgaatttgaagtagcaccaacaagcctggattgtgaaggtattaagaatcggtctgtgggctactgagtgggtccttaggatactggcccagattttgccactgggtatggcagatcattttctaccatggcctgctgctcttgtagtggacttcctgagtccaatcccacctcctggtgtagaatttacactgctgcacctgaggtcgatgtttcaaagtaagatcaagccagtgttttgatctgggctctgagcacaagtcaggaaacaccaacatattcacactctcccagtaggttcctcagtccgatggtgaatggctattcgtaaatggctggtctggctctttggtgttggagcctttccaatagccccatgaaaagaagcatcacccaaggatattgtaaaaaggatgtaacaaggagatagggtagacattgtactcagtgggccttggggcctagcccagctctgagcagaggactgtggcattcactgtccttgagtgtttcaccttcttggataacacacgggccttctcttctggatttcatcagagattacagccagatgggggctgaagaccatcctcttgaccacagaggtgtgactgtgggaattcctcccaatttatggtttcccagaaaatcttagttccttttatttatagaatgcatgtcttttgtgttaagaaaccaaagagaaataaagagaacactcctaata

SEQ ID NO: 286168 - DNA, 4825 bp, Homo sapiens
  misc_feature (33)..(33): n is a, c, g, or t
tgaggatcccactagtcacggttggctcaggangttgatagttcttgggcagtgagagtgagtagtagaatgtttagtgagcctagggtgtggtgagtgtaaattagtgcgatgagtaggggaagtgaaaaaacgatcagagtagtggtatttcaccggcggcccgccctggttagtgtctagccggccggcgaggcctgcgcagttgcagcggccggggaagatggtggaggacggcgcggaggagctggaggatctggtgcacttctccgtgtctgagttgcctagtcgcggctacggcgtcatggaggagatccggcggcagggcaagctgtgcgacgtgaccctcaagattggggaccacaaattcagtgcccaccggattgtcttagcagcctcgatcccgtatttccatgctatgtttacaaatgacatgatggagtgcaagcaggatgagattgtaatgcaaggaatggacccaagtgccctggaggctctgatcaactttgcctacaacggcaaccttgccattgaccagcaaaatgtccagtcattgctgatgggggcgagcttcctgcagctgcagagcatcaaagacgcctgctgcacattccttcgagaacggcttcacccaaaaaaactgcctgggtgtgcgccagtttgctgagacaatgatgtgtgctgtgctgtacgacgctgccaacagcttcatccaccagcactttgtggaggtgtccatgtcagaagagttcctggccctgcccttggaagacgtgcttgagctggtgtctcgggatgagctgaatgtcaaatctgaggagcaggtctttgaagctgcattggcctgggtcagatacgaccgggagcagaggggtccctacctgcctgagctgctgtccaatatccgcctgcccctctgtcggccccagttcctttcagacagagtacagcaggatgacctggtgcgttgctgccacaaatgcagggacctggtagacgaagcaaaggactaccacctcatgccagagcgccggccccacctgccagctttcagaacccggccacgctgctgcacatccatcgctggacttatctacgctgtagggggcctcaactcagcaggtgattccctgaatgtggtggaagtgttcgaccccattgccaattgctgggagagatgccgtcccatgacaacagcccgcagccgcgttggcgtggctgtggtgaacgggcttctctatgccatcggaggatatgacggccagctacggctgagcactgtggaggcctacaacccggagacagacacatggaccagagtggggagcatgaatagcaagagaagtgccatggggacagtcgtgctggatgggcagatctacgtctgtgggggctacgatggcaactcttccctcagctccgtggagacctactcacctgagacggacaaatggacagtggtgacctcgatgagctcgaatcgcagtgctgctggggttacagtctttgagggcaggatatatgtgtcaggcggccatgatggtttgcagatcttcagcagtgtggaacactacaaccaccacacagccacctggcaccctgcagctggcatgctcaacaagcgctgccggcacggagccgcctccctggggagcaagatgtttgtctgcgggggctacgatggctctggcttcctcagcattgccgagatgtacagctctgtggcagaccagtggtgcctgattgtccccatgcacacgcgcaggagccgggtctccctgggtggccagctgtgggcgcctctacgctgttgggggctacgacggacagtcaaacctaagctcagtggagatgtatgacccagagacagactgctggacattcatggcccccatggcgtgccatgagggaggggtcggtgtgggctgcatccctctcctcaccatctaaggcagaggatgggatgtggtggggcagggatctggtacagacataggcgcttccttccaggaacagtccctcaggagaggcagtggaccagaagagatggcgaaacgtgagctcgccggaggtacagtttttccaggtgcttaagccctccccaactgtgccacccttgtgaccttcaggcttgggtcatcaagatgcacagcatggaacacaagctcctctggatcctgcagctggtgacatggaactgttttctggtccacatgaacacaggctccatccaggcccagctcctacccaccgcctctctgtgggccagctgttcacagaaggccttccatctgatgctccccatcgcctgcttgctctccagccgagtctggccaatttgccatggggaggctgcagtgtccaagcctgctggaaactgggatgtagctggggacgaaaggacagacccaagcgttctccctgcctgagatggtgtggccacagcagtggaaggctgcacacaggcacattccttcttccacagtggggcaccaaggattctgtcctcattgctgggtaagcagggagaagagaagttttccccatgtctaattttgggatttcagtgaggccttttccatctgtccaggagaacagaagggaaaaaaagatacttgaaagaaactgaaggaaatttaaacaaagaaacacttgaaagaaactggaaagaaaaataatttttttatgtgaacaaattttgcaagaagaaaaaagcataaaagacactaacggcaaatctatgtttaaatggaaaatcgtctaactggagaagggcggtatccaccccacattcggatcccagggtcctgaggcctcgcattgagctgggggttccctctgagccccagtgtgtgtggaatcagtgcactcttgactgggcctgtagtaaggtgctcatggggtttgtcttctcacccaccatcagaggacttttaaaatcataggcgtagagagttagctatctgctgaattactgccactcttcttggtgggggctcctagctgtggctgggggctccaggcgcccctgtgattacctcctactgccaccatggcgctcattcagattccccactctcactaacattgcttccttttttgaccagcaggaaacagcaggtctggccagattctcacttgcccatcaatctcgttcttggatgatttccctcattgtgatgcttctggggcacgttgaccatatgcacctctagaacctaaccagggcttccttctaccagctgtgggcgggcttggtctggtaaccttgtctgctctgccattccactgctcctccatccactcgccaatcccaagagtctggcctccctccagccctgggcagactgaccagcaaggtggacctttacattcaagcacagctggcttttatgacataaagaactaaaggccgaaagaatctcttgctgctgcaaagaacagattttatatttcttcctctaatcttggcaaatgacctttaccttttggaaagatttcatattgcttcctcctccctggataggacctaatgtagcacagcgggactcaaagaggaggacattttctcttgccagtgcactgggcagtggggctgtccttcaactgctgctgccaaaattggttttctaaaattcttccagtagagactaaaagaagattcaattcctgtaacccaagactgagtcttagggctccagtctccacctgcttggtttcctatcctttgctgcctgcctggggtggcctggaagcctgttcagaaaggcacaatgtggagcctggggtgtctcccccaccccaggaccgtcaggtttaccagtgtgtgcaatcgccatgtattcagagggaagtacctttgttacctacaacttaggagctaggcctctgctacaagcacttgaaaatgatatttttatttttaacgtctcaacaatctgatatcggatgtcgtttaacctgggctcgtggtagggctccagcatttctccctccttcctggtttgcctgtaggggtagactcggaaggtgggtggggtgtgcatttcctgttaggagtgtatcagtgcttgtcttattataagcccctttcttttgtgaatttgaagtagcaccaacaagcctggattgtgaaggtattaagaatcggtctgtgggctactgagtgggtccttaggatactggcccagattttgccactgggtatggcagatcattttctaccatggcctgctgctcttgtagtggacttcctgagtccaatcccacctcctggtgtagaatttacactgctgcacctgaggtcgatgtttcaaagtaagatcaagccagtgttttgatctgggctctgagcacaagtcaggaaacaccaacatattcacactctcccagtaggttcctcagtccgatggtgaatggctattcgtaaatggctggtctggctctttggtgttggagcctttccaatagccccatgaaaagaagcatcacccaaggatattgtaaaaaggatgtaacaaggagatagggtagacattgtactcagtgggccttggggcctagcccagctctgagcagaggactgtggcattcactgtccttgagtgtttcaccttcttggataacacacgggccttctcttctggatttcatcagagattacagccagatgggggctgaagaccatcctcttgaccacagaggtgtgactgtgggaattcctcccaatttatggtttcccagaaaatcttagttccttttatttatagaatgcatgtcttttgtgttaagaaaccaaagagaaataaagagaacactcctaata

SEQ ID NO: 286169 - DNA, 4375 bp, Homo sapiens
acgatcgcttacatgatcggtacacgtacccagtgccctggaggctctgatcaactttgcctacaacggcaaccttgccattgaccagcaaaatgtccagtcattgctgatgggggcgagcttcctgcagctgcagagcatcaaagacgcctgctgcacattccttcgagaacggcttcacccaaaaaaactgcctgggtgtgcgccagtttgctgagacaatgatgtgtgctgtgctgtacgacgctgccaacagcttcatccaccagcactttgtggaggtgtccatgtcagaagagttcctggccctgcccttggaagacgtgcttgagctggtgtctcgggatgagctgaatgtcaaatctgaggagcaggtctttgaagctgcattggcctgggtcagatacgaccgggagcagaggggtccctacctgcctgagctgctgtccaatatccgcctgcccctctgtcggccccagttcctttcagacagagtacagcaggatgacctggtgcgttgctgccacaaatgcagggacctggtagacgaagcaaaggactaccacctcatgccagagcgccggccccacctgccagctttcagaacccggccacgctgctgcacatccatcgctggacttatctacgctgtagggggcctcaactcagcaggtgattccctgaatgtggtggaagtgttcgaccccattgccaattgctgggagagatgccgtcccatgacaacagcccgcagccgcgttggcgtggctgtggtgaacgggcttctctatgccatcggaggatatgacggccagctacggctgagcactgtggaggcctacaacccggagacagacacatggaccagagtggggagcatgaatagcaagagaagtgccatggggacagtcgtgctggatgggcagatctacgtctgtgggggctacgatggcaactcttccctcagctccgtggagacctactcacctgagacggacaaatggacagtggtgacctcgatgagctcgaatcgcagtgctgctggggttacagtctttgagggcaggatatatgtgtcaggcggccatgatggtttgcagatcttcagcagtgtggaacactacaaccaccacacagccacctggcaccctgcagctggcatgctcaacaagcgctgccggcacggagccgcctccctggggagcaagatgtttgtctgcgggggctacgatggctctggcttcctcagcattgccgagatgtacagctctgtggcagaccagtggtgcctgattgtccccatgcacacgcgcaggagccgggtctccctgggtggccagctgtgggcgcctctacgctgttgggggctacgacggacagtcaaacctaagctcagtggagatgtatgacccagagacagactgctggacattcatggcccccatggcgtgccatgagggaggggtcggtgtgggctgcatccctctcctcaccatctaaggcagaggatgggatgtggtggggcagggatctggtacagacataggcgcttccttccaggaacagtccctcaggagaggcagtggaccagaagagatggcgaaacgtgagctcgccggaggtacagtttttccaggtgcttaagccctccccaactgtgccacccttgtgaccttcaggcttgggtcatcaagatgcacagcatggaacacaagctcctctggatcctgcagctggtgacatggaactgttttctggtccacatgaacacaggctccatccaggcccagctcctacccaccgcctctctgtgggccagctgttcacagaaggccttccatctgatgctccccatcgcctgcttgctctccagccgagtctggccaatttgccatggggaggctgcagtgtccaagcctgctggaaactgggatgtagctggggacgaaaggacagacccaagcgttctccctgcctgagatggtgtggccacagcagtggaaggctgcacacaggcacattccttcttccacagtggggcaccaaggattctgtcctcattgctgggtaagcagggagaagagaagttttccccatgtctaattttgggatttcagtgaggccttttccatctgtccaggagaacagaagggaaaaaaagatacttgaaagaaactgaaggaaatttaaacaaagaaacacttgaaagaaactggaaagaaaaataatttttttatgtgaacaaattttgcaagaagaaaaaagcataaaagacactaacggcaaatctatgtttaaatggaaaatcgtctaactggagaagggcggtatccaccccacattcggatcccagggtcctgaggcctcgcattgagctgggggttccctctgagccccagtgtgtgtggaatcagtgcactcttgactgggcctgtagtaaggtgctcatggggtttgtcttctcacccaccatcagaggacttttaaaatcataggcgtagagagttagctatctgctgaattactgccactcttcttggtgggggctcctagctgtggctgggggctccaggcgcccctgtgattacctcctactgccaccatggcgctcattcagattccccactctcactaacattgcttccttttttgaccagcaggaaacagcaggtctggccagattctcacttgcccatcaatctcgttcttggatgatttccctcattgtgatgcttctggggcacgttgaccatatgcacctctagaacctaaccagggcttccttctaccagctgtgggcgggcttggtctggtaaccttgtctgctctgccattccactgctcctccatccactcgccaatcccaagagtctggcctccctccagccctgggcagactgaccagcaaggtggacctttacattcaagcacagctggcttttatgacataaagaactaaaggccgaaagaatctcttgctgctgcaaagaacagattttatatttcttcctctaatcttggcaaatgacctttaccttttggaaagatttcatattgcttcctcctccctggataggacctaatgtagcacagcgggactcaaagaggaggacattttctcttgccagtgcactgggcagtggggctgtccttcaactgctgctgccaaaattggttttctaaaattcttccagtagagactaaaagaagattcaattcctgtaacccaagactgagtcttagggctccagtctccacctgcttggtttcctatcctttgctgcctgcctggggtggcctggaagcctgttcagaaaggcacaatgtggagcctggggtgtctcccccaccccaggaccgtcaggtttaccagtgtgtgcaatcgccatgtattcagagggaagtacctttgttacctacaacttaggagctaggcctctgctacaagcacttgaaaatgatatttttatttttaacgtctcaacaatctgatatcggatgtcgtttaacctgggctcgtggtagggctccagcatttctccctccttcctggtttgcctgtaggggtagactcggaaggtgggtggggtgtgcatttcctgttaggagtgtatcagtgcttgtcttattataagcccctttcttttgtgaatttgaagtagcaccaacaagcctggattgtgaaggtattaagaatcggtctgtgggctactgagtgggtccttaggatactggcccagattttgccactgggtatggcagatcattttctaccatggcctgctgctcttgtagtggacttcctgagtccaatcccacctcctggtgtagaatttacactgctgcacctgaggtcgatgtttcaaagtaagatcaagccagtgttttgatctgggctctgagcacaagtcaggaaacaccaacatattcacactctcccagtaggttcctcagtccgatggtgaatggctattcgtaaatggctggtctggctctttggtgttggagcctttccaatagccccatgaaaagaagcatcacccaaggatattgtaaaaaggatgtaacaaggagatagggtagacattgtactcagtgggccttggggcctagcccagctctgagcagaggactgtggcattcactgtccttgagtgtttcaccttcttggataacacacgggccttctcttctggatttcatcagagattacagccagatgggggctgaagaccatcctcttgaccacagaggtgtgactgtgggaattcctcccaatttatggtttcccagaaaatcttagttccttttatttatagaatgcatgtcttttgtgttaagaaaccaaagagaaataaagagaacactcctaata

SEQ ID NO: 286170 - DNA, 3931 bp, Homo sapiens
  misc_feature (30)..(30): n is a, c, g, or t
ggctaggtacgaggctgggtttgaatcggncgaggttcctttcagacagagtacagcaggatgacctggtgcgttgctgccacaaatgcagggacctggtagacgaagcaaaggactaccacctcatgccagagcgccggccccacctgccagctttcagaacccggccacgctgctgcacatccatcgctggacttatctacgctgtagggggcctcaactcagcaggtgattccctgaatgtggtggaagtgttcgaccccattgccaattgctgggagagatgccgtcccatgacaacagcccgcagccgcgttggcgtggctgtggtgaacgggcttctctatgccatcggaggatatgacggccagctacggctgagcactgtggaggcctacaacccggagacagacacatggaccagagtggggagcatgaatagcaagagaagtgccatggggacagtcgtgctggatgggcagatctacgtctgtgggggctacgatggcaactcttccctcagctccgtggagacctactcacctgagacggacaaatggacagtggtgacctcgatgagctcgaatcgcagtgctgctggggttacagtctttgagggcaggatatatgtgtcaggcggccatgatggtttgcagatcttcagcagtgtggaacactacaaccaccacacagccacctggcaccctgcagctggcatgctcaacaagcgctgccggcacggagccgcctccctggggagcaagatgtttgtctgcgggggctacgatggctctggcttcctcagcattgccgagatgtacagctctgtggcagaccagtggtgcctgattgtccccatgcacacgcgcaggagccgggtctccctgggtggccagctgtgggcgcctctacgctgttgggggctacgacggacagtcaaacctaagctcagtggagatgtatgacccagagacagactgctggacattcatggcccccatggcgtgccatgagggaggggtcggtgtgggctgcatccctctcctcaccatctaaggcagaggatgggatgtggtggggcagggatctggtacagacataggcgcttccttccaggaacagtccctcaggagaggcagtggaccagaagagatggcgaaacgtgagctcgccggaggtacagtttttccaggtgcttaagccctccccaactgtgccacccttgtgaccttcaggcttgggtcatcaagatgcacagcatggaacacaagctcctctggatcctgcagctggtgacatggaactgttttctggtccacatgaacacaggctccatccaggcccagctcctacccaccgcctctctgtgggccagctgttcacagaaggccttccatctgatgctccccatcgcctgcttgctctccagccgagtctggccaatttgccatggggaggctgcagtgtccaagcctgctggaaactgggatgtagctggggacgaaaggacagacccaagcgttctccctgcctgagatggtgtggccacagcagtggaaggctgcacacaggcacattccttcttccacagtggggcaccaaggattctgtcctcattgctgggtaagcagggagaagagaagttttccccatgtctaattttgggatttcagtgaggccttttccatctgtccaggagaacagaagggaaaaaaagatacttgaaagaaactgaaggaaatttaaacaaagaaacacttgaaagaaactggaaagaaaaataatttttttatgtgaacaaattttgcaagaagaaaaaagcataaaagacactaacggcaaatctatgtttaaatggaaaatcgtctaactggagaagggcggtatccaccccacattcggatcccagggtcctgaggcctcgcattgagctgggggttccctctgagccccagtgtgtgtggaatcagtgcactcttgactgggcctgtagtaaggtgctcatggggtttgtcttctcacccaccatcagaggacttttaaaatcataggcgtagagagttagctatctgctgaattactgccactcttcttggtgggggctcctagctgtggctgggggctccaggcgcccctgtgattacctcctactgccaccatggcgctcattcagattccccactctcactaacattgcttccttttttgaccagcaggaaacagcaggtctggccagattctcacttgcccatcaatctcgttcttggatgatttccctcattgtgatgcttctggggcacgttgaccatatgcacctctagaacctaaccagggcttccttctaccagctgtgggcgggcttggtctggtaaccttgtctgctctgccattccactgctcctccatccactcgccaatcccaagagtctggcctccctccagccctgggcagactgaccagcaaggtggacctttacattcaagcacagctggcttttatgacataaagaactaaaggccgaaagaatctcttgctgctgcaaagaacagattttatatttcttcctctaatcttggcaaatgacctttaccttttggaaagatttcatattgcttcctcctccctggataggacctaatgtagcacagcgggactcaaagaggaggacattttctcttgccagtgcactgggcagtggggctgtccttcaactgctgctgccaaaattggttttctaaaattcttccagtagagactaaaagaagattcaattcctgtaacccaagactgagtcttagggctccagtctccacctgcttggtttcctatcctttgctgcctgcctggggtggcctggaagcctgttcagaaaggcacaatgtggagcctggggtgtctcccccaccccaggaccgtcaggtttaccagtgtgtgcaatcgccatgtattcagagggaagtacctttgttacctacaacttaggagctaggcctctgctacaagcacttgaaaatgatatttttatttttaacgtctcaacaatctgatatcggatgtcgtttaacctgggctcgtggtagggctccagcatttctccctccttcctggtttgcctgtaggggtagactcggaaggtgggtggggtgtgcatttcctgttaggagtgtatcagtgcttgtcttattataagcccctttcttttgtgaatttgaagtagcaccaacaagcctggattgtgaaggtattaagaatcggtctgtgggctactgagtgggtccttaggatactggcccagattttgccactgggtatggcagatcattttctaccatggcctgctgctcttgtagtggacttcctgagtccaatcccacctcctggtgtagaatttacactgctgcacctgaggtcgatgtttcaaagtaagatcaagccagtgttttgatctgggctctgagcacaagtcaggaaacaccaacatattcacactctcccagtaggttcctcagtccgatggtgaatggctattcgtaaatggctggtctggctctttggtgttggagcctttccaatagccccatgaaaagaagcatcacccaaggatattgtaaaaaggatgtaacaaggagatagggtagacattgtactcagtgggccttggggcctagcccagctctgagcagaggactgtggcattcactgtccttgagtgtttcaccttcttggataacacacgggccttctcttctggatttcatcagagattacagccagatgggggctgaagaccatcctcttgaccacagaggtgtgactgtgggaattcctcccaatttatggtttcccagaaaatcttagttccttttatttatagaatgcatgtcttttgtgttaagaaaccaaagagaaataaagagaacactcctaata

SEQ ID NO: 286171 - DNA, 3525 bp, Homo sapiens
tcactacctagcattgcatccttgggcacatcctttttgtttccttagatgcaaacagaaagggttaggtgaggtgacctctccctgtccccatacaccaaagagcaggcctgcagcagagggaatactgggagagctccttttccccatacctcccacaggagtttgacatcatggggggctgctgtgccctgcacggtcactccatggactgagctttgcctctgactgtcctgtacctgtgcctctctccccactgcaggtggaacactacaaccaccacacagccacctggcaccctgcagctggcatgctcaacaagcgctgccggcacggagccgcctccctggggagcaagatgtttgtctgcgggggctacgatggctctggcttcctcagcattgccgagatgtacagctctgtggcagaccagtggtgcctgattgtccccatgcacacgcgcaggagccgggtctccctgggtggccagctgtgggcgcctctacgctgttgggggctacgacggacagtcaaacctaagctcagtggagatgtatgacccagagacagactgctggacattcatggcccccatggcgtgccatgagggaggggtcggtgtgggctgcatccctctcctcaccatctaaggcagaggatgggatgtggtggggcagggatctggtacagacataggcgcttccttccaggaacagtccctcaggagaggcagtggaccagaagagatggcgaaacgtgagctcgccggaggtacagtttttccaggtgcttaagccctccccaactgtgccacccttgtgaccttcaggcttgggtcatcaagatgcacagcatggaacacaagctcctctggatcctgcagctggtgacatggaactgttttctggtccacatgaacacaggctccatccaggcccagctcctacccaccgcctctctgtgggccagctgttcacagaaggccttccatctgatgctccccatcgcctgcttgctctccagccgagtctggccaatttgccatggggaggctgcagtgtccaagcctgctggaaactgggatgtagctggggacgaaaggacagacccaagcgttctccctgcctgagatggtgtggccacagcagtggaaggctgcacacaggcacattccttcttccacagtggggcaccaaggattctgtcctcattgctgggtaagcagggagaagagaagttttccccatgtctaattttgggatttcagtgaggccttttccatctgtccaggagaacagaagggaaaaaaagatacttgaaagaaactgaaggaaatttaaacaaagaaacacttgaaagaaactggaaagaaaaataatttttttatgtgaacaaattttgcaagaagaaaaaagcataaaagacactaacggcaaatctatgtttaaatggaaaatcgtctaactggagaagggcggtatccaccccacattcggatcccagggtcctgaggcctcgcattgagctgggggttccctctgagccccagtgtgtgtggaatcagtgcactcttgactgggcctgtagtaaggtgctcatggggtttgtcttctcacccaccatcagaggacttttaaaatcataggcgtagagagttagctatctgctgaattactgccactcttcttggtgggggctcctagctgtggctgggggctccaggcgcccctgtgattacctcctactgccaccatggcgctcattcagattccccactctcactaacattgcttccttttttgaccagcaggaaacagcaggtctggccagattctcacttgcccatcaatctcgttcttggatgatttccctcattgtgatgcttctggggcacgttgaccatatgcacctctagaacctaaccagggcttccttctaccagctgtgggcgggcttggtctggtaaccttgtctgctctgccattccactgctcctccatccactcgccaatcccaagagtctggcctccctccagccctgggcagactgaccagcaaggtggacctttacattcaagcacagctggcttttatgacataaagaactaaaggccgaaagaatctcttgctgctgcaaagaacagattttatatttcttcctctaatcttggcaaatgacctttaccttttggaaagatttcatattgcttcctcctccctggataggacctaatgtagcacagcgggactcaaagaggaggacattttctcttgccagtgcactgggcagtggggctgtccttcaactgctgctgccaaaattggttttctaaaattcttccagtagagactaaaagaagattcaattcctgtaacccaagactgagtcttagggctccagtctccacctgcttggtttcctatcctttgctgcctgcctggggtggcctggaagcctgttcagaaaggcacaatgtggagcctggggtgtctcccccaccccaggaccgtcaggtttaccagtgtgtgcaatcgccatgtattcagagggaagtacctttgttacctacaacttaggagctaggcctctgctacaagcacttgaaaatgatatttttatttttaacgtctcaacaatctgatatcggatgtcgtttaacctgggctcgtggtagggctccagcatttctccctccttcctggtttgcctgtaggggtagactcggaaggtgggtggggtgtgcatttcctgttaggagtgtatcagtgcttgtcttattataagcccctttcttttgtgaatttgaagtagcaccaacaagcctggattgtgaaggtattaagaatcggtctgtgggctactgagtgggtccttaggatactggcccagattttgccactgggtatggcagatcattttctaccatggcctgctgctcttgtagtggacttcctgagtccaatcccacctcctggtgtagaatttacactgctgcacctgaggtcgatgtttcaaagtaagatcaagccagtgttttgatctgggctctgagcacaagtcaggaaacaccaacatattcacactctcccagtaggttcctcagtccgatggtgaatggctattcgtaaatggctggtctggctctttggtgttggagcctttccaatagccccatgaaaagaagcatcacccaaggatattgtaaaaaggatgtaacaaggagatagggtagacattgtactcagtgggccttggggcctagcccagctctgagcagaggactgtggcattcactgtccttgagtgtttcaccttcttggataacacacgggccttctcttctggatttcatcagagattacagccagatgggggctgaagaccatcctcttgaccacagaggtgtgactgtgggaattcctcccaatttatggtttcccagaaaatcttagttccttttatttatagaatgcatgtcttttgtgttaagaaaccaaagagaaataaagagaacactcctaata

SEQ ID NO: 286172 - DNA, 3312 bp, Homo sapiens
gcggccgcggaggcccgtccgattgctgctccgcgctccgagcggctgtcggcgtgcgctatcgccccgccctggttagtgtctagccggccggcgaggcctgcgcagttgcagcggccggggaagatggtggaggacggcgcggaggagctggaggatctggtgcacttctccgtgtctgagttgcctagtcgcggctacggcgtcatggaggagatccggcggcagggcaagctgtgcgacgtgaccctcaagattggggaccacaaattcagtgcccaccggattgtcttagcagcctcgatcccgtatttccatgctatgtttacaaatgacatgatggagtgcaagcaggatgagattgtaatgcaaggaatggacccaagtgccctggaggctctgatcaactttgcctacaacggcaaccttgccattgaccagcaaaatgtccagtcattgctgatgggggcgagcttcctgcagctgcagagcatcaaagacgcctgctgcacattccttcgagaacggcttcacccaaaaaaactgcctgggtgtgcgccagtttgctgagacaatgatgtgtgctgtgctgtacgacgctgccaacagcttcatccaccagcactttgtggaggtgtccatgtcagaagagttcctggccctgcccttggaagacgtgcttgagctggtgtctcgggatgagctgaatgtcaaatctgaggagcaggtctttgaagctgcattggcctgggtcagatacgaccgggagcagaggggtccctacctgcctgagctgctgtccaatatccgcctgcccctctgtcggccccagttcctttcagacagagtacagcaggatgacctggtgcgttgctgccacaaatgcagggacctggtagacgaagcaaaggactaccacctcatgccagagcgccggccccacctgccagctttcagaacccggccacgctgctgcacatccatcgctggacttatctacgctgtagggggcctcaactcagcaggtgattccctgaatgtggtggaagtgttcgaccccattgccaattgctgggagagatgccgtcccatgacaacagcccgcagccgcgttggcgtggctgtggtgaacgggcttctctatgccatcggaggatatgacggccagctacggctgagcactgtggaggcctacaacccggagacagacacatggaccagagtggggagcatgaatagcaagagaaggtattctggaagccacgtgcagcccgaacatacacactgagcacctggggagcgccatgctagacgagcaggggcacacagtagagtaaaatacaagctttggcctgggagtttcctgcagccaggccagccactgccagtacctcctgggagcgagcccccatctgcttaaaagtaaaatatccaccttgtcctttggggaacttggggagaccaggcgtggacatgtggaagttgtgttgttattttaagtgccagataaggactggaaatgtgtattatggaagattcgaagagggagagaaactggactggaacttctggaagatttcagggaagaggtgggattaaagttgaaacttgaagaataaggaggatttacctttattagtgataaaaggaaatccaaggtgtttttctgtgtaccttccttccccaggactcccctcacacatgcacttccactacctggggagaatacgaaccaaagcaatgttcttttatttaggtcacacacattctcccagacaggagcacataggtatttgcaaggtgggccaagttgatatgtcactcagtacattctagctacctgctctctccacttctctgcttatattgtctgaataagaagtgggattagaagacatcccagtgcctttgtttagcccttcttactgctgaggtgacaggtggcatgtttcattatgtcagacacgtgatggagtcatcacatgtgtgggcagctgaaaagctggcgcagcccaaggaggggagaggaaagctgcccagggccccctggccgttacccaggacagctctgcactgattgcttttacacattgagcttccttgatatatgcctaatgttgttccacatccagcagcgtttgcatgtggatgtgagctgggagggatctgcctttgtactggtgagaccagttcacaaagcatcggagtaggttcctttgggaagaaaaaaatacgtaagatctgccctcccaagaacgcgttgagagtcctttcctcccaccatccccacttttgctccttggatactttgcagcttcctatgtttgagtgactcattgctccgtgtccccaaccatgagtagcttttttgctttgactgcagtcagctgtccttccttgtgtgtctgctctggaccacttccttgctttgatgttactgggtttagagggctgtcttggaggaaagttctctgggtattcctttccttcactgtggttaatatcctgttattagtgtgggcccggttccattacatcccttttaaattacaggctaccttaaaacgttcctagtcacttctcttctgacatcccacacagctgtctgttctgccagttagtgacatcctgccatctttccttcctatctcccccagtgttctacgccatcccatagacctttcttacactggactattccagtccatgctgatcagcattttctccttctcttcacactcgcctttaccacctagttgatagttaatctcatgcagttttggggcacctcttaattcattttcatattgttctacacctgttttgttatgtaatttttatgtttgttttgtgtccgtatccagaaggatagtgatcatgtctagtaaatttgtgatcttcccacaatacttgcctaaggcaagtccctctcctctttctggctggttcagggggtcagttatcatgtccctgaaagggacattctgtggatcagtttgattactatgtacatttaaaaggtagcagcaagccaggtatggtggctcacgcctataatcccagcactttgcgaggccaaggagggcggatcacctaaggtcaggagtttgagaccagcctggccaacatggtgaaaccctgtctttactaaaaatacaaaaattagccaggcatggtggcgggcgcctgttatcccagctacttgggaggctaaggcagggagaattgcttaaaccggggaggcgggggttgcaatgagctaagatcgtgccactgcattccagcctggttgacagagtgagactccgtctc

SEQ ID NO: 286173 - DNA, 1928 bp, Homo sapiens
gcggccgcggaggcccgtccgattgctgctccgcgctccgagcggctgtcggcgtgcgctatcgccccgccctggttagtgtctagccggccggcgaggcctgcgcagttgcagcggccggggaagatggtggaggacggcgcggaggagctggaggatctggtgcacttctccgtgtctgagttgcctagtcgcggctacggcgtcatggaggagatccggcggcagggcaagctgtgcgacgtgaccctcaagattggggaccacaaattcagtgcccaccggattgtcttagcagcctcgatcccgtatttccatgctatgtttacaaatgacatgatggagtgcaagcaggatgagattgtaatgcaaggaatggacccaagtgccctggaggctctgatcaactttgcctacaacggcaaccttgccattgaccagcaaaatgtccagtcattgctgatgggggcgagcttcctgcagctgcagagcatcaaagacgcctgctgcacattccttcgagaacggcttcacccaaaaaaactgcctgggtgtgcgccagtttgctgagacaatgatgtgtgctgtgctgtacgacgctgccaacagcttcatccaccagcactttgtggaggtgtccatgtcagaagagttcctggccctgcccttggaagacgtgcttgagctggtgtctcgggatgagctgaatgtcaaatctgaggagcaggtctttgaagctgcattggcctgggtcagatacgaccgggagcagaggggtccctacctgcctgagctgctgtccaatatccgcctgcccctctgtcggccccagttcctttcagacagagtacagcaggatgacctggtgcgttgctgccacaaatgcagggacctggtagacgaagcaaaggactaccacctcatgccagagcgccggccccacctgccagctttcagaacccggccacgctgctgcacatccatcgctggacttatctacgctgtagggggcctcaactcagcaggtgattccctgaatgtggtggaagtgttcgaccccattgccaattgctgggagagatgccgtcccatgacaacagcccgcagccgcgttggcgtggctgtggtgaacgggcttctctatgccatcggaggatatgacggccagctacggctgagcactgtggaggcctacaacccggagacagacacatggaccagagtggggagcatgaatagcaagagaagtgccatggggacagtcgtgctggatgggcagatctacgtctgtgggggctacgatggcaactcttccctcagctccgtggagacctactcacctgagacggacaaatggacagtggtgacctcgatgagctcgaatcgcagtgctgctggggttacagtctttgagggcaggatatatgtgtcaggcggccatgatggtttgcagatcttcagcagtgtggaacaataaaacaacacacagcactggaacctgaagttggcaattgtccaaaagggcttgccgagacggagccggcttccctgggggagcaagaatgttcggccttggggggctacaaaaggaccagggttcctccacgaattgcgcaaatgtcacgtccttggcaacccactgtgcttattgtgtcccatggtacaagccaaagagaccggaatccccgggggcacccatgagcggcccaagaggagggggggaacaaaggaacggacaacccaccaccaccgcgaacctgtagcaccacgaagaaacagcggtgagaataagagcaccaagcagcgaacacaaaagacgacgacagggcgcaacaaccccaccaaaaagaaagagagacgacgagcgagcaaagacaaaaccgagcaacgcacacacaccaggaaagaagcgtgacccactgcacatg

SEQ ID NO: 286174 - DNA, 682 bp, Homo sapiens
atgagaggtcaggggtagggcactggtagtggggatgggagcaagcactgactaggaagcaaaccagccaggacttgggggaccacaggaatgttgatggtgagggagaagcagccagaatagcactgagctttataagtacagcagctagagggctggtggtctgcttaacaaggcagggagtgcagggaggagcagaactgtaggagaaagaggtcttgtatgagacaatgattttgagcagccatggagatgagcagagaagatgggctgtgggtttgcagcttgggtgagaggcggcagccagggagaactgtcagagaggtggtgggagaggtgataagagatggagagatggccagcacagttcacctaaaccctgctaggctgtcttgagggaacaagaaccctgaatctcatgcttcccctcctattttgactctttcctgaagatggacagtggtgacctcgatgagctcgaatcgcagtgctgctggggttacagtctttgagggcaggatatatgtgtcaggcggccatgatggtttgcagatcttcagcagtgtgagtctgggctccccctgggataagggtacctacttctgtctttgagatttattttagaagatcattatttgaaaaaacttcagccttgccacagctgaataaagtatcatctagt

SEQ ID NO: 286175 - DNA, 936 bp, Homo sapiens
cgcacttagcagtgccagtggcagcagcagccatggggaagccgggcgtggaggcagcaccgggctcggagctggccagggttccctagcctatggagcacgcagccaccacaggccccaggcctggacctccctctcggcgggtggagaatgttgtgctacgagccaaggactggctgccaggagctcctgggggcaccgcagtgtgggccaccagcttggaagcagaggtcccaccagatctagcgctcaataaggagcagcagctgcagatctccaaggagctggtcgacattcagatcacaacccaccacctacatgagcagcatgaggctgaaatcttccagctgaagagtgagatccttcggctggagagccgggtactggagctggagctgcgaggagatggcaccagccagggctgtgcagtcccagtggagtctgaccccaggcatccccgggcagcagcccaagagctcagacacaaagcccaggtgcctggacactctgatgaccacagattccaggtgcagcccaagaacaccatgaaccccgagaatgagcagcacaggctggggagcggcctgcagggggaagtgaagtgggcgctggagcatcaggaggcccggcagcaggcactggtgacgcgtgtgtgagtggccatctcacctggggccccatcctggagcagagagaacccctgatcgtgggcctgctgagcctcacccccgtgtcttcagggcaaccctgggccggcagctgcagggagcccgagaggaggccagggcagccgggcagcgactggccacacaggctgtggtgctgtgcagctgccaaggccagctccgtcaggcagaggctgaaaatgcccggctgcagctgcagctcaagaaactgaaggatgagtacgtcctacggctgcaacactgcgcctgg

SEQ ID NO: 286176 - DNA, 848 bp, Homo sapiens
cgcacttagcagtgccagtggcagcagcagccatggggaagccgggcgtggaggcagcaccgggctcggagctggccagggttccctagcctatggagcacgcagccaccacaggccccaggcctggacctccctctcggcgggtggagaatgttgtgctacgagccaaggactggctgccaggagctcctgggggcaccgcagtgtgggccaccagcttggaagcagaggtcccaccagatctagcgctcaataaggagcagcagctgcagatctccaaggagctggtcgacattcagatcacaacccaccacctacatgagcagcatgaggctgaaatcttccagctgaagagtgagatccttcggctggagagccgggtactggagctggagctgcgaggagatggcaccagccagggctgtgcagtcccagtggagtctgaccccaggcatccccgggcagcagcccaagagctcagacacaaagcccaggtgcctggacactctgatgaccacagattccaggtgcagcccaagaacaccatgaaccccgagaatgagcagcacaggctggggagcggcctgcagggggaagtgaagtgggcgctggagcatcaggaggcccggcagcaggcactggtgacgcgtgtggcaaccctgggccggcagctgcagggagcccgagaggaggccagggcagccgggcagcgactggccacacaggctgtggtgctgtgcagctgccaaggccagctccgtcaggcagaggctgaaaatgcccggctgcagctgcagctcaagaaactgaaggatgagtacgtcctacggctgcaacactgcgcctgg

SEQ ID NO: 286177 - DNA, 954 bp, Homo sapiens
ccgccggcggtgcgcgtgcccggtggggcgccacgcgcacgctccgaccccgccgcgcccggcgctggcacctcctccaggaagccctcccgacgccccggctgagccagtcgtttccgagttctccggcccctgatggggacgtctgcgcccctcttctcaggccagaggttgtgctacgagccaaggactggctgccaggagctcctgggggcaccgcagtgtgggccaccagcttggaagcagaggtcccaccagatctagcgctcaataaggagcagcagctgcagatctccaaggagctggtcgacattcagatcacaacccaccacctacatgagcagcatgaggctgaaatcttccagctgaagagtgagatccttcggctggagagccgggtactggagctggagctgcgaggagatggcaccagccagggctgtgcagtcccagtggagtctgaccccaggcatccccgggcagcagcccaagagctcagacacaaagcccaggtgcctggacactctgatgaccacagattccaggtgcagcccaagaacaccatgaaccccgagaatgagcagcacaggctggggagcggcctgcagggggaagtgaagtgggcgctggagcatcaggaggcccggcagcaggcactggtgacgcgtgtgtgagtggccatctcacctggggccccatcctggagcagagagaacccctgatcgtgggcctgctgagcctcacccccgtgtcttcagggcaaccctgggccggcagctgcagggagcccgagaggaggccagggcagccgggcagcgactggccacacaggctgtggtgctgtgcagctgccaaggccagctccgtcaggcagaggctgaaaatgcccggctgcagctgcagctcaagaaactgaaggatgagtacgtcctacggctgcaacactgcgcctgg

SEQ ID NO: 286178 - DNA, 562 bp, Homo sapiens
gagaatgagcagcacaggctggggagcggcgtgagtgtgcagccacctagctcaggggagagggcagcaccagagaccccaagcctagggtctcatccagccagccctgtgtgccccacagctgcagggggaagtgaagtgggcgctggagcatcaggaggcccggcagcaggcactggtgacgcgtgtgtgagtggccatctcacctggggccccatcctggagcagagagaacccctgatcgtgggcctgctgagcctcacccccgtgtcttcagggcaaccctgggccggcagctgcagggagcccgagaggaggccagggcagccgggcagcgactggccacacaggctgtggtgaggctctgccctgactgcttggagacctggagggtgggggccccagaagctcagccggggtccactctcagggcacaggtggagggctgcttccaccccaggtgctgtgcagctgccaaggccagctccgtcaggcagaggctgaaaatgcccggctgcagctgcagctcaagaaactgaaggatgagtacgtcctacggctg

SEQ ID NO: 286179 - DNA, 668 bp, Homo sapiens
gcgtacgtactactactactaaattcgcggccgcgtcgacgaagggctcccttgagaactaggacaagagactacaaggagtatgtcctgaggaggggttgggatggtgtgttttctctcacctcccttttatgagggtcctcttgtccatcttcaagcctcacagtgggggcttgcagaggagtgcagactgaagccagcagagaggaaggactgactgaggggctgtgtcctcttatgggaatttgggaacatccctcgtcttgtcctctcttctgcacagcacaggttccagcactggttttagaagaaaaaaataccctgcccagagggaaagccaggaaagattgggaagtgggtggtcaggagagaaggcctgataggagccttcagacaatttgggtcctagttgcttgggttggacaatacaggaattgcttctgggccctgggaaagctgggaccatagtgctccagcccaaagactaggggagcattcattaccctagtttgacctgaaaatccatagggcagggcccactactttccaaagaaataaaagaacaattatttttaacaaatgggagaaaaaaaaaaagctcaccaattttttcgttcgacccggccgcgaatttaataagtagtaatccgaccccggaaatttccgga

SEQ ID NO: 286180 - DNA, 2998 bp, Homo sapiens
ggaagcggaagagcgatcgggtaggcggctctttgtcgaagctagaggaccggcaggcggcagcagcaactacggcggcggcggcagaacccagcagtgatgtggaggtggagacccacaggagccccggacttcacctgagctacctcagtggtcaccaagagtggcaagataaagaaaaccctgagttgggcgggaccaggatgcctgaccgggacagctatgccaacggtaccgggagcagcggtggaggccctggaggtggtggcagcgaggaggccagtggggcaggggtaggcagtggcggggccagctcagatgccatctgtagagacttcttgaggaatgtgtgcaagcgaggcaagcgttgccgatatcgccacccagacatgagcgaggtgtccaacttgggggtgagcaaaaacgagttcatcttctgccatgacttccagaacaaggagtgtagccgcccaaattgccgtttcatccatggctccaaggaggatgaggatggctataagaagacaggagagcttcccccacggctgaggcagaaagtagcagctggccttggcctttcaccggctgacctaccaaatggcaaggaggaggtccctatctgccgtgactttctcaagggtgactgtcagagaggagccaagtgcaagttccgtcacctgcaacgggattttgagtttgatgctcggggtggaggaggcactggtgggggctcaacaggctcagtcctcccaggacgacgtcatgatctctatgatatctatgaccttcctgacaggggctttgaggaccatgagccaggcccaaaacgccggcgaggtggatgctgcccccctgatggccctcattttgagtcatatgaatatagtttggctccaccgcgaggggtggagtgcagactgctagaggaggagaatgccatgctcaggaagcgggtagaggagttaaagaagcaggtcagcaacctgctggccaccaatgaggtactactggaacaaaatgctcagttccgcaatcaggccaaggtcataaccctgagctccactgcaccagcgactgagcagactctggcccccactgtgggcactgttgccacttttaaccatggcattgcccagactcacactactctcagcagccaggctctacagcctcgtccagtgtcccagcaagaactggtggcccctgctggagctccagctgctcccccaactaatgctgcacctcctgctgctccaccacccccacccccacacttgaccccagagatcacgccactgtcagctgccctggctcaaacaattgcccagggaatggcacctccacctgtctccatggctcctgtggctgtatctgtggctcctgtggcccctgtggctgtatcgatggcccaacccttggcaggaatcacaatgagccacaccaccactcccatggtgacttaccctatcgcttcccagagcatgcgcatcacggccatgccacactgatggggctaatggacactcccctggtatagcctcgcagggctggggtcagggggcccttgcccactcacctagccttccccatccctgtctgaagggctcccttgagaactaggacaagagactacaaggagtatgtcctgaggaggggttgggatggtgtgttttctctcacctcccttttatgagggtcctcttgtccatcttcaagcctcacagtgggggcttgcagaggagtgcagactgaagccagcagagaggaaggactgactgaggggctgtgtcctcttatgggaatttgggaacatccctcgtcttgtcctctcttctgcacagcacaggttccagcactggttttagaagaaaaaaataccctgcccagagggaaagccaggaaagattgggaagtgggtggtcaggagagaaggcctgataggagccttcagacaatttgggtcctagttgcttgggttggacaatacaggaattgcttctgggccctgggaaagctgggaccatagtgctccagcccaaagactaggggagcattcattaccctagtttgacctgaaaatccatagggcagggcccactactttccaaagaaataaaagaacaattatttttaacaaatggaggcagtgaaaacttgcttagctattctgtgtggaagatgggagcagtaaatagatctcatgccaaaatgggataaagaccccagcctcacatagctttggtaagatggatagaagccagtgaagaagggtagggacccagaacaagaccaaatggggctttggggaaggcactttatggggtaaaagctttggagccacccagtctagttttaaaaatagtcccatctgtttctggtctctgtctgtattgtgctattcccaggttgcctcagtaaccaggctcctagggtcatttagcagggcaggcagtaaggagagtgtatttgctgaaatgcggatgggatgttacatagttgacagatccttattcaaacagagcaggacaggtggagttgatggccattgagttgatggcagttgccgctcagttgatggcagttaatgtccctcctaccccaccccttcagtggccagttcctgaagccttcaaggcttgggaggtctgggaaaagagagtccttctagggacacaagcctcagggtccatccctttcctctgtctccacataggaccagaagttttaaatctacttaagtcagtaaggccaggggccccaatagtcaaacctcagttcctcctcagctcacggctgatgtagggaaaacaactcaggtgtctagtctaatgggacagtagatttgggggtagagagtgatcctggattgtgttccccctcatcatgtctcctgctacctcttgctttcttgtctggttgatcactcaggtcacatctgggattggagatggtgggctaggtcaaggccagtcattaaaaaaaaaagcctaaagactaa

SEQ ID NO: 286181 - DNA, 3667 bp, Homo sapiens
gagacttaggtggaggccgcgcccggaggggaggagtcggggccggcccagcggctgggctcggccaggccacagaaggccccccagaaccgagctggctcgtcctcacaccccagggcagtgccccttttctgagtgaccccgcatcgcgagcaaacgccagcttcgtgacgtcacaaccctgcccatcccctcagcttgatgacacctggagctccagctccccgcttcacttcgcgcgcccttagtgtcccattcacgtagcccacggctgagcgccggcggcactgcacggaacctgccaagctagaagacttgctgcgggaaaactcctaggacttctttcgcaaactctagggtgttgggaagcgtcacaatcactgccttcaagtctaatcggccatcccaatgcactgtcagacgctgcctttttgaggttcctcactagccattactaactccagcccttggcggtgctctgaccctcacatcctctttcatcttgaggcagggcgccccgcactctttgttcactcagggctggttttccaacccctcctcccagtccctccgaattagttttactcttcttactggcaacttctcccttggacaggtgaagttcagtttgaaccctgaggaaatcctcacgttctcgaagctttgccgttttgtcagatttcttgtgacaaccaccccatagtcctccactcttactccttcttccacccaagtctctgtttttttcctgctcagaacccagcagtgatgtggaggtggagacccacaggagccccggacttcacctgagctacctcagtggtcaccaagagtggcaagataaagaaaaccctgagttgggcgggaccaggatgcctgaccgggacagctatgccaacggtaccgggagcagcggtggaggccctggaggtggtggcagcgaggaggccagtggggcaggggtaggcagtggcggggccagctcagatgccatctgtagagacttcttgaggaatgtgtgcaagcgaggcaagcgttgccgatatcgccacccagacatgagcgaggtgtccaacttgggggtgagcaaaaacgagttcatcttctgccatgacttccagaacaaggagtgtagccgcccaaattgccgtttcatccatggctccaaggaggatgaggatggctataagaagacaggagagcttcccccacggctgaggcagaaagtagcagctggccttggcctttcaccggctgacctaccaaatggcaaggaggaggtccctatctgccgtgactttctcaagggtgactgtcagagaggagccaagtgcaagttccgtcacctgcaacgggattttgagtttgatgctcggggtggaggaggcactggtgggggctcaacaggctcagtcctcccaggacgacgtcatgatctctatgatatctatgaccttcctgacaggggctttgaggaccatgagccaggcccaaaacgccggcgaggtggatgctgcccccctgatggccctcattttgagtcatatgaatatagtttggctccaccgcgaggggtggagtgcagactgctagaggaggagaatgccatgctcaggaagcgggtagaggagttaaagaagcaggtcagcaacctgctggccaccaatgaggtactactggaacaaaatgctcagttccgcaatcaggccaaggtcataaccctgagctccactgcaccagcgactgagcagactctggcccccactgtgggcactgttgccacttttaaccatggcattgcccagactcacactactctcagcagccaggctctacagcctcgtccagtgtcccagcaagaactggtggcccctgctggagctccagctgctcccccaactaatgctgcacctcctgctgctccaccacccccacccccacacttgaccccagagatcacgccactgtcagctgccctggctcaaacaattgcccagggaatggcacctccacctgtctccatggctcctgtggctgtatctgtggctcctgtggcccctgtggctgtatcgatggcccaacccttggcaggaatcacaatgagccacaccaccactcccatggtgacttaccctatcgcttcccagagcatgcgcatcacggccatgccacactgatggggctaatggacactcccctggtatagcctcgcagggctggggtcagggggcccttgcccactcacctagccttccccatccctgtctgaagggctcccttgagaactaggacaagagactacaaggagtatgtcctgaggaggggttgggatggtgtgttttctctcacctcccttttatgagggtcctcttgtccatcttcaagcctcacagtgggggcttgcagaggagtgcagactgaagccagcagagaggaaggactgactgaggggctgtgtcctcttatgggaatttgggaacatccctcgtcttgtcctctcttctgcacagcacaggttccagcactggttttagaagaaaaaaataccctgcccagagggaaagccaggaaagattgggaagtgggtggtcaggagagaaggcctgataggagccttcagacaatttgggtcctagttgcttgggttggacaatacaggaattgcttctgggccctgggaaagctgggaccatagtgctccagcccaaagactaggggagcattcattaccctagtttgacctgaaaatccatagggcagggcccactactttccaaagaaataaaagaacaattatttttaacaaatggaggcagtgaaaacttgcttagctattctgtgtggaagatgggagcagtaaatagatctcatgccaaaatgggataaagaccccagcctcacatagctttggtaagatggatagaagccagtgaagaagggtagggacccagaacaagaccaaatggggctttggggaaggcactttatggggtaaaagctttggagccacccagtctagttttaaaaatagtcccatctgtttctggtctctgtctgtattgtgctattcccaggttgcctcagtaaccaggctcctagggtcatttagcagggcaggcagtaaggagagtgtatttgctgaaatgcggatgggatgttacatagttgacagatccttattcaaacagagcaggacaggtggagttgatggccattgagttgatggcagttgccgctcagttgatggcagttaatgtccctcctaccccaccccttcagtggccagttcctgaagccttcaaggcttgggaggtctgggaaaagagagtccttctagggacacaagcctcagggtccatccctttcctctgtctccacataggaccagaagttttaaatctacttaagtcagtaaggccaggggccccaatagtcaaacctcagttcctcctcagctcacggctgatgtagggaaaacaactcaggtgtctagtctaatgggacagtagatttgggggtagagagtgatcctggattgtgttccccctcatcatgtctcctgctacctcttgctttcttgtctggttgatcactcaggtcacatctgggattggagatggtgggctaggtcaaggccagtcattaaaaaaaaaagcctaaagactaa

SEQ ID NO: 286182 - DNA, 2436 bp, Homo sapiens
ggaagcggaagagcgatcgggtaggcggctctttgtcgaagctagaggaccggcaggcggcagcagcaactacggcggcggcggcagaacccagcagtgatgtggaggtggagacccacaggagccccggacttcacctgagctacctcagtggtcaccaagagtggcaagataaagaaaaccctgagttgggcgggaccaggatgcctgaccgggacagctatgccaacggtaccgggagcagcggtggaggccctggaggtggtggcagcgaggaggccagtggggcaggggtaggcagtggcggggccagctcagatgccatctgtagagacttcttgaggaatgttgcagactgctagaggaggagaatgccatgctcaggaagcgggtagaggagttaaagaagcaggtcagcaacctgctggccaccaatgaggtactactggaacaaaatgctcagttccgcaatcaggccaaggtcataaccctgagctccactgcaccagcgactgagcagactctggcccccactgtgggcactgttgccacttttaaccatggcattgcccagactcacactactctcagcagccaggctctacagcctcgtccagtgtcccagcaagaactggtggcccctgctggagctccagctgctcccccaactaatgctgcacctcctgctgctccaccacccccacccccacacttgaccccagagatcacgccactgtcagctgccctggctcaaacaattgcccagggaatggcacctccacctgtctccatggctcctgtggctgtatctgtggctcctgtggcccctgtggctgtatcgatggcccaacccttggcaggaatcacaatgagccacaccaccactcccatggtgacttaccctatcgcttcccagagcatgcgcatcacggccatgccacactgatggggctaatggacactcccctggtatagcctcgcagggctggggtcagggggcccttgcccactcacctagccttccccatccctgtctgaagggctcccttgagaactaggacaagagactacaaggagtatgtcctgaggaggggttgggatggtgtgttttctctcacctcccttttatgagggtcctcttgtccatcttcaagcctcacagtgggggcttgcagaggagtgcagactgaagccagcagagaggaaggactgactgaggggctgtgtcctcttatgggaatttgggaacatccctcgtcttgtcctctcttctgcacagcacaggttccagcactggttttagaagaaaaaaataccctgcccagagggaaagccaggaaagattgggaagtgggtggtcaggagagaaggcctgataggagccttcagacaatttgggtcctagttgcttgggttggacaatacaggaattgcttctgggccctgggaaagctgggaccatagtgctccagcccaaagactaggggagcattcattaccctagtttgacctgaaaatccatagggcagggcccactactttccaaagaaataaaagaacaattatttttaacaaatggaggcagtgaaaacttgcttagctattctgtgtggaagatgggagcagtaaatagatctcatgccaaaatgggataaagaccccagcctcacatagctttggtaagatggatagaagccagtgaagaagggtagggacccagaacaagaccaaatggggctttggggaaggcactttatggggtaaaagctttggagccacccagtctagttttaaaaatagtcccatctgtttctggtctctgtctgtattgtgctattcccaggttgcctcagtaaccaggctcctagggtcatttagcagggcaggcagtaaggagagtgtatttgctgaaatgcggatgggatgttacatagttgacagatccttattcaaacagagcaggacaggtggagttgatggccattgagttgatggcagttgccgctcagttgatggcagttaatgtccctcctaccccaccccttcagtggccagttcctgaagccttcaaggcttgggaggtctgggaaaagagagtccttctagggacacaagcctcagggtccatccctttcctctgtctccacataggaccagaagttttaaatctacttaagtcagtaaggccaggggccccaatagtcaaacctcagttcctcctcagctcacggctgatgtagggaaaacaactcaggtgtctagtctaatgggacagtagatttgggggtagagagtgatcctggattgtgttccccctcatcatgtctcctgctacctcttgctttcttgtctggttgatcactcaggtcacatctgggattggagatggtgggctaggtcaaggccagtcattaaaaaaaaaagcctaaagactaa

SEQ ID NO: 286183 - DNA, 1137 bp, Homo sapiens
ggaagcggaagagcgatcgggtaggcggctctttgtcgaagctagaggaccggcaggcggcagcagcaactacggcggcggcggcagaacccagcagtgatgtggaggtggagacccacaggagccccggacttcacctgagctacctcagtggtcaccaagagtggcaagataaagaaaaccctgagttgggcgggaccaggatgcctgaccgggacagctatgccaacggtaccgggagcagcggtggaggccctggaggtggtggcagcgaggaggccagtggggcaggggtaggcagtggcggggccagctcagatgccatctgtagagacttcttgaggaatgtgtgcaagcgaggcaagcgttgccgatatcgccacccagacatgagcgaggtgtccaacttgggggtgagcaaaaacgagttcatcttctgccatgacttccagaacaaggagtgtagccgcccaaattgccgtttcatccatggctccaaggaggatgaggatggctataagaagacaggagagcttcccccacggctgaggcagaaagtagcagctggccttggcctttcaccggctgacctaccaaatggcaaggaggaggtccctatctgccgtgactttctcaagggtgactgtcagagaggagccaagtgcaagttccgtcacctgcaacgggattttgagtttgatgctcggggtggaggaggcactggtgggggctcaacaggctcagtcctcccaggacgacgtcatgatctctatgatatctatgaccttcctgacaggggctttgaggaccatgagccaggcccaaaacgccggcgaggtggatgctgcccccctgatggccctcattttgagtcatatgaatatagtttggctccaccgcgaggggtggagtgcagactgctagaggaggagaatgccatgctcaggaagcgggtagaggagttaaagaagcaggtcagcaacctgctggccaccaatgaggtactactggaacaaaatgctcagttccgcaatcaggccaaggtcataaccctgagctccactgcaccagcgactgagcagactctggcccccactgtgggcagcatccacctcgagctggtgtgccaaccccgag

SEQ ID NO: 286184 - DNA, 7340 bp, Homo sapiens
aagatttgggggtcgccttgccggcctcctgtcctcctccggcggcggcggagcccgagagaactaggtgaacaccgctttgccagcctcacacagcgtcccctggctctgccgccgctccggacgtcgccctcccgttctgcttgggtccccttagtcgctacctttgctgggatccccctcctccatcctgtggcttcgggttgccgaagagcgatgctcggagggcggccggaagtggcgttggccgccattggcctgccggccagccaccttgctgtcctccgccgccttccgggtgttacatgcagccgggctcggcccctccccctggccggatggatccgtcggcgccacagccccgcgcggaaacctcaggcaaagacatatggcatccaggagaaagatgtcttgccccttctccagataatggaaaactttgtgaagcaagcataaaatctatcacagtggatgaaaatggcaagtcatttgcagtcgtcttatatgcagattttcaagaaaggaaaatacctcttaaacagcttcaagaagtgaaatttgttaaagattgccctaggaatcttatatttgatgatgaagatttagaaaaaccttatttcccaaaccgaaaatttccatcatcttctgttgcttttaaattatctgacaatggagactctattccttataccatcaataggtatttgagagactaccaaagagaaggaacccggtttctttatggacactacatccatggaggagggtgcattctgggtgatgacatgggacttggaaaaacagtacaggttatttcatttctggctgcagttttgcataaaaagggaactcgtgaggatattgaaaataacatgccagagtttttactaagaagtatgaaaaaggaacccctttcttctacagcaaaaaagatgttcttaatagttgctcctctttctgtcctctacaactggaaggatgaattggacacctggggatatttcagagtcactgttttacatggaaacagaaaagataatgaattaattcgtgtaaagcagaggaaatgtgaaattgctctaacaacttatgaaacactacgcttatgcctggatgaacttaacagtttggaatggtcagctgtcattgtggatgaagctcatagaatcaagaatccaaaagctagagtaacagaagttatgaaagctttgaaatgtaatgtccgcattggcctcactggaaccatccttcagaacaacatgaaggaactgtggtgtgttatggactgggctgtgccaggccttttagggagtgggacctacttcaagaagcagttttctgacccagtagaacatggtcagagacacacggcaacaaagagagaactagccactggccgaaaggccatgcaaagacttgccaaaaagatgtctggctggtttctcaggcgcaccaagactcttatcaaggatcagttgcctaagaaggaagaccggatggtgtattgttctttgacagatttccagaaagctgtctatcaaacagtgttagaaacagaggacgtgactttgatacttcaatcttctgagccttgtacctgtaggagtggccaaaaaaggagaaattgttgttataagaccaattctcatggtgaaacagtgaaaaccttgtatctcagttaccttacagtccttcagaaggtagctaaccatgtcgcgctactgcaagctgctagtacttccaaacaacaggaaacacttatcaaaaggatatgtgatcaggtattttccagattcccagattttgtgcagaaaagcaaagatgcagcctttgaaacactttctgaccctaaatacagtggaaaaatgaaggtgagttcatctaaagtatatccttgattggccagcctcaacttttgaggcataaagaataaagcatatgcctacatgacaccttacagccacattttctcttatctacacagtaggaaatagtgagttgcttgacgtgctacagcagtactgtatggcgtctgggcttgattaccgacgacttgatggaagtacaaaatcagaggaaagactcaagattgtaaaagagttcaacagtacacaagatgttaacatttgccttgtctctacaatggctggtggactaggcctcaattttgtcggtgccaatgttgttgtattatttgatcctacttggaatccagccaatgatcttcaagccattgacagaacccaaacacattgtaggagagaaagggatgctgagcccctctcctctgctcctgggttgcagaatggaagtgagaatgcagtaccttacccctggtggtgctgtgtcacaggagcctccatttcctgctggagatgtgagatttgcaggatccaagatgtcctcgagtaaaagtccattgtgaggagggacagagcatataggattggacaatgtagagatgtcaaagtgcttaggctgatatccttgggaactgtggaggaaatcatgtatttacgacagatatacaagcagcaacttcactgtgtggtggttggaagtgaaaatgccaaacgatattttgaagcagttcaaggatctaaagagcatcaaggagagctttttgggatccataacctcttcaaatttaggtcccaagggtcttgtcttacgaaggacatcctggaggtgtgaacttcttctctgaccttttcaataatattttaaatacagtttttcttcctcaggaaatctgaaatacaattgctgttgccttttcagagaaacttttggttttctttatcaaaaatgccttggaatttttacttttagagaataagaaatgaattattgtacctctaaactaagattttcccatgcataattacaaataatgcacacacacaaatgtatatgctgggtagtatgaactccaaggcaattttaaataggcagagagaagtttatagttttgaaaacagctgctgaagtcaggaactaaaaaaagaggttttcctaaataaacaaaaatataaaatgtgttttaattaaaagttaccaaatactccctgagatgtactctcatgtctcatggagatttttgttttctgttcccaataaaaattccacaccagtattttaaactctccctgttgtgttcatcctcagcatacagatgtttcttattcctcaaacaaaatattttatatccttttttaaaaaaatctttaagttcttttatataccggaatactaaggatattaacctattttctaattgatattcatataggtatcataaaatcctggagtatcatctttttcaacctcctcatggtatagatgaggaaactgagtcttagagaacttcaggatatttctcttgacttccaggactttgtagtaaaatcttaatgtacttcatttattcagtaagtaccataaaggcagttcaaggagcaattggttcctgtccttgaggaacttaaaccatcttgaccggaggtggaagagaacgtttacataataaccatgcaatgtcaggaatcgtatgctgaacaagttaaacagtagaccatggatggctgggggagaggaagagagaaggccaagtagaagcagggatcatgacagccacaacatggttgaaagagggacctccagcacacaaactggaaatgcctagacagcctgactgtcaggaatgcagaggtacagaacaagctgcagagccactggcaaaggaagcatgtgatctctgcagtgacttcagtgatgaagagccagtgggagccacaggaataaagactgccaaaaacaaagcacccgattcaagtaaagcttccagctctccaggacagcttaccttactccagtgtggtttctcgaaattgcttgaaacaaaatgtaaagcagttgaggatagtgatggaaatactgcctctgatgatgaaagttctgatgagcagcccacatgcctttcaacagaagccaaagatgctggttgtgagaaaaatcaggactctcttggtacttcaaaacatcagaaattagataacatcctaaatccaaaagaaaagcatattttttataaaagtgagaagattttagaacagaatatttcttccaagtctgacgagaaaaaaattaaaaatacagataaacattgcattttacagaatgtcacagaatcagaagatagtgatgtcatctgtcctacacaatacacaactgagagattccccgacaatagtataaggtttaagccacccttggaaggatctgaggattctgaaacagaacacactgtaaaaacaagaaataatgataatagtcgaaacactgatgacaaaagaaatggaataatttcaaaaaagttaagtcctgagaacacaaccctgaaatctattttgaaaagaaaaggcaccagtgatatcagtgatgaatctgatgacattgaaatttcttccaagtcaagagtaagaaagagagctagttcattgaggtttaagagaataaaagaaaccaaaaaagaacttcacaattctcccaaaacaatgaacaaaacaaaccaagtgtatgcagcaaatgaggatcataactctcagtttattgatgattattcatcctcagatgagagtttatccgtcagccacttcagtttctctaaacagagccacagaccaagaactataagagacagaactagtttttcttcaaaattgcctagccataataagaaaaatagcacttttattccaagaaaaccaatgaaatgttcaaatgagaaagttgttaatcaagagcagtcgtatgaatcaatggataaatttttagatggcgttcaggaagtggcttatattcactcaaaccagaatgtaattggatcgagcaaagctgaaaatcacatgagccgatgggcagcacatgacgtatttgagttgaagcagttttctcagctgcctgctaacatagctgtttgcagttctaagaaaacaatttgaagaaatggcctcttattttaactcgtcttctgtaaacgaatttgctaaacatataaccaatgccacatcagaagaacgacagaaaatgctaagagacttttatgcttctcaatatccagaggtaaaagaattttttgtggattctgtgtcacaattcaacaattcttcctttgagaaaggagagcagcgcacccggaagaaatctgataaagagaatctcttataaaaccaaggctgtcagattctgaaaccttgtcatttaaagattctaccaacaaaatttctcaagtttgcagcctaaaaacatataaaagaaaatcagttaagtttcagaatcatatttcctatagagaagaggtgttttttaatgatgcagaaactaagaaatcacctgttagttctactcaagagattgacagtgggaaaaacagccaggcatccgaagatactgtgacatcccgttctctgaacagtgagtctgaaacacgtgagagaaggttagaaaataccatgaaagaccaacaggacctcacaagaacgggcatttcaagaaaagaaccccttctcaaattggaaaacaaaaagatagaaaatccagtgctggaaaatacttctgtgataagcttacttggtgatacctctattcttgatgacctttttaaaagtcatgggaacagtcccacacaactgccaaagaaagttctttcagggcccatggaaaaagcaaaacagagaccaaaagatttctgggacatcttgaatgagcagaatgatgagagtcttagtaaactcacagacttggcagtaatagagactctgtgtgaaaaagcacctctagcagcaccctttaaaaggagagaagagccagcaacttctctttggaaatcaaatgagaaatttttatggaagaaatttagcccaagtgatacagatgaaaacgcaaccaatacacagagtaccacataagcatataaatgaattactgcaccagtaaactgctgccatcactgtttacggcactggattccacactgattctattatcttgaacacagttgttgacatatatttttattaaattattgctttaggattttttgaagtctaaagtattgtcatggatctgtttttcttgatattgatttgatctttcaagaatatgattgtatttatagtataaacctctgttatgaattagaaaagattctaggtttgttaataggagacctgggacatctttcttactatattacataatgatgtgacacttgccccggtgagcattgtttcccagtatgaaagatgaagagtctgtaccgaatcagcatgagtgtccttccagtttaaaaaagctttgcttcgctctcctaatggctcataggctgaatcatgtctgcccctcaaatcaggtgtataccaatgtgttttttactagcacttgggaaagttattaagtattttctttttccctgggcatcatgttctattattattttagaaaaaagtcataattggtactgaatatatggtatatataatattaaaatggtaattttgcaacagctcaaaattaaaaggttaatgttatacactttactatatgagctgtgattactaccattagccacagataccagtgcctcaactttttatgtacctattgtgatttaatgtaaataaaggtttgtatagtacttttgtagttcttaagtatgaagaaatgggtaaactttttattttgttagaaactgttatattttgagtgtaatatttatggtttatagcaaaatgaatgtgcttattgttgaatgcatgtatttagaagcctttactcagcccctgtgttctgtgctaggagcttgagctctacaggtaaggcagagctaccggtgaatgaaaggaaatcatgtcagtgaaaaatcatggtggaaagcccctggcatcacatgtgcatgctgtaggcaggacctgagctgcctccgctgcaggttcagatgcaccgctgcagctgtccttcagttagttcacagggctgcaagaggaggacacatccctccagaaaacagcctgagccgggaactggctgtgctaaagagcactgctatcaagttgaggagagagggcttccgtgtactcaggatgtagagtcattgctcagaagtgaacaaaaaatcaaaaacaaaagtcttctcaagggactgatcggccaagtatgcttttctttagagcaatgttttgccctagagaattgtaaaatttatgtcatgactcagtacatatgtgttcgtacatatatgattggaataaaatgtttatgaaatatttactcataaaaaa

SEQ ID NO: 286185 - DNA, 7522 bp, Homo sapiens
aagatttgggggtcgccttgccggcctcctgtcctcctccggcggcggcggagcccgagagaactaggtgaacaccgctttgccagcctcacacagcgtcccctggctctgccgccgctccggacgtcgccctcccgttctgcttgggtccccttagtcgctacctttgctgggatccccctcctccatcctgtggcttcgggttgccgaagagcgatgctcggagggcggccggaagtggcgttggccgccattggcctgccggccagccaccttgctgtcctccgccgccttccgggtgttacatgcagccgggctcggcccctccccctggccggatggatccgtcggcgccacagccccgcgcggaaacctcaggcaaagacatatggcatccaggagaaagatgtcttgccccttctccagataatggaaaactttgtgaagcaagcataaaatctatcacagtggatgaaaatggcaagtcatttgcagtcgtcttatatgcagattttcaagaaaggaaaatacctcttaaacagcttcaagaagtgaaatttgttaaagattgccctaggaatcttatatttgatgatgaagatttagaaaaaccttatttcccaaaccgaaaatttccatcatcttctgttgcttttaaattatctgacaatggagactctattccttataccatcaataggtatttgagagactaccaaagagaaggaacccggtttctttatggacactacatccatggaggagggtgcattctgggtgatgacatgggacttggaaaaacagtacaggttatttcatttctggctgcagttttgcataaaaagggaactcgtgaggatattgaaaataacatgccagagtttttactaagaagtatgaaaaaggaacccctttcttctacagcaaaaaagatgttcttaatagttgctcctctttctgtcctctacaactggaaggatgaattggacacctggggatatttcagagtcactgttttacatggaaacagaaaagataatgaattaattcgtgtaaagcagaggaaatgtgaaattgctctaacaacttatgaaacactacgcttatgcctggatgaacttaacagtttggaatggtcagctgtcattgtggatgaagctcatagaatcaagaatccaaaagctagagtaacagaagttatgaaagctttgaaatgtaatgtccgcattggcctcactggaaccatccttcagaacaacatgaaggaactgtggtgtgttatggactgggctgtgccaggccttttagggagtgggacctacttcaagaagcagttttctgacccagtagaacatggtcagagacacacggcaacaaagagagaactagccactggccgaaaggccatgcaaagacttgccaaaaagatgtctggctggtttctcaggcgcaccaagactcttatcaaggatcagttgcctaagaaggaagaccggatggtgtattgttctttgacagatttccagaaagctgtctatcaaacagtgttagaaacagaggacgtgactttgatacttcaatcttctgagccttgtacctgtaggagtggccaaaaaaggagaaattgttgttataagaccaattctcatggtgaaacagtgaaaaccttgtatctcagttaccttacagtccttcagaaggtagctaaccatgtcgcgctactgcaagctgctagtacttccaaacaacaggaaacacttatcaaaaggatatgtgatcaggtattttccagattcccagattttgtgcagaaaagcaaagatgcagcctttgaaacactttctgaccctaaatacagtggaaaaatgaaggtgagttcatctaaagtatatccttgattggccagcctcaacttttgaggcataaagaataaagcatatgcctacatgacaccttacagccacattttctcttatctacacagtaggaaatagtgagttgcttgacgtgctacagcagtactgtatggcgtctgggcttgattaccgacgacttgatggaagtacaaaatcagaggaaagactcaagattgtaaaagagttcaacagtacacaagatgttaacatttgccttgtctctacaatggctggtggactaggcctcaattttgtcggtgccaatgttgttgtattatttgatcctacttggaatccagccaatgatcttcaagccattgacagaacccaaacacattgtaggagagaaagggatgctgagcccctctcctctgctcctgggttgcagaatggaagtgagaatgcagtaccttacccctggtggtgctgtgtcacaggagcctccatttcctgctggagatgtgagatttgcaggatccaagatgtcctcgagtaaaagtccattgtgaggagggacagagcatataggattggacaatgtagagatgtcaaagtgcttaggctgatatccttgggaactgtggaggaaatcatgtatttacgacagatatacaagcagcaacttcactgtgtggtggttggaagtgaaaatgccaaacgatattttgaagcagttcaaggatctaaagagcatcaaggagagctttttgggatccataacctcttcaaatttaggtcccaagggtcttgtcttacgaaggacatcctggaggtgtgaacttcttctctgaccttttcaataatattttaaatacagtttttcttcctcaggaaatctgaaatacaattgctgttgccttttcagagaaacttttggttttctttatcaaaaatgccttggaatttttacttttagagaataagaaatgaattattgtacctctaaactaagattttcccatgcataattacaaataatgcacacacacaaatgtatatgctgggtagtatgaactccaaggcaattttaaataggcagagagaagtttatagttttgaaaacagctgctgaagtcaggaactaaaaaaagaggttttcctaaataaacaaaaatataaaatgtgttttaattaaaagttaccaaatactccctgagatgtactctcatgtctcatggagatttttgttttctgttcccaataaaaattccacaccagtattttaaactctccctgttgtgttcatcctcagcatacagatgtttcttattcctcaaacaaaatattttatatccttttttaaaaaaatctttaagttcttttatataccggaatactaaggatattaacctattttctaattgatattcatataggtatcataaaatcctggagtatcatctttttcaacctcctcatggtatagatgaggaaactgagtcttagagaacttcaggatatttctcttgacttccaggactttgtagtaaaatcttaatgtacttcatttattcagtaagtaccataaaggcagttcaaggagcaattggttcctgtccttgaggaacttaaaccatcttgaccggaggtggaagagaacgtttacataataaccatgcaatgtcaggaatcgtatgctgaacaagttaaacagtagaccatggatggctgggggagaggaagagagaaggccaagtagaagcagggatcatgacagccacaacatggttgaaagagggacctccagcacacaaactggaaatgcctagacagcctgactgtcaggaatgcagaggtacagaacaagctgcagagccactggcaaaggaagcatgtgatctctgcagtgacttcagtgatgaagagccagtgggagccacaggaataaagactgccaaaaacaaagcacccgattcaagtaaagcttccagctctccaggacagcttaccttactccagtgtggtttctcgaaattgcttgaaacaaaatgtaaagcagttgaggatagtgatggaaatactgcctctgatgatgaaagttctgatgagcagcccacatgcctttcaacagaagccaaagatgctggttgtgagaaaaatcaggactctcttggtacttcaaaacatcagaaattagataacatcctaaatccaaaagaaaagcatattttttataaaagtgagaagattttagaacagaatatttcttccaagtctgacgagaaaaaaattaaaaatacagataaacattgcattttacagaatgtcacagaatcagaagatagtgatgtcatctgtcctacacaatacacaactgagagattccccgacaatagtataaggtttaagccacccttggaaggatctgaggattctgaaacagaacacactgtaaaaacaagaaataatgataatagtcgaaacactgatgacaaaagaaatggaataatttcaaaaaagttaagtcctgagaacacaaccctgaaatctattttgaaaagaaaaggcaccagtgatatcagtgatgaatctgatgacattgaaatttcttccaagtcaagagtaagaaagagagctagttcattgaggtttaagagaataaaagaaaccaaaaaagaacttcacaattctcccaaaacaatgaacaaaacaaaccaagtgtatgcagcaaatgaggatcataactctcagtttattgatgattattcatcctcagatgagagtttatccgtcagccacttcagtttctctaaacagagccacagaccaagaactataagagacagaactagtttttcttcaaaattgcctagccataataagaaaaatagcacttttattccaagaaaaccaatgaaatgttcaaatgagaaagttgttaatcaagagcagtcgtatgaatcaatggataaatttttagatggcgttcaggaagtggcttatattcactcaaaccagaatgtaattggatcgagcaaagctgaaaatcacatgagccgatgggcagcacatgacgtatttgagttgaagcagttttctcagctgcctgctaacatagctgtttgcagttctaagacatataaagaaaaagtggatgcagatacattgccacacacaaagaaaggccagcaaccgagtgaaggcagcatttcacttcctctttacatttcaaatcctgtaaaccagaagaagaaaaaagtctaccatacaaaccagaccaccttcataattggagaaacaccaaaaggaatccgcagaaaacaatttgaagaaatggcctcttattttaactcgtcttctgtaaacgaatttgctaaacatataaccaatgccacatcagaagaacgacagaaaatgctaagagacttttatgcttctcaatatccagaggtaaaagaattttttgtggattctgtgtcacaattcaacaattcttcctttgagaaaggagagcagcgcacccggaagaaatctgataaagagaatctcttataaaaccaaggctgtcagattctgaaaccttgtcatttaaagattctaccaacaaaatttctcaagtttgcagcctaaaaacatataaaagaaaatcagttaagtttcagaatcatatttcctatagagaagaggtgttttttaatgatgcagaaactaagaaatcacctgttagttctactcaagagattgacagtgggaaaaacagccaggcatccgaagatactgtgacatcccgttctctgaacagtgagtctgaaacacgtgagagaaggttagaaaataccatgaaagaccaacaggacctcacaagaacgggcatttcaagaaaagaaccccttctcaaattggaaaacaaaaagatagaaaatccagtgctggaaaatacttctgtgataagcttacttggtgatacctctattcttgatgacctttttaaaagtcatgggaacagtcccacacaactgccaaagaaagttctttcagggcccatggaaaaagcaaaacagagaccaaaagatttctgggacatcttgaatgagcagaatgatgagagtcttagtaaactcacagacttggcagtaatagagactctgtgtgaaaaagcacctctagcagcaccctttaaaaggagagaagagccagcaacttctctttggaaatcaaatgagaaatttttatggaagaaatttagcccaagtgatacagatgaaaacgcaaccaatacacagagtaccacataagcatataaatgaattactgcaccagtaaactgctgccatcactgtttacggcactggattccacactgattctattatcttgaacacagttgttgacatatatttttattaaattattgctttaggattttttgaagtctaaagtattgtcatggatctgtttttcttgatattgatttgatctttcaagaatatgattgtatttatagtataaacctctgttatgaattagaaaagattctaggtttgttaataggagacctgggacatctttcttactatattacataatgatgtgacacttgccccggtgagcattgtttcccagtatgaaagatgaagagtctgtaccgaatcagcatgagtgtccttccagtttaaaaaagctttgcttcgctctcctaatggctcataggctgaatcatgtctgcccctcaaatcaggtgtataccaatgtgttttttactagcacttgggaaagttattaagtattttctttttccctgggcatcatgttctattattattttagaaaaaagtcataattggtactgaatatatggtatatataatattaaaatggtaattttgcaacagctcaaaattaaaaggttaatgttatacactttactatatgagctgtgattactaccattagccacagataccagtgcctcaactttttatgtacctattgtgatttaatgtaaataaaggtttgtatagtacttttgtagttcttaagtatgaagaaatgggtaaactttttattttgttagaaactgttatattttgagtgtaatatttatggtttatagcaaaatgaatgtgcttattgttgaatgcatgtatttagaagcctttactcagcccctgtgttctgtgctaggagcttgagctctacaggtaaggcagagctaccggtgaatgaaaggaaatcatgtcagtgaaaaatcatggtggaaagcccctggcatcacatgtgcatgctgtaggcaggacctgagctgcctccgctgcaggttcagatgcaccgctgcagctgtccttcagttagttcacagggctgcaagaggaggacacatccctccagaaaacagcctgagccgggaactggctgtgctaaagagcactgctatcaagttgaggagagagggcttccgtgtactcaggatgtagagtcattgctcagaagtgaacaaaaaatcaaaaacaaaagtcttctcaagggactgatcggccaagtatgcttttctttagagcaatgttttgccctagagaattgtaaaatttatgtcatgactcagtacatatgtgttcgtacatatatgattggaataaaatgtttatgaaatatttactcataaaaaa

SEQ ID NO: 286186 - DNA, 4582 bp, Homo sapiens
aagatttgggggtcgccttgccggcctcctgtcctcctccggcggcggcggagcccgagagaactaggtgaacaccgctttgccagcctcacacagcgtcccctggctctgccgccgctccggacgtcgccctcccgttctgcttgggtccccttagtcgctacctttgctgggatccccctcctccatcctgtggcttcgggttgccgaagagcgatgctcggagggcggccggaagtggcgttggccgccattggcctgccggccagccaccttgctgtcctccgccgccttccgggtgttacatgcagccgggctcggcccctccccctggccggatggatccgtcggcgccacagccccgcgcggaaacctcaggcaaagacatatggcatccaggagaaagatgtcttgccccttctccagataatggaaaactttgtgaagcaagcataaaatctatcacagtggatgaaaatggcaagtcatttgcagtcgtcttatatgcagattttcaagaaaggaaaatacctcttaaacagcttcaagaagtgaaatttgttaaagattgccctaggaatcttatatttgatgatgaagatttagaaaaaccttatttcccaaaccgaaaatttccatcatcttctgttgcttttaaattatctgacaatggagactctattccttataccatcaataggtatttgagagactaccaaagagaaggaacccggtttctttatggacactacatccatggaggagggtgcattctgggtgatgacatgggacttggaaaaacagtacaggttatttcatttctggctgcagttttgcataaaaagggaactcgtgaggatattgaaaataacatgccagagtttttactaagaagtatgaaaaaggaacccctttcttctacagcaaaaaagatgttcttaatagttgctcctctttctgtcctctacaactggaaggatgaattggacacctggggatatttcagagtcactgttttacatggaaacagaaaagataatgaattaattcgtgtaaagcagaggaaatgtgaaattgctctaacaacttatgaaacactacgcttatgcctggatgaacttaacagtttggaatggtcagctgtcattgtggatgaagctcatagaatcaagaatccaaaagctagagtaacagaagttatgaaagctttgaaatgtaatgtccgcattggcctcactggaaccatccttcagaacaacatgaaggaactgtggtgtgttatggactgggctgtgccaggccttttagggagtgggacctacttcaagaagcagttttctgacccagtagaacatggtcagagacacacggcaacaaagagagaactagccactggccgaaaggccatgcaaagacttgccaaaaagatgtctggctggtttctcaggcgcaccaagactcttatcaaggatcagttgcctaagaaggaagaccggatggtgtattgttctttgacagatttccagaaagctgtctatcaaacagtgttagaaacagaggacgtgactttgatacttcaatcttctgagccttgtacctgtaggagtggccaaaaaaggagaaattgttgttataagaccaattctcatggtgaaacagtgaaaaccttgtatctcagttaccttacagtccttcagaaggtagctaaccatgtcgcgctactgcaagctgctagtacttccaaacaacaggaaacacttatcaaaaggatatgtgatcaggtattttccagattcccagattttgtgcagaaaagcaaagatgcagcctttgaaacactttctgaccctaaatacagtggaaaaatgaaggtgagttcatctaaagtatatccttgattggccagcctcaacttttgaggcataaagaataaagcatatgcctacatgacaccttacagccacattttctcttatctacacagtaggaaatagtgagttgcttgacgtgctacagcagtactgtatggcgtctgggcttgattaccgacgacttgatggaagtacaaaatcagaggaaagactcaagattgtaaaagagttcaacagtacacaagatgttaacatttgccttgtctctacaatggctggtggactaggcctcaattttgtcggtgccaatgttgttgtattatttgatcctacttggaatccagccaatgatcttcaagccattgacagaacccaaacacattgtaggagagaaagggatgctgagcccctctcctctgctcctgggttgcagaatggaagtgagaatgcagtaccttacccctggtggtgctgtgtcacaggagcctccatttcctgctggagatgtgagatttgcaggatccaagatgtcctcgagtaaaagtccattgtgaggagggacagagcatataggattggacaatgtagagatgtcaaagtgcttaggctgatatccttgggaactgtggaggaaatcatgtatttacgacagatatacaagcagcaacttcactgtgtggtggttggaagtgaaaatgccaaacgatattttgaagcagttcaaggatctaaagagcatcaaggagagctttttgggatccataacctcttcaaatttaggtcccaagggtcttgtcttacgaaggacatcctggagtaagtaccataaaggcagttcaaggagcaattggttcctgtccttgaggaacttaaaccatcttgaccggaggtggaagagaacgtttacataataaccatgcaatgtcaggaatcgtatgctgaacaagttaaacagtagaccatggatggctgggggagaggaagagagaaggccaagtagaagcagggatcatgacagccacaacatggttgaaagagggacctccagcacacaaactggaaatgcctagacagcctgactgtcaggaatgcagaggtacagaacaagctgcagagccactggcaaaggaagcatgtgatctctgcagtgacttcagtgatgaagagccagtgggagccacaggaataaagactgccaaaaacaaagcacccgattcaagtaaagcttccagctctccaggacagcttaccttactccagtgtggtttctcgaaattgcttgaaacaaaatgtaaagcagttgaggatagtgatggaaatactgcctctgatgatgaaagttctgatgagcagcccacatgcctttcaacagaagccaaagatgctggttgtgagaaaaatcaggactctcttggtacttcaaaacatcagaaattagataacatcctaaatccaaaagaaaagcatattttttataaaagtgagaagattttagaacagaatatttcttccaagtctgacgagaaaaaaattaaaaatacagataaacattgcattttacagaatgtcacagaatcagaagatagtgatgtcatctgtcctacacaatacacaactgagagattccccgacaatagtataaggtttaagccacccttggaaggatctgaggattctgaaacagaacacactgtaaaaacaagaaataatgataatagtcgaaacactgatgacaaaagaaatggaataatttcaaaaaagttaagtcctgagaacacaaccctgaaatctattttgaaaagaaaaggcaccagtgatatcagtgatgaatctgatgacattgaaatttcttccaagtcaagagtaagaaagagagctagttcattgaggtttaagagaataaaagaaaccaaaaaagaacttcacaattctcccaaaacaatgaacaaaacaaaccaagtgtatgcagcaaatgaggatcataactctcagtttattgatgattattcatcctcagatgagagtttatccgtcagccacttcagtttctctaaacagagccacagaccaagaactataagagacagaactagtttttcttcaaaattgcctagccataataagaaaaatagcacttttattccaagaaaaccaatgaaatgttcaaatgagaaagttgttaatcaagagcagtcgtatgaatcaatggataaatttttagatggcgttcaggaagtggcttatattcactcaaaccagaatgtaattggatcgagcaaagctgaaaatcacatgagccgatgggcagcacatgacgtatttgagttgaagcagttttctcagctgcctgctaacatagctgtttgcagttctaagacatataaagaaaaagtggatgcagatacattgccacacacaaagaaaggccagcaaccgagtgaaggcagcatttcacttcctctttacatttcaaatcctgtaaaccagaagaagaaaaaagtctaccatacaaaccagaccaccttcataattggagaaacaccaaaaggaatccgcaggtatattgtctctgacaatactatacttgaagaataattctcaaaggaaatgtagctcattagtaaaatatgtaaatacttgaattataaccataactgacatctgaatatttcagaaaaatctgaatttcaaaaataaactgcaaatgtttt

SEQ ID NO: 286187 - DNA, 3080 bp, Homo sapiens
aagatttgggggtcgccttgccggcctcctgtcctcctccggcggcggcggagcccgagagaactaggtgaacaccgctttgccagcctcacacagcgtcccctggctctgccgccgctccggacgtcgccctcccgttctgcttgggtccccttagtcgctacctttgctgggatccccctcctccatcctgtggcttcgggttgccgaagagcgatgctcggagggcggccggaagtggcgttggccgccattggcctgccggccagccaccttgctgtcctccgccgccttccgggtgttacatgcagccgggctcggcccctccccctggccggatggatccgtcggcgccacagccccgcgcggaaacctcaggcaaagacatatggcatccaggagaaagatgtcttgccccttctccagataatggaaaactttgtgaagcaagcataaaatctatcacagtggatgaaaatggcaagtcatttgcagtcgtcttatatgcagattttcaagaaaggaaaatacctcttaaacagcttcaagaagtgaaatttgttaaagattgccctaggaatcttatatttgatgatgaagatttagaaaaaccttatttcccaaaccgaaaatttccatcatcttctgttgcttttaaattatctgacaatggagactctattccttataccatcaataggtatttgagagactaccaaagagaaggaacccggtttctttatggacactacatccatggaggagggtgcattctgggtgatgacatgggacttggaaaaacagtacaggttatttcatttctggctgcagttttgcataaaaagggaactcgtgaggatattgaaaataacatgccagagtttttactaagaagtatgaaaaaggaacccctttcttctacagcaaaaaagatgttcttaatagttgctcctctttctgtcctctacaactggaaggatgaattggacacctggggatatttcagagtcactgttttacatggaaacagaaaagataatgaattaattcgtgtaaagcagaggaaatgtgaaattgctctaacaacttatgaaacactacgcttatgcctggatgaacttaacagtttggaatggtcagctgtcattgtggatgaagctcatagaatcaagaatccaaaagctagagtaacagaagttatgaaagctttgaaatgtaatgtccgcattggcctcactggaaccatccttcagaacaacatgaaggaactgtggtgtgttatggactgggctgtgccaggccttttagggagtgggacctacttcaagaagcagttttctgacccagtagaacatggtcagagacacacggcaacaaagagagaactagccactggccgaaaggccatgcaaagacttgccaaaaagatgtctggctggtttctcaggcgcaccaagactcttatcaaggatcagttgcctaagaaggaagaccggatggtgtattgttctttgacagatttccagaaagctgtctatcaaacagtgttagaaacagaggacgtgactttgatacttcaatcttctgagccttgtacctgtaggagtggccaaaaaaggagaaattgttgttataagaccaattctcatggtgaaacagtgaaaaccttgtatctcagttaccttacagtccttcagaaggtagctaaccatgtcgcgctactgcaagctgctagtacttccaaacaacaggaaacacttatcaaaaggatatgtgatcaggtattttccagattcccagattttgtgcagaaaagcaaagatgcagcctttgaaacactttctgaccctaaatacagtggaaaaatgaaggtccttcagcagcttttaaatcattgcaggaaaaacagagataaagttcttctcttttctttttccaccaagttgcttgacgtgctacagcagtactgtatggcgtctgggcttgattaccgacgacttgatggaagtacaaaatcagaggaaagactcaagattgtaaaagagttcaacagtacacaagatgttaacatttgccttgtctctacaatggctggtggactaggcctcaattttgtcggtgccaatgttgttgtattatttgatcctacttggaatccagccaatgatcttcaagccattgacagaacccaaacacattgtaggagagaaagggatgctgagcccctctcctctgctcctgggttgcagaatggaagtgagaatgcagtaccttacccctggtggtgctgtgtcacaggagcctccatttcctgctggagatgtgagatttgcaggatccaagatgtcctcgagtaaaagtccattgtgaggagggacagagcatataggattggacaatgtagagatgtcaaagtgcttaggctgatatccttgggaactgtggaggaaatcatgtatttacgacagatatacaagcagcaacttcactgtgtggtggttggaagtgaaaatgccaaacgatattttgaagcagttcaaggatctaaagagcatcaaggagagctttttgggatccataacctcttcaaatttaggtcccaagggtcttgtcttacgaaggacatcctggaggtgtgaacttcttctctgaccttttcaataatattttaaatacagtttttcttcctcaggaaatctgaaatacaattgctgttgccttttcagagaaacttttggttttctttatcaaaaatgccttggaatttttacttttagagaataagaaatgaattattgtacctctaaactaagattttcccatgcataattacaaataatgcacacacacaaatgtatatgctgggtagtatgaactccaaggcaattttaaataggcagagagaagtttatagttttgaaaacagctgctgaagtcaggaactaaaaaaagaggttttcctaaataaacaaaaatataaaatgtgttttaattaaaagttaccaaatactccctgagatgtactctcatgtctcatggagatttttgttttctgttcccaataaaaattccacaccagt

SEQ ID NO: 286188 - DNA, 5714 bp, Homo sapiens
aagatttgggggtcgccttgccggcctcctgtcctcctccggcggcggcggagcccgagagaactaggtgaacaccgctttgccagcctcacacagcgtcccctggctctgccgccgctccggacgtcgccctcccgttctgcttgggtccccttagtcgctacctttgctgggatccccctcctccatcctgtggcttcgggttgccgaagagcgatgctcggagggcggccggaagtggcgttggccgccattggcctgccggccagccaccttgctgtcctccgccgccttccgggtgttacatgcagccgggctcggcccctccccctggccggatggatccgtcggcgccacagccccgcgcggaaacctcaggcaaagacatatggcatccaggagaaagatgtcttgccccttctccagataatggaaaactttgtgaagcaagcataaaatctatcacagtggatgaaaatggcaagtcatttgcagtcgtcttatatgcagattttcaagaaaggaaaatacctcttaaacagcttcaagaagtgaaatttgttaaagattgccctaggaatcttatatttgatgatgaagatttagaaaaaccttatttcccaaaccgaaaatttccatcatcttctgttgcttttaaattatctgacaatggagactctattccttataccatcaataggtatttgagagactaccaaagagaaggaacccggtttctttatggacactacatccatggaggagggtgcattctgggtgatgacatgggacttggaaaaacagtacaggttatttcatttctggctgcagttttgcataaaaagggaactcgtgaggatattgaaaataacatgccagagtttttactaagaagtatgaaaaaggaacccctttcttctacagcaaaaaagatgttcttaatagttgctcctctttctgtcctctacaactggaaggatgaattggacacctggggatatttcagagtcactgttttacatggaaacagaaaagataatgaattaattcgtgtaaagcagaggaaatgtgaaattgctctaacaacttatgaaacactacgcttatgcctggatgaacttaacagtttggaatggtcagctgtcattgtggatgaagctcatagaatcaagaatccaaaagctagagtaacagaagttatgaaagctttgaaatgtaatgtccgcattggcctcactggaaccatccttcagaacaacatgaaggaactgtggtgtgttatggactgggctgtgccaggccttttagggagtgggacctacttcaagaagcagttttctgacccagtagaacatggtcagagacacacggcaacaaagagagaactagccactggccgaaaggccatgcaaagacttgccaaaaagatgtctggctggtttctcaggcgcaccaagactcttatcaaggatcagttgcctaagaaggaagaccggatggtgtattgttctttgacagatttccagaaagctgtctatcaaacagtgttagaaacagaggacgtgactttgatacttcaatcttctgagccttgtacctgtaggagtggccaaaaaaggagaaattgttgttataagaccaattctcatggtgaaacagtgaaaaccttgtatctcagttaccttacagtccttcagaaggtagctaaccatgtcgcgctactgcaagctgctagtacttccaaacaacaggaaacacttatcaaaaggatatgtgatcaggtattttccagattcccagattttgtgcagaaaagcaaagatgcagcctttgaaacactttctgaccctaaatacagtggaaaaatgaaggtgagttcatctaaagtatatccttgattggccagcctcaacttttgaggcataaagaataaagcatatgcctacatgacaccttacagccacattttctcttatctacacagtaggaaatagtgagttgcttgacgtgctacagcagtactgtatggcgtctgggcttgattaccgacgacttgatggaagtacaaaatcagaggaaagactcaagattgtaaaagagttcaacagtacacaagatgttaacatttgccttgtctctacaatggctggtggactaggcctcaattttgtcggtgccaatgttgttgtattatttgatcctacttggaatccagccaatgatcttcaagccattgacagaacccaaacacattgtaggagagaaagggatgctgagcccctctcctctgctcctgggttgcagaatggaagtgagaatgcagtaccttacccctggtggtgctgtgtcacaggagcctccatttcctgctggagatgtgagatttgcaggatccaagatgtcctcgagtaaaagtccattgtgaggagggacagagcatataggattggacaatgtagagatgtcaaagtgcttaggctgatatccttgggaactgtggaggaaatcatgtatttacgacagatatacaagcagcaacttcactgtgtggtggttggaagtgaaaatgccaaacgatattttgaagcagttcaaggatctaaagagcatcaaggagagctttttgggatccataacctcttcaaatttaggtcccaagggtcttgtcttacgaaggacatcctggaggtgtgaacttcttctctgaccttttcaataatattttaaatacagtttttcttcctcaggaaatctgaaatacaattgctgttgccttttcagagaaacttttggttttctttatcaaaaatgccttggaatttttacttttagagaataagaaatgaattattgtacctctaaactaagattttcccatgcataattacaaataatgcacacacacaaatgtatatgctgggtagtatgaactccaaggcaattttaaataggcagagagaagtttatagttttgaaaacagctgctgaagtcaggaactaaaaaaagaggttttcctaaataaacaaaaatataaaatgtgttttaattaaaagttaccaaatactccctgagatgtactctcatgtctcatggagatttttgttttctgttcccaataaaaattccacaccagtattttaaactctccctgttgtgttcatcctcagcatacagatgtttcttattcctcaaacaaaatattttatatccttttttaaaaaaatctttaagttcttttatataccggaatactaaggatattaacctattttctaattgatattcatataggtatcataaaatcctggagtatcatctttttcaacctcctcatggtatagatgaggaaactgagtcttagagaacttcaggatatttctcttgacttccaggactttgtagtaaaatcttaatgtacttcatttattcagtaagtaccataaaggcagttcaaggagcaattggttcctgtccttgaggaacttaaaccatcttgaccggaggtggaagagaacgtttacataataaccatgcaatgtcaggaatcgtatgctgaacaagttaaacagtagaccatggatggctgggggagaggaagagagaaggccaagtagaagcagggatcatgacagccacaacatggttgaaagagggacctccagcacacaaactggaaatgcctagacagcctgactgtcaggaatgcagaggtacagaacaagctgcagagccactggcaaaggaagcatgtgatctctgcagtgacttcagtgatgaagagccagtgggagccacaggaataaagactgccaaaaacaaagcacccgattcaagtaaagcttccagctctccaggacagcttaccttactccagtgtggtttctcgaaattgcttgaaacaaaatgtaaagcagttgaggatagtgatggaaatactgcctctgatgatgaaagttctgatgagcagcccacatgcctttcaacagaagccaaagatgctggttgtgagaaaaatcaggactctcttggtacttcaaaacatcagaaattagataacatcctaaatccaaaagaaaagcatattttttataaaagtgagaagattttagaacagaatatttcttccaagtctgacgagaaaaaaattaaaaatacagataaacattgcattttacagaatgtcacagaatcagaagatagtgatgtcatctgtcctacacaatacacaactgagagattccccgacaatagtataaggtttaagccacccttggaaggatctgaggattctgaaacagaacacactgtaaaaacaagaaataatgataatagtcgaaacactgatgacaaaagaaatggaataatttcaaaaaagttaagtcctgagaacacaaccctgaaatctattttgaaaagaaaaggcaccagtgatatcagtgatgaatctgatgacattgaaatttcttccaagtcaagagtaagaaagagagctagttcattgaggtttaagagaataaaagaaaccaaaaaagaacttcacaattctcccaaaacaatgaacaaaacaaaccaagtgtatgcagcaaatgaggatcataactctcagtttattgatgattattcatcctcagatgagagtttatccgtcagccacttcagtttctctaaacagagccacagaccaagaactataagagacagaactagtttttcttcaaaattgcctagccataataagaaaaatagcacttttattccaagaaaaccaatgaaatgttcaaatgagaaagttgttaatcaagagcagtcgtatgaatcaatggataaatttttagatggcgttcaggaagtggcttatattcactcaaaccagaatgtaattggatcgagcaaagctgaaaatcacatgagccgatgggcagcacatgacgtatttgagttgaagcagttttctcagctgcctgctaacatagctgtttgcagttctaagacatataaagaaaaagtggatgcagatacattgccacacacaaagaaaggccagcaaccgagtgaaggcagcatttcacttcctctttacatttcaaatcctgtaaaccagaagaagaaaaaagtctaccatacaaaccagaccaccttcataattggagaaacaccaaaaggaatccgcaggtatattgtctctgacaatactatacttgaagaataattctcaaaggaaatgtagctcattagtaaaatatgtaaatacttgaattataaccataactgacatctgaatatttcagaaaaatctgaatttcaaaaataaactgcaaatgttttagatgttgttagaaggctaatccctgaattgattaccataaaaagggaaatcatgttatacaaagaaatgaaatacttaagtgcattttattcattcagtcaatgaatatattttgagcacctaatatatgcccaggcattgtgctgagtcttgaatatgcagtgtaaaaaaaggacagcagggtgcggtggctcatgcttgtaatctcagcactttgggaggccgaggcgggtggatcacgaggtcaggagattgagaccatcctggctaatacggtgaaaccccgtctctactaaaaatgcaaaaaattagccgggcgtggtggcgggcacctgtagtcccagctactcaggaggctgaggcaggagaatggagtgaacctgggag

SEQ ID NO: 286189 - DNA, 2209 bp, Homo sapiens
aagatttgggggtcgccttgccggcctcctgtcctcctccggcggcggcggagcccgagagaactaggtgaacaccgctttgccagcctcacacagcgtcccctggctctgccgccgctccggacgtcgccctcccgttctgcttgggtccccttagtcgctacctttgctgggatccccctcctccatcctgtggcttcgggttgccgaagagcgatgctcggagggcggccggaagtggcgttggccgccattggcctgccggccagccaccttgctgtcctccgccgccttccgggtgttacatgcagccgggctcggcccctccccctggccggatggatccgtcggcgccacagccccgcgcggaaacctcaggcaaagacatatggcatccaggagaaagatgtcttgccccttctccagataatggaaaactttgtgaagcaagcataaaatctatcacagtggatgaaaatggcaagtcatttgcagtcgtcttatatgcagattttcaagaaaggaaaatacctcttaaacagcttcaagaagtgaaatttgttaaagattgccctaggaatcttatatttgatgatgaagatttagaaaaaccttatttcccaaaccgaaaatttccatcatcttctgttgcttttaaattatctgacaatggagactctattccttataccatcaataggtatttgagagactaccaaagagaaggaacccggtttctttatggacactacatccatggaggagggtgcattctgggtgatgacatgggacttggaaaaacagtacaggttatttcatttctggctgcagttttgcataaaaagggaactcgtgaggatattgaaaataacatgccagagtttttactaagaagtatgaaaaaggaacccctttcttctacagcaaaaaagatgttcttaatagttgctcctctttctgtcctctacaactggaaggatgaattggacacctggggatatttcagagtcactgttttacatggaaacagaaaagataatgaattaattcgtgtaaagcagaggaaatgtgaaattgctctaacaacttatgaaacactacgcttatgcctggatgaacttaacagtttggaatggtcagctgtcattgtggatgaagctcatagaatcaagaatccaaaagctagagtaacagaagttatgaaagctttgaaatgtaatgtccgcattggcctcactggaaccatccttcagaacaacatgaaggaactgtggtgtgttatggactgggctgtgccaggccttttagggagtgggacctacttcaagaagcagttttctgacccagtagaacatggtcagagacacacggcaacaaagagagaactagccactggccgaaaggccatgcaaagacttgccaaaaagatgtctggctggtttctcaggcgcaccaagactcttatcaaggatcagttgcctaagaaggaagaccggatggtgtattgttctttgacagatttccagaaagctgtctatcaaacagtgttagaaacagaggacgtgactttgatacttcaatcttctgagccttgtacctgtaggagtggccaaaaaaggagaaattgttgttataagaccaattctcatggtgaaacagtgaaaaccttgtatctcagttaccttacagtccttcagaaggtagctaaccatgtcgcgctactgcaagctgctagtacttccaaacaacaggaaacacttatcaaaaggatatgtgatcaggtattttccagattcccagattttgtgcagaaaagcaaagatgcagcctttgaaacactttctgaccctaaatacagtggaaaaatgaaggtccttcagcagcttttaaatcattgcaggaaaaacagagataaagttcttctcttttctttttccaccaagttgcttgacgtgctacagcagtactgtatggcgtctgggcttgattaccgacgacttgatggaagtacaaaatcagaggaaagactcaagattgtaaaagagttcaacagtacacaagatgttaacatttgccttgtctctacaattagagacggggtttcaccgttttagccgggatggtctcgatctcctgacctcgtgatccgcccgcctcggcctcccaaagtgctgggattacaggcgtgagccactgcgcccggccccat

SEQ ID NO: 286190 - DNA, 386 bp, Homo sapiens
ctgttgcttttaaattatctgacaatggagactctattccttataccatcaataggtatttgagagactaccaaagagaaggaacccggtttctttatggacactacatccatggaggagggtgcattctgggtgatgacatgggacttggaaaaacagtacaggtatttaattatgttataacagtaaagtcactttactgtgtacatgagtggatactatatgtaaatctttatttgtactgctgttacgatagctattttgtgtgttcctgtgtatgtttgtgtttgtctcactaactagatagtgaagtcctcaaagttgaggacaatgtctcagttattttatcattcttcagtacctatgaaatattttattccaaaata

SEQ ID NO: 286191 - DNA, 1059 bp, Homo sapiens
atttaaatttctgtaccagtaggaagatgcatagagtattaggataacgatgctggaggtgttctgccgtaacggaaacacagaaaggcagccgctgaaagggcatgtgtgggtaattagttctcactatggttagactcctgaagtgagtggtccaagttgttagcgtgcttctgctctgtgaggccaggccagtatcctgtctgcatggctgaagacgaatcactgatatacactcaataacagaaaccttggccgaattgtcacaatagcagagccattcaacactgaactgcaactgtggcagatggagagcttttttgcaaaatatccacaagctggagcaggagaaaaacctagggaacaagtgctggaaacagtgaaaaacaatatagagtggctaaaacaacatagaaacaccatcagagaatgaagcaaaaacatattaacatcataacttaccagaaaaaccccactatcctcataagattaacttaaaattctgaccacaatcagaaccagcacttgaagtctatgtattgtttcaagtaggacatattatgaggcagaaacgtccagagccagcacttggtttgccatgttctccgtgtttcttctgctcctagatgcagcagtattccagatagaggccgcactatgagcctgaattccaggataaaaacaacatggaatagaacttagccagcacagagtacacatgtgctgtaaatgagaaatacccctttgttattgtaaatcactgagattttgaggttgtctgttactgcagcataatctagcctaatataaacaccaaactaatatactcctctaccatagtaatttatttcttgttctttctcctcctccttcctctacttcagggtttagcgaccttttgcctgcctgtttttgtaaggcctgaaagctaaacatagttttacatttttagatggttgaaaaaatcaaaaggagaataatagttcatgatgtaaaaattatataaaatttaaataaatgtcggcatccttaaataaagttttattggaacacagcaca

SEQ ID NO: 286192 - DNA, 426 bp, Homo sapiens
atttaaatttctgtaccagtaggaagatgcatagagtattaggataacgatgctggaggtgttctgccgtaacggaaacacagaaaggcagccgctgaaagggcatgtgtgggtaattagttctcactatggttagactcctgaagtgagtggtccaagttgttagcgtgcttctgctctgtgaggccaggccagtatcctgtctgcatggctgaagacgaatcactggtatgtacatgttctagcttgggggaagaggagagaaaaaccaggaagtctaggcaagcaatttccctttatttaagcaaggaagctgcagctgaacattgtgctaatgttctgttggtaagaattgggttacctgtggacatctagctatgagagagcctgagaaacagtctctagcagggcgctcatgtgtgcaga

SEQ ID NO: 286193 - DNA, 4974 bp, Homo sapiens
  misc_feature (965)..(965): n is a, c, g, or t
ggggtaggggtggagatgcgtcgtttataaggggagctgtgacaatcttcttgccagccctcttcctcccactcggctcctcttacggagtcctcattccaccccccttgtttccgcattcatcctgagtggctggtgggaacgtgaaaagggagaggaaaaggcgcaagaagccagagagaggggtgtgggaaaagcgaaaacaggctgccaaatcaggggattccttccaatttaaaaaggaagtctgctgacgttagttagttaaatttaacatctttttatgtgtaacacttgactttggaagcaaaaatgaactttgcggagagagagggctctaagagatactgcattcaaacgaaacatgtggccattctctgtgcggtggtggtgggtgtaggattaatagtgggacttgccgtgggcttgaccagatcgtgtgactccagcggggacggcgggccgggcactgcgccagctccttcccacctgccttcttccacggccagcccctcaggtcctcctgcccaggaccaggacatctgcccggccagtgaggatgagagcggacagtggaaaaactttcgactgccggacttcgtcaacccagtccactacgacctgcacgtgaagcccctgttggaggaggacacctacacgggcaccgtgagcatctccatcaacctgagcgctcccacccggtacctgtggctgcacctccgggagaccaggatcacccggctcccggagctgaagaggccctctggggaccaggtgcaagtccggaggtgtttcgagtacaaaaagcaggagtacgtggtggtcgaggcggaggaagagcttacccccagcagtggagatggcctgtatctcctgaccatggagttcgccggctggctgaacggctccctcgtgggattttatagaaccacctacacggagaacggacgagtcaagagcatagnggccaccgatcatgaaccaacagatgccaggaaatcttttccttgttttgatgagcccaacaaaaaggcaacttatacaatatctatcacccatcccaaagaatacggagcactttcaaatatgccagtggcgaaagaagagtcagtggatgataaatggactcgaacaacttttgagaagtctgtccccatgagcacgtacctggtgtgctttgctgtacatcaatttgactctgtaaagagaatatcaaatagtggaaaacctcttacaatttatgtccagccagagcaaaagcacacagccgaatatgctgcaaacataactaaaagtgtgtttgattattttgaagaatactttgctatgaattattctcttcctaaattagataaaatcgctattccagattttggcactggtgccatggagaactggggactcatcacgtacagagaaacgaacctgctttatgaccctaaggaatcagcctcatcaaaccaacagagggtggccactgtggttgcccatgaacttgtgcatcagtggtttggaaatattgtgaccatggactggtgggaagacttgtggctaaatgaaggatttgcttctttctttgagtttctgggagtaaaccatgcagaaacagactggcaaatgcgtgaccaaatgttacttgaagatgtattacctgttcaagaggatgattctttgatgtcttcgcatccaattattgtgactgtgacaacccctgatgaaataacatctgtttttgatggaatatcctatagcaagggatcttctattttgagaatgcttgaagactggataaaaccagagaattttcaaaaaggatgtcagatgtacttggaaaaataccaattcaagaatgcaaaaacttctgatttttgggcagcactggaagaggcaagtaggctaccagtgaaagaagtaatggacacctggaccagacagatgggttatcctgtgcttaacgtgaacggtgtcaagaacatcacacagaaacgctttttgttggacccaagagctaacccttctcagcccccttcagatcttggttatacatggaatatcccagttaaatggactgaagataatataacaagcagtgtgttatttaataggtcagaaaaagaaggaatcactttgaactcctctaatcctagtggaaatgcttttctcaaaataaacccagatcatattgggttttatcgtgtaaattatgaagtagcaacttgggactcgatagctacagcgctctccttgaaccacaagacattttcttcagcagatcgtgcaagtcttattgatgatgcttttgccttggcaagagctcaacttctagattataaggtggctttgaacttgaccaagtatctcaaaagggaagagaattttttaccatggcagagagtaatttcagctgtaacctacatcattagcatgtttgaagatgataaagagctatatcctatgattgaggaatacttccaaggtcaagtgaagcctattgcagattctctgggatggaatgatgctggagaccatgtcacaaagttactccgttcctccgtgttagggtttgcgtgcaagatgggagacagagaagccttgaacaatgcttcctcgttatttgagcagtggctaaatgggactgtaagccttcccgtaaatctcaggcttctggtgtatcggtatgggatgcagaactctggcaatgagatttcatggaactacactcttgagcaataccagaaaacttcattagctcaagaaaaagaaaaactgctgtatggattagcatcagtgaagaacgttactcttttgtcaaggtatttggatttgctcaaggacacgaaccttattaaaactcaggatgtgtttacagtcattcgatatatctcatataacagctatgggaagaacatggcctggaattggatacaactcaactgggactatctagtcaacagatatacactcaataacagaaaccttggccgaattgtcacaatagcagagccattcaacactgaactgcaactgtggcagatggagagcttttttgcaaaatatccacaagctggagcaggagaaaaacctagggaacaagtgctggaaacagtgaaaaacaatatagagtggctaaaacaacatagaaacaccatcagagaatggttttttaatttacttgagagtggttaatgtattcaaatgttagagtttaattttgtgaatctattgtttctcctctgaagcatttggtggcctaatttacaagcacgatggagagagccttataaacagataatgcttttactaagcactgtgtttatatgtcttgcaaagcctttaaattgttcctctttgtttatgaagaaagatactaatagagtacttaatatactcagggattccttctaagtgtacttcataagatattctttacaaactgaagataatgaaatagttattttaatacctttaaatatcattctttgtatcttaaatctgtgaagtagaacaatttggtcttagctttacattttcagtaccaaagaaacaccacttaatcttctctcttgattgatttttaaagtttaaataccagtacttgagggaccaatattaccatcttaatctttattttattattcagaattatacagacctaatatcattttattcacatatgtcttactactttaaatcctaccaaagtaacctgggcttaagttttacttgaggatcatatgaattagccaaaagaatggctgactgttgcctttgctcttataaaatcaataagagaactctcctctttttttaaaaataaatctaaatgattatcttgaaaaagtattgttttccagtgtcacttgactcttgaataaaaataactgcagtgttccccaaataatttaacacattgcaaatatgattcaagaatctggcctttttcatgcttggtactctcttctcttgctccattccttacaaagctccttcaaatatgctatgaaattagagggaacatagtgcttaactctgctccatggattttagaggaaaaaagctaaataattggaaactgttcaggaaagagagaaggcagattatttcttaaaactaaatggaattagaatttagctttgacctcacctagcaatctaagtgtgaaaatggggagacctgtgggcatccccagcatgactctgcatatctgagcatatatctccttatagatcaattttatgtataaacccttagatcctaatccatacagaatagcactgatcaaatttaaatgcatgacttgattaaagacatcaatttcatagaagctggtggcaagaatatgtttaatatggcacttgatacctcctagatccataatgtaagtccaataggcagaaaagatggtaagttactatgtttcaatctgctatatctagaaaatctaaatttatttggaactttcaaaaatgtaaggtaatttagaatcggcttgatgagaattgaagcatatggaaacaaaaccttagctttaactttatttatacaataatgtgccctaatcatgtactctgaaactttataaactttcctgttgctgtttcttaattatcacttctcaatccgtacagccaaactagtaaattcaaatgtagactgggttgtgggtggcagatatagaagaagaaatttccagaccaaaaaatattaaatattattttaaattatttcagaagcaaaaacatattaacatcataacttaccagaaaaaccccactatcctcataagattaacttaaaattctgaccacaatcagaaccagcacttgaagtctatgtattgtttcaagtaggacatattatgaggtgagatggtttatccttctgttttatgaaattaatacattttaaaagaaaaatgttagtttaagggggtggtaaataaaacagatttcaacttgcctacaagacattcta

SEQ ID NO: 286194 - DNA, 5357 bp, Homo sapiens
  misc_feature (965)..(965): n is a, c, g, or t
ggggtaggggtggagatgcgtcgtttataaggggagctgtgacaatcttcttgccagccctcttcctcccactcggctcctcttacggagtcctcattccaccccccttgtttccgcattcatcctgagtggctggtgggaacgtgaaaagggagaggaaaaggcgcaagaagccagagagaggggtgtgggaaaagcgaaaacaggctgccaaatcaggggattccttccaatttaaaaaggaagtctgctgacgttagttagttaaatttaacatctttttatgtgtaacacttgactttggaagcaaaaatgaactttgcggagagagagggctctaagagatactgcattcaaacgaaacatgtggccattctctgtgcggtggtggtgggtgtaggattaatagtgggacttgccgtgggcttgaccagatcgtgtgactccagcggggacggcgggccgggcactgcgccagctccttcccacctgccttcttccacggccagcccctcaggtcctcctgcccaggaccaggacatctgcccggccagtgaggatgagagcggacagtggaaaaactttcgactgccggacttcgtcaacccagtccactacgacctgcacgtgaagcccctgttggaggaggacacctacacgggcaccgtgagcatctccatcaacctgagcgctcccacccggtacctgtggctgcacctccgggagaccaggatcacccggctcccggagctgaagaggccctctggggaccaggtgcaagtccggaggtgtttcgagtacaaaaagcaggagtacgtggtggtcgaggcggaggaagagcttacccccagcagtggagatggcctgtatctcctgaccatggagttcgccggctggctgaacggctccctcgtgggattttatagaaccacctacacggagaacggacgagtcaagagcatagnggccaccgatcatgaaccaacagatgccaggaaatcttttccttgttttgatgagcccaacaaaaaggcaacttatacaatatctatcacccatcccaaagaatacggagcactttcaaatatgccagtggcgaaagaagagtcagtggatgataaatggactcgaacaacttttgagaagtctgtccccatgagcacgtacctggtgtgctttgctgtacatcaatttgactctgtaaagagaatatcaaatagtggaaaacctcttacaatttatgtccagccagagcaaaagcacacagccgaatatgctgcaaacataactaaaagtgtgtttgattattttgaagaatactttgctatgaattattctcttcctaaattagataaaatcgctattccagattttggcactggtgccatggagaactggggactcatcacgtacagagaaacgaacctgctttatgaccctaaggaatcagcctcatcaaaccaacagagggtggccactgtggttgcccatgaacttgtgcatcagtggtttggaaatattgtgaccatggactggtgggaagacttgtggctaaatgaaggatttgcttctttctttgagtttctgggagtaaaccatgcagaaacagactggcaaatgcgtgaccaaatgttacttgaagatgtattacctgttcaagaggatgattctttgatgtcttcgcatccaattattgtgactgtgacaacccctgatgaaataacatctgtttttgatggaatatcctatagcaagggatcttctattttgagaatgcttgaagactggataaaaccagagaattttcaaaaaggatgtcagatgtacttggaaaaataccaattcaagaatgcaaaaacttctgatttttgggcagcactggaagaggcaagtaggctaccagtgaaagaagtaatggacacctggaccagacagatgggttatcctgtgcttaacgtgaacggtgtcaagaacatcacacagaaacgctttttgttggacccaagagctaacccttctcagcccccttcagatcttggttatacatggaatatcccagttaaatggactgaagataatataacaagcagtgtgttatttaataggtcagaaaaagaaggaatcactttgaactcctctaatcctagtggaaatgcttttctcaaaataaacccagatcatattgggttttatcgtgtaaattatgaagtagcaacttgggactcgatagctacagcgctctccttgaaccacaagacattttcttcagcagatcgtgcaagtcttattgatgatgcttttgccttggcaagagctcaacttctagattataaggtggctttgaacttgaccaagtatctcaaaagggaagagaattttttaccatggcagagagtaatttcagctgtaacctacatcattagcatgtttgaagatgataaagagctatatcctatgattgaggaatacttccaaggtcaagtgaagcctattgcagattctctgggatggaatgatgctggagaccatgtcacaaagttactccgttcctccgtgttagggtttgcgtgcaagatgggagacagagaagccttgaacaatgcttcctcgttatttgagcagtggctaaatgggactgtaagccttcccgtaaatctcaggcttctggtgtatcggtatgggatgcagaactctggcaatgagatttcatggaactacactcttgagcaataccagaaaacttcattagctcaagaaaaagaaaaactgctgtatggattagcatcagtgaagaacgttactcttttgtcaaggtatttggatttgctcaaggacacgaaccttattaaaactcaggatgtgtttacagtcattcgatatatctcatataacagctatgggaagaacatggcctggaattggatacaactcaactgggactatctagtcaacagatatacactcaataacagaaaccttggccgaattgtcacaatagcagagccattcaacactgaactgcaactgtggcagatggagagcttttttgcaaaatatccacaagctggagcaggagaaaaacctagggaacaagtgctggaaacagtgaaaaacaatatagagtggctaaaacaacatagaaacaccatcagagaatggttttttaatttacttgagagtggttaatgtattcaaatgttagagtttaattttgtgaatctattgtttctcctctgaagcatttggtggcctaatttacaagcacgatggagagagccttataaacagataatgcttttactaagcactgtgtttatatgtcttgcaaagcctttaaattgttcctctttgtttatgaagaaagatactaatagagtacttaatatactcagggattccttctaagtgtacttcataagatattctttacaaactgaagataatgaaatagttattttaatacctttaaatatcattctttgtatcttaaatctgtgaagtagaacaatttggtcttagctttacattttcagtaccaaagaaacaccacttaatcttctctcttgattgatttttaaagtttaaataccagtacttgagggaccaatattaccatcttaatctttattttattattcagaattatacagacctaatatcattttattcacatatgtcttactactttaaatcctaccaaagtaacctgggcttaagttttacttgaggatcatatgaattagccaaaagaatggctgactgttgcctttgctcttataaaatcaataagagaactctcctctttttttaaaaataaatctaaatgattatcttgaaaaagtattgttttccagtgtcacttgactcttgaataaaaataactgcagtgttccccaaataatttaacacattgcaaatatgattcaagaatctggcctttttcatgcttggtactctcttctcttgctccattccttacaaagctccttcaaatatgctatgaaattagagggaacatagtgcttaactctgctccatggattttagaggaaaaaagctaaataattggaaactgttcaggaaagagagaaggcagattatttcttaaaactaaatggaattagaatttagctttgacctcacctagcaatctaagtgtgaaaatggggagacctgtgggcatccccagcatgactctgcatatctgagcatatatctccttatagatcaattttatgtataaacccttagatcctaatccatacagaatagcactgatcaaatttaaatgcatgacttgattaaagacatcaatttcatagaagctggtggcaagaatatgtttaatatggcacttgatacctcctagatccataatgtaagtccaataggcagaaaagatggtaagttactatgtttcaatctgctatatctagaaaatctaaatttatttggaactttcaaaaatgtaaggtaatttagaatcggcttgatgagaattgaagcatatggaaacaaaaccttagctttaactttatttatacaataatgtgccctaatcatgtactctgaaactttataaactttcctgttgctgtttcttaattatcacttctcaatccgtacagccaaactagtaaattcaaatgtagactgggttgtgggtggcagatatagaagaagaaatttccagaccaaaaaatattaaatattattttaaattatttcagaagcaaaaacatattaacatcataacttaccagaaaaaccccactatcctcataagattaacttaaaattctgaccacaatcagaaccagcacttgaagtctatgtattgtttcaagtaggacatattatgaggcagaaacgtccagagccagcacttggtttgccatgttctccgtgtttcttctgctcctagatgcagcagtattccagatagaggccgcactatgagcctgaattccaggataaaaacaacatggaatagaacttagccagcacagagtacacatgtgctgtaaatgagaaatacccctttgttattgtaaatcactgagattttgaggttgtctgttactgcagcataatctagcctaatataaacaccaaactaatatactcctctaccatagtaatttatttcttgttctttctcctcctccttcctctacttcagggtttagcgaccttttgcctgcctgtttttgtaaggcctgaaagctaaacatagttttacatttttagatggttgaaaaaatcaaaaggagaataatagttcatgatgtaaaaattatataaaatttaaataaatgtcggcatccttaaataaagttttattggaacacagcaca

SEQ ID NO: 286195 - DNA, 3836 bp, Homo sapiens
  misc_feature (965)..(965): n is a, c, g, or t
ggggtaggggtggagatgcgtcgtttataaggggagctgtgacaatcttcttgccagccctcttcctcccactcggctcctcttacggagtcctcattccaccccccttgtttccgcattcatcctgagtggctggtgggaacgtgaaaagggagaggaaaaggcgcaagaagccagagagaggggtgtgggaaaagcgaaaacaggctgccaaatcaggggattccttccaatttaaaaaggaagtctgctgacgttagttagttaaatttaacatctttttatgtgtaacacttgactttggaagcaaaaatgaactttgcggagagagagggctctaagagatactgcattcaaacgaaacatgtggccattctctgtgcggtggtggtgggtgtaggattaatagtgggacttgccgtgggcttgaccagatcgtgtgactccagcggggacggcgggccgggcactgcgccagctccttcccacctgccttcttccacggccagcccctcaggtcctcctgcccaggaccaggacatctgcccggccagtgaggatgagagcggacagtggaaaaactttcgactgccggacttcgtcaacccagtccactacgacctgcacgtgaagcccctgttggaggaggacacctacacgggcaccgtgagcatctccatcaacctgagcgctcccacccggtacctgtggctgcacctccgggagaccaggatcacccggctcccggagctgaagaggccctctggggaccaggtgcaagtccggaggtgtttcgagtacaaaaagcaggagtacgtggtggtcgaggcggaggaagagcttacccccagcagtggagatggcctgtatctcctgaccatggagttcgccggctggctgaacggctccctcgtgggattttatagaaccacctacacggagaacggacgagtcaagagcatagnggccaccgatcatgaaccaacagatgccaggaaatcttttccttgttttgatgagcccaacaaaaaggcaacttatacaatatctatcacccatcccaaagaatacggagcactttcaaatatgccagtggcgaaagaagagtcagtggatgataaatggactcgaacaacttttgagaagtctgtccccatgagcacgtacctggtgtgctttgctgtacatcaatttgactctgtaaagagaatatcaaatagtggaaaacctcttacaatttatgtccagccagagcaaaagcacacagccgaatatgctgcaaacataactaaaagtgtgtttgattattttgaagaatactttgctatgaattattctcttcctaaattagataaaatcgctattccagattttggcactggtgccatggagaactggggactcatcacgtacagagaaacgaacctgctttatgaccctaaggaatcagcctcatcaaaccaacagagggtggccactgtggttgcccatgaacttgtgcatcagtggtttggaaatattgtgaccatggactggtgggaagacttgtggctaaatgaaggatttgcttctttctttgagtttctgggagtaaaccatgcagaaacagactggcaaatgcgtgaccaaatgttacttgaagatgtattacctgttcaagaggatgattctttgatgtcttcgcatccaattattgtgactgtgacaacccctgatgaaataacatctgtttttgatggaatatcctatagcaagggatcttctattttgagaatgcttgaagactggataaaaccagagaattttcaaaaaggatgtcagatgtacttggaaaaataccaattcaagaatgcaaaaacttctgatttttgggcagcactggaagaggcaagtaggctaccagtgaaagaagtaatggacacctggaccagacagatgggttatcctgtgcttaacgtgaacggtgtcaagaacatcacacagaaacgctttttgttggacccaagagctaacccttctcagcccccttcagatcttggttatacatggaatatcccagttaaatggactgaagataatataacaagcagtgtgttatttaataggtcagaaaaagaaggaatcactttgaactcctctaatcctagtggaaatgcttttctcaaaataaacccagatcatattgggttttatcgtgtaaattatgaagtagcaacttgggactcgatagctacagcgctctccttgaaccacaagacattttcttcagcagatcgtgcaagtcttattgatgatgcttttgccttggcaagagctcaacttctagattataaggtggctttgaacttgaccaagtatctcaaaagggaagagaattttttaccatggcagagagtaatttcagctgtaacctacatcattagcatgtttgaagatgataaagagctatatcctatgattgaggaatacttccaaggtcaagtgaagcctattgcagattctctgggatggaatgatgctggagaccatgtcacaaagttactccgttcctccgtgttagggtttgcgtgcaagatgggagacagagaagccttgaacaatgcttcctcgttatttgagcagtggctaaatgggactgtaagccttcccgtaaatctcaggcttctggtgtatcggtatgggatgcagaactctggcaatgagatttcatggaactacactcttgagcaataccagaaaacttcattagctcaagaaaaagaaaaactgctgtatggattagcatcagtgaagaacgttactcttttgtcaaggtatttggatttgctcaaggacacgaaccttattaaaactcaggatgtgtttacagtcattcgatatatctcatataacagctatgggaagaacatggcctggaattggatacaactcaactgggactatctagtcaacagatatacactcaataacagaaaccttggccgaattgtcacaatagcagagccattcaacactgaactgcaactgtggcagatggagagcttttttgcaaaatatccacaagctggagcaggagaaaaacctagggaacaagtgctggaaacagtgaaaaacaatatagagtggctaaaacaacatagaaacaccatcagagaatggttttttaatttacttgagagtggttaatgtattcaaatgttagagtttaattttgtgaatctattgtttctcctctgaagcatttggtggcctaatttacaagcacgatggagagagccttataaacagataatgcttttactaagcactgtgtttatatgtcttgcaaagcctttaaattgttcctctttgtttatgaagaaagatactaatagagtacttaatatactcagggattccttctaagtgtacttcataagatattctttacaaactgaagataatgaaatagttattttaatacctttaaatatcattctttgtatcttaaatctgtgaagtagaacaatttggtcttagctttacattttcagtaccaaagaaacaccacttaatcttctctcttgattgatttttaaagtttaaataccagtacttgagggaccaatattaccatcttaatctttattttattattcagaattatacagacctaatatcattttattcacatatgtcttactactttaaatcctaccaaagtaacctgggcttaagttttacttgaggatcatatgaattagccaaaagaatggctgactgttgcctttgctcttataaaatcaataagagaactctcctctttttttaaaaataaatctaaatgattatcttga

SEQ ID NO: 286196 - DNA, 4426 bp, Homo sapiens
  misc_feature (417)..(417): n is a, c, g, or t
gcagacatctgtgctagcaatcaacgagactccgtgggcgtagaaccctctgagccaggtgtgggatataatctcgtggtgcgccgttttttaagccagtcggaaaagcgcagtattcgggtgggagtgacccgattttccaggtgaatccgtcacccctttctttgactcggaaagggaactccctgaccccttgcgcttcccaagtgaggcaatgcctcgccctgcttcggctcgcgcacggtgcgcgcacccactgacctgcgcccactgtctggcactccctagtgagatgaacccggtacctcagatggaaatgcagaaatcacccgtcttctgcgtcgtcacgctgggagctgtagaccagagctgtttcctattcggcaatcttggctcctccacagagcggagcatagnggccaccgatcatgaaccaacagatgccaggaaatcttttccttgttttgatgagcccaacaaaaaggcaacttatacaatatctatcacccatcccaaagaatacggagcactttcaaatatgccagtggcgaaagaagagtcagtggatgataaatggactcgaacaacttttgagaagtctgtccccatgagcacgtacctggtgtgctttgctgtacatcaatttgactctgtaaagagaatatcaaatagtggaaaacctcttacaatttatgtccagccagagcaaaagcacacagccgaatatgctgcaaacataactaaaagtgtgtttgattattttgaagaatactttgctatgaattattctcttcctaaattagataaaatcgctattccagattttggcactggtgccatggagaactggggactcatcacgtacagagaaacgaacctgctttatgaccctaaggaatcagcctcatcaaaccaacagagggtggccactgtggttgcccatgaacttgtgcatcagtggtttggaaatattgtgaccatggactggtgggaagacttgtggctaaatgaaggatttgcttctttctttgagtttctgggagtaaaccatgcagaaacagactggcaaatgcgtgaccaaatgttacttgaagatgtattacctgttcaagaggatgattctttgatgtcttcgcatccaattattgtgactgtgacaacccctgatgaaataacatctgtttttgatggaatatcctatagcaagggatcttctattttgagaatgcttgaagactggataaaaccagagaattttcaaaaaggatgtcagatgtacttggaaaaataccaattcaagaatgcaaaaacttctgatttttgggcagcactggaagaggcaagtaggctaccagtgaaagaagtaatggacacctggaccagacagatgggttatcctgtgcttaacgtgaacggtgtcaagaacatcacacagaaacgctttttgttggacccaagagctaacccttctcagcccccttcagatcttggttatacatggaatatcccagttaaatggactgaagataatataacaagcagtgtgttatttaataggtcagaaaaagaaggaatcactttgaactcctctaatcctagtggaaatgcttttctcaaaataaacccagatcatattgggttttatcgtgtaaattatgaagtagcaacttgggactcgatagctacagcgctctccttgaaccacaagacattttcttcagcagatcgtgcaagtcttattgatgatgcttttgccttggcaagagctcaacttctagattataaggtggctttgaacttgaccaagtatctcaaaagggaagagaattttttaccatggcagagagtaatttcagctgtaacctacatcattagcatgtttgaagatgataaagagctatatcctatgattgaggaatacttccaaggtcaagtgaagcctattgcagattctctgggatggaatgatgctggagaccatgtcacaaagttactccgttcctccgtgttagggtttgcgtgcaagatgggagacagagaagccttgaacaatgcttcctcgttatttgagcagtggctaaatgggactgtaagccttcccgtaaatctcaggcttctggtgtatcggtatgggatgcagaactctggcaatgagatttcatggaactacactcttgagcaataccagaaaacttcattagctcaagaaaaagaaaaactgctgtatggattagcatcagtgaagaacgttactcttttgtcaaggtatttggatttgctcaaggacacgaaccttattaaaactcaggatgtgtttacagtcattcgatatatctcatataacagctatgggaagaacatggcctggaattggatacaactcaactgggactatctagtcaacagatatacactcaataacagaaaccttggccgaattgtcacaatagcagagccattcaacactgaactgcaactgtggcagatggagagcttttttgcaaaatatccacaagctggagcaggagaaaaacctagggaacaagtgctggaaacagtgaaaaacaatatagagtggctaaaacaacatagaaacaccatcagagaatggttttttaatttacttgagagtggttaatgtattcaaatgttagagtttaattttgtgaatctattgtttctcctctgaagcatttggtggcctaatttacaagcacgatggagagagccttataaacagataatgcttttactaagcactgtgtttatatgtcttgcaaagcctttaaattgttcctctttgtttatgaagaaagatactaatagagtacttaatatactcagggattccttctaagtgtacttcataagatattctttacaaactgaagataatgaaatagttattttaatacctttaaatatcattctttgtatcttaaatctgtgaagtagaacaatttggtcttagctttacattttcagtaccaaagaaacaccacttaatcttctctcttgattgatttttaaagtttaaataccagtacttgagggaccaatattaccatcttaatctttattttattattcagaattatacagacctaatatcattttattcacatatgtcttactactttaaatcctaccaaagtaacctgggcttaagttttacttgaggatcatatgaattagccaaaagaatggctgactgttgcctttgctcttataaaatcaataagagaactctcctctttttttaaaaataaatctaaatgattatcttgaaaaagtattgttttccagtgtcacttgactcttgaataaaaataactgcagtgttccccaaataatttaacacattgcaaatatgattcaagaatctggcctttttcatgcttggtactctcttctcttgctccattccttacaaagctccttcaaatatgctatgaaattagagggaacatagtgcttaactctgctccatggattttagaggaaaaaagctaaataattggaaactgttcaggaaagagagaaggcagattatttcttaaaactaaatggaattagaatttagctttgacctcacctagcaatctaagtgtgaaaatggggagacctgtgggcatccccagcatgactctgcatatctgagcatatatctccttatagatcaattttatgtataaacccttagatcctaatccatacagaatagcactgatcaaatttaaatgcatgacttgattaaagacatcaatttcatagaagctggtggcaagaatatgtttaatatggcacttgatacctcctagatccataatgtaagtccaataggcagaaaagatggtaagttactatgtttcaatctgctatatctagaaaatctaaatttatttggaactttcaaaaatgtaaggtaatttagaatcggcttgatgagaattgaagcatatggaaacaaaaccttagctttaactttatttatacaataatgtgccctaatcatgtactctgaaactttataaactttcctgttgctgtttcttaattatcacttctcaatccgtacagccaaactagtaaattcaaatgtagactgggttgtgggtggcagatatagaagaagaaatttccagaccaaaaaatattaaatattattttaaattatttcagaagcaaaaacatattaacatcataacttaccagaaaaaccccactatcctcataagattaacttaaaattctgaccacaatcagaaccagcacttgaagtctatgtattgtttcaagtaggacatattatgaggtgagatggtttatccttctgttttatgaaattaatacattttaaaagaaaaatgttagtttaagggggtggtaaataaaacagatttcaacttgcctacaagacattcta

SEQ ID NO: 286197 - DNA, 3237 bp, Homo sapiens
tgcattttctcaatttgctggccagcataatttcacaaagcccctgacactgtggcaagtgtagctctccggagggatgctttgaagacatggcagggtagagcacacggctcccacatctcttgcctgggtcgctgtattccagaaaaggcaagtaggctaccagtgaaagaagtaatggacacctggaccagacagatgggttatcctgtgcttaacgtgaacggtgtcaagaacatcacacagaaacgctttttgttggacccaagagctaacccttctcagcccccttcagatcttggttatacatggaatatcccagttaaatggactgaagataatataacaagcagtgtgttatttaataggtcagaaaaagaaggaatcactttgaactcctctaatcctagtggaaatgcttttctcaaaataaacccagatcatattgggttttatcgtgtaaattatgaagtagcaacttgggactcgatagctacagcgctctccttgaaccacaagacattttcttcagcagatcgtgcaagtcttattgatgatgcttttgccttggcaagagctcaacttctagattataaggtggctttgaacttgaccaagtatctcaaaagggaagagaattttttaccatggcagagagtaatttcagctgtaacctacatcattagcatgtttgaagatgataaagagctatatcctatgattgaggaatacttccaaggtcaagtgaagcctattgcagattctctgggatggaatgatgctggagaccatgtcacaaagttactccgttcctccgtgttagggtttgcgtgcaagatgggagacagagaagccttgaacaatgcttcctcgttatttgagcagtggctaaatgggactgtaagccttcccgtaaatctcaggcttctggtgtatcggtatgggatgcagaactctggcaatgagatttcatggaactacactcttgagcaataccagaaaacttcattagctcaagaaaaagaaaaactgctgtatggattagcatcagtgaagaacgttactcttttgtcaaggtatttggatttgctcaaggacacgaaccttattaaaactcaggatgtgtttacagtcattcgatatatctcatataacagctatgggaagaacatggcctggaattggatacaactcaactgggactatctagtcaacagatatacactcaataacagaaaccttggccgaattgtcacaatagcagagccattcaacactgaactgcaactgtggcagatggagagcttttttgcaaaatatccacaagctggagcaggagaaaaacctagggaacaagtgctggaaacagtgaaaaacaatatagagtggctaaaacaacatagaaacaccatcagagaatggttttttaatttacttgagagtggttaatgtattcaaatgttagagtttaattttgtgaatctattgtttctcctctgaagcatttggtggcctaatttacaagcacgatggagagagccttataaacagataatgcttttactaagcactgtgtttatatgtcttgcaaagcctttaaattgttcctctttgtttatgaagaaagatactaatagagtacttaatatactcagggattccttctaagtgtacttcataagatattctttacaaactgaagataatgaaatagttattttaatacctttaaatatcattctttgtatcttaaatctgtgaagtagaacaatttggtcttagctttacattttcagtaccaaagaaacaccacttaatcttctctcttgattgatttttaaagtttaaataccagtacttgagggaccaatattaccatcttaatctttattttattattcagaattatacagacctaatatcattttattcacatatgtcttactactttaaatcctaccaaagtaacctgggcttaagttttacttgaggatcatatgaattagccaaaagaatggctgactgttgcctttgctcttataaaatcaataagagaactctcctctttttttaaaaataaatctaaatgattatcttgaaaaagtattgttttccagtgtcacttgactcttgaataaaaataactgcagtgttccccaaataatttaacacattgcaaatatgattcaagaatctggcctttttcatgcttggtactctcttctcttgctccattccttacaaagctccttcaaatatgctatgaaattagagggaacatagtgcttaactctgctccatggattttagaggaaaaaagctaaataattggaaactgttcaggaaagagagaaggcagattatttcttaaaactaaatggaattagaatttagctttgacctcacctagcaatctaagtgtgaaaatggggagacctgtgggcatccccagcatgactctgcatatctgagcatatatctccttatagatcaattttatgtataaacccttagatcctaatccatacagaatagcactgatcaaatttaaatgcatgacttgattaaagacatcaatttcatagaagctggtggcaagaatatgtttaatatggcacttgatacctcctagatccataatgtaagtccaataggcagaaaagatggtaagttactatgtttcaatctgctatatctagaaaatctaaatttatttggaactttcaaaaatgtaaggtaatttagaatcggcttgatgagaattgaagcatatggaaacaaaaccttagctttaactttatttatacaataatgtgccctaatcatgtactctgaaactttataaactttcctgttgctgtttcttaattatcacttctcaatccgtacagccaaactagtaaattcaaatgtagactgggttgtgggtggcagatatagaagaagaaatttccagaccaaaaaatattaaatattattttaaattatttcagaagcaaaaacatattaacatcataacttaccagaaaaaccccactatcctcataagattaacttaaaattctgaccacaatcagaaccagcacttgaagtctatgtattgtttcaagtaggacatattatgaggtgagatggtttatccttctgttttatgaaattaatacattttaaaagaaaaatgttagtttaagggggtggtaaataaaacagatttcaacttgcctacaagacattcta

SEQ ID NO: 286198 - DNA, 4921 bp, Homo sapiens
  misc_feature (965)..(965): n is a, c, g, or t
ggggtaggggtggagatgcgtcgtttataaggggagctgtgacaatcttcttgccagccctcttcctcccactcggctcctcttacggagtcctcattccaccccccttgtttccgcattcatcctgagtggctggtgggaacgtgaaaagggagaggaaaaggcgcaagaagccagagagaggggtgtgggaaaagcgaaaacaggctgccaaatcaggggattccttccaatttaaaaaggaagtctgctgacgttagttagttaaatttaacatctttttatgtgtaacacttgactttggaagcaaaaatgaactttgcggagagagagggctctaagagatactgcattcaaacgaaacatgtggccattctctgtgcggtggtggtgggtgtaggattaatagtgggacttgccgtgggcttgaccagatcgtgtgactccagcggggacggcgggccgggcactgcgccagctccttcccacctgccttcttccacggccagcccctcaggtcctcctgcccaggaccaggacatctgcccggccagtgaggatgagagcggacagtggaaaaactttcgactgccggacttcgtcaacccagtccactacgacctgcacgtgaagcccctgttggaggaggacacctacacgggcaccgtgagcatctccatcaacctgagcgctcccacccggtacctgtggctgcacctccgggagaccaggatcacccggctcccggagctgaagaggccctctggggaccaggtgcaagtccggaggtgtttcgagtacaaaaagcaggagtacgtggtggtcgaggcggaggaagagcttacccccagcagtggagatggcctgtatctcctgaccatggagttcgccggctggctgaacggctccctcgtgggattttatagaaccacctacacggagaacggacgagtcaagagcatagnggccaccgatcatgaaccaacagatgccaggaaatcttttccttgttttgatgagcccaacaaaaaggcaacttatacaatatctatcacccatcccaaagaatacggagcactttcaaatatgccagtggcgaaagaagagtcagtggatgataaatggactcgaacaacttttgagaagtctgtccccatgagcacgtacctggtgtgctttgctgtacatcaatttgactctgtaaagagaatatcaaatagtggaaaacctcttacaatttatgtccagccagagcaaaagcacacagccgaatatgctgcaaacataactaaaagtgtgtttgattattttgaagaatactttgctatgaattattctcttcctaaattagataaaatcgctattccagattttggcactggtgccatggagaactggggactcatcacgtacagagaaacgaacctgctttatgaccctaaggaatcagcctcatcaaaccaacagagggtggccactgtggttgcccatgaacttgtgcatcagtggtttggaaatattgtgaccatggactggtgggaagacttgtggctaaatgaaggatttgcttctttctttgagtttctgggagtaaaccatgcagaaacagactggcaaatgcgtgaccaaatgttacttgaagatgtattacctgttcaagaggatgattctttgatgtcttcgcatccaattattgtgactgtgacaacccctgatgaaataacatctgtttttgatggaatatcctatagcaagggatcttctattttgagaatgcttgaagactggataaaaccagagaattttcaaaaaggatgtcagatgtacttggaaaaataccaattcaagaatgcaaaaacttctgatttttgggcagcactggaagaggcaagtaggctaccagtgaaagaagtaatggacacctggaccagacagatgggttatcctgtgcttaacgtgaacggtgtcaagaacatcacacagaaacgctttttgttggacccaagagctaacccttctcagcccccttcagatcttggttatacatggaatatcccagttaaatggactgaagataatataacaagcagtgtgttatttaataggtcagaaaaagaaggaatcactttgaactcctctaatcctagtggaaatgcttttctcaaaataaacccagatcatattgggttttatcgtgtaaattatgaagtagcaacttgggactcgatagctacagcgctctccttgaaccacaagacattttcttcagcagatcgtgcaagtcttattgatgatgcttttgccttggcaagagctcaacttctagattataaggtggctttgaacttgaccaagtatctcaaaagggaagagaattttttaccatggcagagagtaatttcagctgtaacctacatcattagcatgtttgaagatgataaagagctatatcctatgattgaggaatacttccaaggtcaagtgaagcctattgcagattctctgggatggaatgatgctggagaccatgtcacaaagttactccgttcctccgtgttagggtttgcgtgcaagatgggagacagagaagccttgaacaatgcttcctcgttatttgagcagtggctaaatgggactgtaagccttcccgtaaatctcaggcttctggtgtatcggtatgggatgcagaactctggcaatgagatttcatggaactacactcttgagcaataccagaaaacttcattagctcaagaaaaagaaaaactgctgtatggattagcatcagtgaagaacgttactcttttgtcaaggtatttggatttgctcaaggacacgaaccttattaaaaaacatggcctggaattggatacaactcaactgggactatctagtcaacagatatacactcaataacagaaaccttggccgaattgtcacaatagcagagccattcaacactgaactgcaactgtggcagatggagagcttttttgcaaaatatccacaagctggagcaggagaaaaacctagggaacaagtgctggaaacagtgaaaaacaatatagagtggctaaaacaacatagaaacaccatcagagaatggttttttaatttacttgagagtggttaatgtattcaaatgttagagtttaattttgtgaatctattgtttctcctctgaagcatttggtggcctaatttacaagcacgatggagagagccttataaacagataatgcttttactaagcactgtgtttatatgtcttgcaaagcctttaaattgttcctctttgtttatgaagaaagatactaatagagtacttaatatactcagggattccttctaagtgtacttcataagatattctttacaaactgaagataatgaaatagttattttaatacctttaaatatcattctttgtatcttaaatctgtgaagtagaacaatttggtcttagctttacattttcagtaccaaagaaacaccacttaatcttctctcttgattgatttttaaagtttaaataccagtacttgagggaccaatattaccatcttaatctttattttattattcagaattatacagacctaatatcattttattcacatatgtcttactactttaaatcctaccaaagtaacctgggcttaagttttacttgaggatcatatgaattagccaaaagaatggctgactgttgcctttgctcttataaaatcaataagagaactctcctctttttttaaaaataaatctaaatgattatcttgaaaaagtattgttttccagtgtcacttgactcttgaataaaaataactgcagtgttccccaaataatttaacacattgcaaatatgattcaagaatctggcctttttcatgcttggtactctcttctcttgctccattccttacaaagctccttcaaatatgctatgaaattagagggaacatagtgcttaactctgctccatggattttagaggaaaaaagctaaataattggaaactgttcaggaaagagagaaggcagattatttcttaaaactaaatggaattagaatttagctttgacctcacctagcaatctaagtgtgaaaatggggagacctgtgggcatccccagcatgactctgcatatctgagcatatatctccttatagatcaattttatgtataaacccttagatcctaatccatacagaatagcactgatcaaatttaaatgcatgacttgattaaagacatcaatttcatagaagctggtggcaagaatatgtttaatatggcacttgatacctcctagatccataatgtaagtccaataggcagaaaagatggtaagttactatgtttcaatctgctatatctagaaaatctaaatttatttggaactttcaaaaatgtaaggtaatttagaatcggcttgatgagaattgaagcatatggaaacaaaaccttagctttaactttatttatacaataatgtgccctaatcatgtactctgaaactttataaactttcctgttgctgtttcttaattatcacttctcaatccgtacagccaaactagtaaattcaaatgtagactgggttgtgggtggcagatatagaagaagaaatttccagaccaaaaaatattaaatattattttaaattatttcagaagcaaaaacatattaacatcataacttaccagaaaaaccccactatcctcataagattaacttaaaattctgaccacaatcagaaccagcacttgaagtctatgtattgtttcaagtaggacatattatgaggtgagatggtttatccttctgttttatgaaattaatacattttaaaagaaaaatgttagtttaagggggtggtaaataaaacagatttcaacttgcctacaagacattcta

SEQ ID NO: 286199 - DNA, 2242 bp, Homo sapiens
tcagagggtcgtgtcaatttgtctaccaaaagaagtgcagagtgtactaagaatttatcttgaatagaatgattttaagtaaaatgggttttcttactgtgttttgcttactttgaaagttacttttaaaaactatgaaataaaaaggaaacatctgcatttagagaaaatatgtaacattctgagcacttacacttccttttactctaaatttctctccagatatacactcaataacagaaaccttggccgaattgtcacaatagcagagccattcaacactgaactgcaactgtggcagatggagagcttttttgcaaaatatccacaagctggagcaggagaaaaacctagggaacaagtgctggaaacagtgaaaaacaatatagagtggctaaaacaacatagaaacaccatcagagaatggttttttaatttacttgagagtggttaatgtattcaaatgttagagtttaattttgtgaatctattgtttctcctctgaagcatttggtggcctaatttacaagcacgatggagagagccttataaacagataatgcttttactaagcactgtgtttatatgtcttgcaaagcctttaaattgttcctctttgtttatgaagaaagatactaatagagtacttaatatactcagggattccttctaagtgtacttcataagatattctttacaaactgaagataatgaaatagttattttaatacctttaaatatcattctttgtatcttaaatctgtgaagtagaacaatttggtcttagctttacattttcagtaccaaagaaacaccacttaatcttctctcttgattgatttttaaagtttaaataccagtacttgagggaccaatattaccatcttaatctttattttattattcagaattatacagacctaatatcattttattcacatatgtcttactactttaaatcctaccaaagtaacctgggcttaagttttacttgaggatcatatgaattagccaaaagaatggctgactgttgcctttgctcttataaaatcaataagagaactctcctctttttttaaaaataaatctaaatgattatcttgaaaaagtattgttttccagtgtcacttgactcttgaataaaaataactgcagtgttccccaaataatttaacacattgcaaatatgattcaagaatctggcctttttcatgcttggtactctcttctcttgctccattccttacaaagctccttcaaatatgctatgaaattagagggaacatagtgcttaactctgctccatggattttagaggaaaaaagctaaataattggaaactgttcaggaaagagagaaggcagattatttcttaaaactaaatggaattagaatttagctttgacctcacctagcaatctaagtgtgaaaatggggagacctgtgggcatccccagcatgactctgcatatctgagcatatatctccttatagatcaattttatgtataaacccttagatcctaatccatacagaatagcactgatcaaatttaaatgcatgacttgattaaagacatcaatttcatagaagctggtggcaagaatatgtttaatatggcacttgatacctcctagatccataatgtaagtccaataggcagaaaagatggtaagttactatgtttcaatctgctatatctagaaaatctaaatttatttggaactttcaaaaatgtaaggtaatttagaatcggcttgatgagaattgaagcatatggaaacaaaaccttagctttaactttatttatacaataatgtgccctaatcatgtactctgaaactttataaactttcctgttgctgtttcttaattatcacttctcaatccgtacagccaaactagtaaattcaaatgtagactgggttgtgggtggcagatatagaagaagaaatttccagaccaaaaaatattaaatattattttaaattatttcagaagcaaaaacatattaacatcataacttaccagaaaaaccccactatcctcataagattaacttaaaattctgaccacaatcagaaccagcacttgaagtctatgtattgtttcaagtaggacatattatgaggtgagatggtttatccttctgttttatgaaattaatacattttaaaagaaaaatgttagtttaagggggtggtaaataaaacagatttcaacttgcctacaagacattcta

SEQ ID NO: 286200 - DNA, 3305 bp, Homo sapiens
  misc_feature (965)..(965): n is a, c, g, or t
  misc_feature (3305)..(3305): n is a, c, g, or t
ggggtaggggtggagatgcgtcgtttataaggggagctgtgacaatcttcttgccagccctcttcctcccactcggctcctcttacggagtcctcattccaccccccttgtttccgcattcatcctgagtggctggtgggaacgtgaaaagggagaggaaaaggcgcaagaagccagagagaggggtgtgggaaaagcgaaaacaggctgccaaatcaggggattccttccaatttaaaaaggaagtctgctgacgttagttagttaaatttaacatctttttatgtgtaacacttgactttggaagcaaaaatgaactttgcggagagagagggctctaagagatactgcattcaaacgaaacatgtggccattctctgtgcggtggtggtgggtgtaggattaatagtgggacttgccgtgggcttgaccagatcgtgtgactccagcggggacggcgggccgggcactgcgccagctccttcccacctgccttcttccacggccagcccctcaggtcctcctgcccaggaccaggacatctgcccggccagtgaggatgagagcggacagtggaaaaactttcgactgccggacttcgtcaacccagtccactacgacctgcacgtgaagcccctgttggaggaggacacctacacgggcaccgtgagcatctccatcaacctgagcgctcccacccggtacctgtggctgcacctccgggagaccaggatcacccggctcccggagctgaagaggccctctggggaccaggtgcaagtccggaggtgtttcgagtacaaaaagcaggagtacgtggtggtcgaggcggaggaagagcttacccccagcagtggagatggcctgtatctcctgaccatggagttcgccggctggctgaacggctccctcgtgggattttatagaaccacctacacggagaacggacgagtcaagagcatagnggccaccgatcatgaaccaacagatgccaggaaatcttttccttgttttgatgagcccaacaaaaaggcaacttatacaatatctatcacccatcccaaagaatacggagcactttcaaatatgccagtggcgaaagaagagtcagtggatgataaatggactcgaacaacttttgagaagtctgtccccatgagcacgtacctggtgtgctttgctgtacatcaatttgactctgtaaagagaatatcaaatagtggaaaacctcttacaatttatgtccagccagagcaaaagcacacagccgaatatgctgcaaacataactaaaagtgtgtttgattattttgaagaatactttgctatgaattattctcttcctaaattagataaaatcgctattccagattttggcactggtgccatggagaactggggactcatcacgtacagagaaacgaacctgctttatgaccctaaggaatcagcctcatcaaaccaacagagggtggccactgtggttgcccatgaacttgtgcatcagtggtttggaaatattgtgaccatggactggtgggaagacttgtggctaaatgaaggatttgcttctttctttgagtttctgggagtaaaccatgcagaaacagactggcaaatgcgtgaccaaatgttacttgaagatgtattacctgttcaagaggatgattctttgatgtcttcgcatccaattattgtgactgtgacaacccctgatgaaataacatctgtttttgatggaatatcctatagcaagggatcttctattttgagaatgcttgaagactggataaaaccagagaattttcaaaaaggatgtcagatgtacttggaaaaataccaattcaagaatgcaaaaacttctgatttttgggcagcactggaagaggcaagtaggctaccagtgaaagaagtaatggacacctggaccagacagatgggttatcctgtgcttaacgtgaacggtgtcaagaacatcacacagaaacgctttttgttggacccaagagctaacccttctcagcccccttcagatcttggttatacatggaatatcccagttaaatggactgaagataatataacaagcagtgtgttatttaataggtcagaaaaagaaggaatcactttgaactcctctaatcctagtggaaatgcttttctcaaaataaacccagatcatattgggttttatcgtgtaaattatgaagtagcaacttgggactcgatagctacagcgctctccttgaaccacaagacattttcttcagcagatcgtgcaagtcttattgatgatgcttttgccttggcaagagctcaacttctagattataaggtggctttgaacttgaccaagtatctcaaaagggaagagaattttttaccatggcagagagtaatttcagctgtaacctacatcattagcatgtttgaagatgataaagagctatatcctatgattgaggaatacttccaaggtcaagtgaagcctattgcagattctctgggatggaatgatgctggagaccatgtcacaaagttactccgttcctccgtgttagggtttgcgtgcaagatgggagacagagaagccttgaacaatgcttcctcgttatttgagcagtggctaaatgggactgtaagccttcccgtaaatctcaggcttctggtgtatcggtatgggatgcagaactctggcaatgagatttcatggaactacactcttgagcaataccagaaaacttcattagctcaagaaaaagaaaaactgctgtatggattagcatcagtgaagaacgttactcttttgtcaaggtatttggatttgctcaaggacacgaaccttattaaaactcaggatgtgtttacagtcattcgatatatctcatataacagctatgggaagaacatggcctggaattggatacaactcaactgggactatctagtcaacagatatacactcaataacagaaaccttggccgaattgtcacaatagcagagccattcaacactgaactgcaactgtggcagatggagaagtttttgaaatattcacaaggtgggcaggagaaaacctgggaccagtgtggggacgtggaaacatattgagtggttaaacaactagaaaccattagagatggtgttcaattcactgagaggggacggtgtcaaggggacgaaatcggagagactggggcctgagaatggggagtaaaacgggggagccttaaaaaggtcttacagggtttttggagcatgctttttgaaagaaaaaaataaggggggaataaggaagggagatn

SEQ ID NO: 286201 - DNA, 152 bp, Homo sapiens
ggtggctttgaacttgaccaagtatctcaaaagggaagagaattttttaccatggcagagagtaatttcagctgtaacctacatcattagcatgtttgaagatgataaagagctatatcctatgattgaggtgacgttaatgctatggtatc

SEQ ID NO: 286202 - DNA, 3229 bp, Homo sapiens
  misc_feature (965)..(965): n is a, c, g, or t
  misc_feature (3058)..(3058): n is a, c, g, or t
  misc_feature (3063)..(3064): n is a, c, g, or t
  misc_feature (3073)..(3073): n is a, c, g, or t
ggggtaggggtggagatgcgtcgtttataaggggagctgtgacaatcttcttgccagccctcttcctcccactcggctcctcttacggagtcctcattccaccccccttgtttccgcattcatcctgagtggctggtgggaacgtgaaaagggagaggaaaaggcgcaagaagccagagagaggggtgtgggaaaagcgaaaacaggctgccaaatcaggggattccttccaatttaaaaaggaagtctgctgacgttagttagttaaatttaacatctttttatgtgtaacacttgactttggaagcaaaaatgaactttgcggagagagagggctctaagagatactgcattcaaacgaaacatgtggccattctctgtgcggtggtggtgggtgtaggattaatagtgggacttgccgtgggcttgaccagatcgtgtgactccagcggggacggcgggccgggcactgcgccagctccttcccacctgccttcttccacggccagcccctcaggtcctcctgcccaggaccaggacatctgcccggccagtgaggatgagagcggacagtggaaaaactttcgactgccggacttcgtcaacccagtccactacgacctgcacgtgaagcccctgttggaggaggacacctacacgggcaccgtgagcatctccatcaacctgagcgctcccacccggtacctgtggctgcacctccgggagaccaggatcacccggctcccggagctgaagaggccctctggggaccaggtgcaagtccggaggtgtttcgagtacaaaaagcaggagtacgtggtggtcgaggcggaggaagagcttacccccagcagtggagatggcctgtatctcctgaccatggagttcgccggctggctgaacggctccctcgtgggattttatagaaccacctacacggagaacggacgagtcaagagcatagnggccaccgatcatgaaccaacagatgccaggaaatcttttccttgttttgatgagcccaacaaaaaggcaacttatacaatatctatcacccatcccaaagaatacggagcactttcaaatatgccagtggcgaaagaagagtcagtggatgataaatggactcgaacaacttttgagaagtctgtccccatgagcacgtacctggtgtgctttgctgtacatcaatttgactctgtaaagagaatatcaaatagtggaaaacctcttacaatttatgtccagccagagcaaaagcacacagccgaatatgctgcaaacataactaaaagtgtgtttgattattttgaagaatactttgctatgaattattctcttcctaaattagataaaatcgctattccagattttggcactggtgccatggagaactggggactcatcacgtacagagaaacgaacctgctttatgaccctaaggaatcagcctcatcaaaccaacagagggtggccactgtggttgcccatgaacttgtgcatcagtggtttggaaatattgtgaccatggactggtgggaagacttgtggctaaatgaaggatttgcttctttctttgagtttctgggagtaaaccatgcagaaacagactggcaaatgcgtgaccaaatgttacttgaagatgtattacctgttcaagaggatgattctttgatgtcttcgcatccaattattgtgactgtgacaacccctgatgaaataacatctgtttttgatggaatatcctatagcaagggatcttctattttgagaatgcttgaagactggataaaaccagagaattttcaaaaaggatgtcagatgtacttggaaaaataccaattcaagaatgcaaaaacttctgatttttgggcagcactggaagaggcaagtaggctaccagtgaaagaagtaatggacacctggaccagacagatgggttatcctgtgcttaacgtgaacggtgtcaagaacatcacacagaaacgctttttgttggacccaagagctaacccttctcagcccccttcagatcttggttatacatggaatatcccagttaaatggactgaagataatataacaagcagtgtgttatttaataggtcagaaaaagaaggaatcactttgaactcctctaatcctagtggaaatgcttttctcaaaataaacccagatcatattgggttttatcgtgtaaattatgaagtagcaacttgggactcgatagctacagcgctctccttgaaccacaagacattttcttcagcagatcgtgcaagtcttattgatgatgcttttgccttggcaagagctcaacttctagattataaggtggctttgaacttgaccaagtatctcaaaagggaagagaattttttaccatggcagagagtaatttcagctgtaacctacatcattagcatgtttgaagatgataaagagctatatcctatgattgaggaatacttccaaggtcaagtgaagcctattgcagattctctgggatggaatgatgctggagaccatgtcacaaagttactccgttcctccgtgttagggtttgcgtgcaagatgggagacagagaagccttgaacaatgcttcctcgttatttgagcagtggctaaatgggactgtaagccttcccgtaaatctcaggcttctggtgtatcggtatgggatgcagaactctggcaatgagatttcatggaactacactcttgagcaataccagaaaacttcattagctcaagaaaaagaaaaactgctgtatggattagcatcagtgaagaacgttactcttttgtcaaggtatttggatttgctcaaggacacgaaccttattaaaactcaggatgtgtttacagtcattcgatatatctcatataacagctatgggaagaacatggcctggaattggatacaactcaactgggactatctagtcaacagatatacactcaataacagaaaccttggccgaattgtcacaatagcagagccattcaacactgaactgcaactgtggcagatggagagctttttttgcaaatatncacanngctgagcangagaccacatagaacaccattcgagatgggttttaattaccttggaatggtaaaggattcaatggtaagagttatttgggaatctatggtctcctttgaggaattgggggcctaataccaggcccatgtagaggctttaaaccggtaaggtttacc

SEQ ID NO: 286203 - DNA, 2396 bp, Homo sapiens
  misc_feature (965)..(965): n is a, c, g, or t
ggggtaggggtggagatgcgtcgtttataaggggagctgtgacaatcttcttgccagccctcttcctcccactcggctcctcttacggagtcctcattccaccccccttgtttccgcattcatcctgagtggctggtgggaacgtgaaaagggagaggaaaaggcgcaagaagccagagagaggggtgtgggaaaagcgaaaacaggctgccaaatcaggggattccttccaatttaaaaaggaagtctgctgacgttagttagttaaatttaacatctttttatgtgtaacacttgactttggaagcaaaaatgaactttgcggagagagagggctctaagagatactgcattcaaacgaaacatgtggccattctctgtgcggtggtggtgggtgtaggattaatagtgggacttgccgtgggcttgaccagatcgtgtgactccagcggggacggcgggccgggcactgcgccagctccttcccacctgccttcttccacggccagcccctcaggtcctcctgcccaggaccaggacatctgcccggccagtgaggatgagagcggacagtggaaaaactttcgactgccggacttcgtcaacccagtccactacgacctgcacgtgaagcccctgttggaggaggacacctacacgggcaccgtgagcatctccatcaacctgagcgctcccacccggtacctgtggctgcacctccgggagaccaggatcacccggctcccggagctgaagaggccctctggggaccaggtgcaagtccggaggtgtttcgagtacaaaaagcaggagtacgtggtggtcgaggcggaggaagagcttacccccagcagtggagatggcctgtatctcctgaccatggagttcgccggctggctgaacggctccctcgtgggattttatagaaccacctacacggagaacggacgagtcaagagcatagnggccaccgatcatgaaccaacagatgccaggaaatcttttccttgttttgatgagcccaacaaaaaggcaacttatacaatatctatcacccatcccaaagaatacggagcactttcaaatatgccagtggcgaaagaagagtcagtggatgataaatggactcgaacaacttttgagaagtctgtccccatgagcacgtacctggtgtgctttgctgtacatcaatttgactctgtaaagagaatatcaaatagtggaaaacctcttacaatttatgtccagccagagcaaaagcacacagccgaatatgctgcaaacataactaaaagtgtgtttgattattttgaagaatactttgctatgaattattctcttcctaaattagataaaatcgctattccagattttggcactggtgccatggagaactggggactcatcacgtacagagaaacgaacctgctttatgaccctaaggaatcagcctcatcaaaccaacagagggtggccactgtggttgcccatgaacttgtgcatcagtggtttggaaatattgtgaccatggactggtgggaagacttgtggctaaatgaaggatttgcttctttctttgagtttctgggagtaaaccatgcagaaacagactggcaaatgcgtgaccaaatgttacttgaagatgtattacctgttcaagaggatgattctttgatgtcttcgcatccaattattgtgactgtgacaacccctgatgaaataacatctgtttttgatggaatatcctatagcaagggatcttctattttgagaatgcttgaagactggataaaaccagagaattttcaaaaaggatgtcagatgtacttggaaaaataccaattcaagaatgcaaaaacttctgatttttgggcagcactggaagaggcaagtaggctaccagtgaaagaagtaatggacacctggaccagacagatgggttatcctgtgcttaacgtgaacggtgtcaagaacatcacacagaaacgctttttgttggacccaagagctaacccttctcagcccccttcagatcttggttatacatggaatatcccagttaaatggactgaagataatataacaagcagtgtgttatttaataggtcagaaaaagaagttaattgaggattggaagaatatctcggcagctgtttgatttactgtttacaagtttgaaagcgtgaataattcatctaccctagtacaattcacccagcactttcatggaatgaagtttccatacaagtgaattttccagataactaaagcttactcaagtgctttgtaaaatgcatttcaagagttcacaatagacattgttctaatatgtgttatgtactccttagaatatttggaataataaatttaatccttaattactagattaattcttt

SEQ ID NO: 286204 - DNA, 3341 bp, Homo sapiens
gcagagagggcactgggaggaggcagtgggagggcggagggcgggggcttcggggtgggcgcccagggtagggcaggtggccgccgcgtggaggcagggagaatgcactctccaaaaccctcgtcgacatggacatggccgactacagtgctgcactggacccagcctacaccaccctggaatttgagaatgtgcaggtgttgacgatgggcaatgatttgttgccgctgcgtctcgccagattgaggcatcccctccgacatcactggagcatatctggaggggtggacagttctccacagggagacacgtccccatcagaaggcaccaacctcaacgcgcccaacagcctgggtgtcagcgccctgtgtgccatctgcggggaccgggccacgggcaaacactacggtgcctcgagctgtgacggctgcaagggcttcttccggaggagcgtgcggaagaaccacatgtactcctgcagatttagccggcagtgcgtggtggacaaagacaagaggaaccagtgccgctactgcaggctcaagaaatgcttccgggctggcatgaagaaggaagccgtccagaatgagcgggaccggatcagcactcgaaggtcaagctatgaggacagcagcctgccctccatcaatgcgctcctgcaggcggaggtcctgtcccgacagatcacctcccccgtctccgggatcaacggcgacattcgggcgaagaagattgccagcatcgcagatgtgtgtgagtccatgaaggagcagctgctggttctcgttgagtgggccaagtacatcccagctttctgcgagctccccctggacgaccaggtggccctgctcagagcccatgctggcgagcacctgctgctcggagccaccaagagatccatggtgttcaaggacgtgctgctcctaggcaatgactacattgtccctcggcactgcccggagctggcggagatgagccgggtgtccatacgcatccttgacgagctggtgctgcccttccaggagctgcagatcgatgacaatgagtatgcctacctcaaagccatcatcttctttgacccagatgccaaggggctgagcgatccagggaagatcaagcggctgcgttcccaggtgcaggtgagcttggaggactacatcaacgaccgccagtatgactcgcgtggccgctttggagagctgctgctgctgctgcccaccttgcagagcatcacctggcagatgatcgagcagatccagttcatcaagctcttcggcatggccaagattgacaacctgttgcaggagatgctgctgggagggtcccccagcgatgcaccccatgcccaccaccccctgcaccctcacctgatgcaggaacatatgggaaccaacgtcatcgttgccaacacaatgcccactcacctcagcaacggacagatgtgtgagtggccccgacccaggggacaggcagccacccctgagaccccacagccctcaccgccaggtggctcagggtctgagccctataagctcctgccgggagccgtcgccacaatcgtcaagcccctctctgccatcccccagccgaccatcaccaagcaggaagttatctagcaagccgctggggcttgggggctccactggctccccccagccccctaagagagcacctggtgatcacgtggtcacggcaaaggaagacgtgatgccaggaccagtcccagagcaggaatgggaaggatgaagggcccgagaacatggcctaagggccacatcccactgccacccttgacgccctgctctggataacaagactttgacttggggagacctctactgccttggacaacttttctcatgttgaagccactgccttcaccttcaccttcatccatgtccaacccccgacttcatcccaaaggacagccgcctggagatgacttgaggccttacttaaacccagctcccttcttccctagcctggtgcttctcctctcctagcccctgtcatggtgtccagacagagccctgtgaggctgggtccaattgtggcacttggggcaccttgctcctccttctgctgctgcccccacctctgctgcctccctctgctgtcaccttgctcagccatcccgtcttctccaacaccacctctccagaggccaaggaggccttggaaacgattcccccagtcattctgggaacatgttgtaagcactgactgggaccaggcaccaggcagggtctagaaggctgtggtgagggaagacgcctttctcctccaacccaacctcatcctccttcttcagggacttgggtgggtacttgggtgaggatccctgaaggccttcaacccgagaaaacaaacccaggttggcgactgcaacaggaacttggagtggagaggaaaagcatcagaaagaggcagaccatccaccaggcctttgagaaagggtagaattctggctggtagagcaggtgagatgggacattccaaagaacagcctgagccaaggcctcgtggtagtaagaatctagcaagaattgaggaagaatggtgtgggagagggatgatgaagagagagagggcctgctggagagcatagggtctggaacaccaggctgaggtcctgatcagcttcaaggagtatgcagggagctgggcttccagaaaatgaacacagcagttctgcagaggacgggaggctggaagctgggaggtcaggtggggtggatgatataatgcgggtgagagtaatgaggcttggggctggagaggacaagatgggtaaaccctcacatcagagtgacatccaggaggaataagctcccagggcctgtctcaagctcttccttactcccaggcactgtcttaaggcatctgacatgcatcatctcatttaatcctcccttcctccctattaacctagagattgtttttgttttttattctcctcctccctccccgccctcacccgccccactccctcctaacctagagattgttacagaagctgaaattgcgttctaagaggtgaagtgattttttttctgaaactcacacaactaggaagtggctgagtcaggacttgaacccaggtctccctggatcagaacaggagctcttaactacagtggctgaatagcttctccaaaggctccctgtgttctcaccgtgatcaagttgaggggcttccggctcccttctacagcctcagaaaccagactcgttcttctgggaaccctgcccactcccaggaccaagattggcctgaggctgcactaaaattcacttagggtcgagcatcctgtttgctgataaatattaaggagaattca

SEQ ID NO: 286205 - DNA, 1622 bp, Homo sapiens
  misc_feature (1611)..(1611): n is a, c, g, or t
  misc_feature (1614)..(1614): n is a, c, g, or t
  misc_feature (1616)..(1616): n is a, c, g, or t
  misc_feature (1618)..(1622): n is a, c, g, or t
gcagagagggcactgggaggaggcagtgggagggcggagggcgggggcttcggggtgggcgcccagggtagggcaggtggccgccgcgtggaggcagggagaatgcactctccaaaaccctcgtcgacatggacatggccgactacagtgctgcactggacccagcctacaccaccctggaatttgagaatgtgcaggtgttgacgatgggcaatgacacgtccccatcagaaggcaccaacctcaacgcgcccaacagcctgggtgtcagcgccctgtgtgccatctgcggggaccgggccacgggcaaacactacggtgcctcgagctgtgacggctgcaagggcttcttccggaggagcgtgcggaagaaccacatgtactcctgcagatttagccggcagtgcgtggtggacaaagacaagaggaaccagtgccgctactgcaggctcaagaaatgcttccgggctggcatgaagaaggaagccgtccagaatgagcgggaccggatcagcactcgaaggtcaagctatgaggacagcagcctgccctccatcaatgcgctcctgcaggcggaggtcctgtcccgacagatcacctcccccgtctccgggatcaacggcgacattcgggcgaagaagattgccagcatcgcagatgtgtgtgagtccatgaaggagcagctgctggttctcgttgagtgggccaagtacatcccagctttctgcgagctccccctggacgaccaggtggccctgctcagagcccatgctggcgagcacctgctgctcggagccaccaagagatccatggtgttcaaggacgtgctgctcctaggcaatgactacattgtccctcggcactgcccggagctggcggagatgagccgggtgtccatacgcatccttgacgagctggtgctgcccttccaggagctgcagatcgatgacaatgagtatgcctacctcaaagccatcatcttctttgacccagatgccaaggggctgagcgatccagggaagatcaagcggctgcgttcccaggtgcaggtgagcttggaggactacatcaacgaccgccagtatgactcgcgtggccgctttggagagctgctgctgctgctgcccaccttgcagagcatcacctggcagatgatcgagcagatccagttcatcaagctcttcggcatggccaagattgacaacctgttgcaggagatgctgctgggaggtccgtgccaagcccaggaggggcggggttggagtggggactccccaggagacaggcctcacacagtgagctcacccctcagctccttggcttccccactgtgccgctttgggcaagttgcttaacctgtctgtgcctcagtttcctcaccagaaaaatgggaacaaggcaatggtctatttgttcaggcaccgagaacctagcacgtgccagtcactgttctaatgctggcaattcagcaaagaacaagatctttgccctcggggaggctgtgtgtgtgtgagtatgtatggatgcgtggatatctgtgtatatgcccgtatgtgcgtgcatgtgtatataagcctcacattttatgattttgaaataaacaggtaatangananannnnn

SEQ ID NO: 286206 - DNA, 433 bp, Homo sapiens
gccctagttctgtcctaagaggaggaagttgtgtcttctccatccaaccatccaaagccctccccagatttagccggcagtgcgtggtggacaaagacaagaggaaccagtgccgctactgcaggctcaagaaatgcttccgggctggcatgaagaaggaaggtgagcctcggccctccccgccccaccaccactgccccacctgcacccacagctccccgacagtcatttacaactgtagccacactttatgactcagtggcaggccccagggtgactggctaatggctgagaagagggagggcctggaaatctgaccatagggagcggctgggcttggtcttgagaaagattcagagagataagctcccactcttggctcctcaggctcccagcaaccaccacccctgcctgcctgtctgcgccaccacaa

SEQ ID NO: 286207 - DNA, 3251 bp, Homo sapiens
gcagagagggcactgggaggaggcagtgggagggcggagggcgggggcttcggggtgggcgcccagggtagggcaggtggccgccgcgtggaggcagggagaatgcactctccaaaaccctcgtcgacatggacatggccgactacagtgctgcactggacccagcctacaccaccctggaatttgagaatgtgcaggtgttgacgatgggcaatgacacgtccccatcagaaggcaccaacctcaacgcgcccaacagcctgggtgtcagcgccctgtgtgccatctgcggggaccgggccacgggcaaacactacggtgcctcgagctgtgacggctgcaagggcttcttccggaggagcgtgcggaagaaccacatgtactcctgcagatttagccggcagtgcgtggtggacaaagacaagaggaaccagtgccgctactgcaggctcaagaaatgcttccgggctggcatgaagaaggaagccgtccagaatgagcgggaccggatcagcactcgaaggtcaagctatgaggacagcagcctgccctccatcaatgcgctcctgcaggcggaggtcctgtcccgacagatcacctcccccgtctccgggatcaacggcgacattcgggcgaagaagattgccagcatcgcagatgtgtgtgagtccatgaaggagcagctgctggttctcgttgagtgggccaagtacatcccagctttctgcgagctccccctggacgaccaggtggccctgctcagagcccatgctggcgagcacctgctgctcggagccaccaagagatccatggtgttcaaggacgtgctgctcctaggcaatgactacattgtccctcggcactgcccggagctggcggagatgagccgggtgtccatacgcatccttgacgagctggtgctgcccttccaggagctgcagatcgatgacaatgagtatgcctacctcaaagccatcatcttctttgacccagatgccaaggggctgagcgatccagggaagatcaagcggctgcgttcccaggtgcaggtgagcttggaggactacatcaacgaccgccagtatgactcgcgtggccgctttggagagctgctgctgctgctgcccaccttgcagagcatcacctggcagatgatcgagcagatccagttcatcaagctcttcggcatggccaagattgacaacctgttgcaggagatgctgctgggagggtcccccagcgatgcaccccatgcccaccaccccctgcaccctcacctgatgcaggaacatatgggaaccaacgtcatcgttgccaacacaatgcccactcacctcagcaacggacagatgtgtgagtggccccgacccaggggacaggcagccacccctgagaccccacagccctcaccgccaggtggctcagggtctgagccctataagctcctgccgggagccgtcgccacaatcgtcaagcccctctctgccatcccccagccgaccatcaccaagcaggaagttatctagcaagccgctggggcttgggggctccactggctccccccagccccctaagagagcacctggtgatcacgtggtcacggcaaaggaagacgtgatgccaggaccagtcccagagcaggaatgggaaggatgaagggcccgagaacatggcctaagggccacatcccactgccacccttgacgccctgctctggataacaagactttgacttggggagacctctactgccttggacaacttttctcatgttgaagccactgccttcaccttcaccttcatccatgtccaacccccgacttcatcccaaaggacagccgcctggagatgacttgaggccttacttaaacccagctcccttcttccctagcctggtgcttctcctctcctagcccctgtcatggtgtccagacagagccctgtgaggctgggtccaattgtggcacttggggcaccttgctcctccttctgctgctgcccccacctctgctgcctccctctgctgtcaccttgctcagccatcccgtcttctccaacaccacctctccagaggccaaggaggccttggaaacgattcccccagtcattctgggaacatgttgtaagcactgactgggaccaggcaccaggcagggtctagaaggctgtggtgagggaagacgcctttctcctccaacccaacctcatcctccttcttcagggacttgggtgggtacttgggtgaggatccctgaaggccttcaacccgagaaaacaaacccaggttggcgactgcaacaggaacttggagtggagaggaaaagcatcagaaagaggcagaccatccaccaggcctttgagaaagggtagaattctggctggtagagcaggtgagatgggacattccaaagaacagcctgagccaaggcctcgtggtagtaagaatctagcaagaattgaggaagaatggtgtgggagagggatgatgaagagagagagggcctgctggagagcatagggtctggaacaccaggctgaggtcctgatcagcttcaaggagtatgcagggagctgggcttccagaaaatgaacacagcagttctgcagaggacgggaggctggaagctgggaggtcaggtggggtggatgatataatgcgggtgagagtaatgaggcttggggctggagaggacaagatgggtaaaccctcacatcagagtgacatccaggaggaataagctcccagggcctgtctcaagctcttccttactcccaggcactgtcttaaggcatctgacatgcatcatctcatttaatcctcccttcctccctattaacctagagattgtttttgttttttattctcctcctccctccccgccctcacccgccccactccctcctaacctagagattgttacagaagctgaaattgcgttctaagaggtgaagtgattttttttctgaaactcacacaactaggaagtggctgagtcaggacttgaacccaggtctccctggatcagaacaggagctcttaactacagtggctgaatagcttctccaaaggctccctgtgttctcaccgtgatcaagttgaggggcttccggctcccttctacagcctcagaaaccagactcgttcttctgggaaccctgcccactcccaggaccaagattggcctgaggctgcactaaaattcacttagggtcgagcatcctgtttgctgataaatattaaggagaattca

SEQ ID NO: 286208 - DNA, 3221 bp, Homo sapiens
gcagagagggcactgggaggaggcagtgggagggcggagggcgggggcttcggggtgggcgcccagggtagggcaggtggccgccgcgtggaggcagggagaatgcactctccaaaaccctcgtcgacatggacatggccgactacagtgctgcactggacccagcctacaccaccctggaatttgagaatgtgcaggtgttgacgatgggcaatgacacgtccccatcagaaggcaccaacctcaacgcgcccaacagcctgggtgtcagcgccctgtgtgccatctgcggggaccgggccacgggcaaacactacggtgcctcgagctgtgacggctgcaagggcttcttccggaggagcgtgcggaagaaccacatgtactcctgcagatttagccggcagtgcgtggtggacaaagacaagaggaaccagtgccgctactgcaggctcaagaaatgcttccgggctggcatgaagaaggaagccgtccagaatgagcgggaccggatcagcactcgaaggtcaagctatgaggacagcagcctgccctccatcaatgcgctcctgcaggcggaggtcctgtcccgacagatcacctcccccgtctccgggatcaacggcgacattcgggcgaagaagattgccagcatcgcagatgtgtgtgagtccatgaaggagcagctgctggttctcgttgagtgggccaagtacatcccagctttctgcgagctccccctggacgaccaggtggccctgctcagagcccatgctggcgagcacctgctgctcggagccaccaagagatccatggtgttcaaggacgtgctgctcctaggcaatgactacattgtccctcggcactgcccggagctggcggagatgagccgggtgtccatacgcatccttgacgagctggtgctgcccttccaggagctgcagatcgatgacaatgagtatgcctacctcaaagccatcatcttctttgacccagatgccaaggggctgagcgatccagggaagatcaagcggctgcgttcccaggtgcaggtgagcttggaggactacatcaacgaccgccagtatgactcgcgtggccgctttggagagctgctgctgctgctgcccaccttgcagagcatcacctggcagatgatcgagcagatccagttcatcaagctcttcggcatggccaagattgacaacctgttgcaggagatgctgctgggagggtcccccagcgatgcaccccatgcccaccaccccctgcaccctcacctgatgcaggaacatatgggaaccaacgtcatcgttgccaacacaatgcccactcacctcagcaacggacagatgtccacccctgagaccccacagccctcaccgccaggtggctcagggtctgagccctataagctcctgccgggagccgtcgccacaatcgtcaagcccctctctgccatcccccagccgaccatcaccaagcaggaagttatctagcaagccgctggggcttgggggctccactggctccccccagccccctaagagagcacctggtgatcacgtggtcacggcaaaggaagacgtgatgccaggaccagtcccagagcaggaatgggaaggatgaagggcccgagaacatggcctaagggccacatcccactgccacccttgacgccctgctctggataacaagactttgacttggggagacctctactgccttggacaacttttctcatgttgaagccactgccttcaccttcaccttcatccatgtccaacccccgacttcatcccaaaggacagccgcctggagatgacttgaggccttacttaaacccagctcccttcttccctagcctggtgcttctcctctcctagcccctgtcatggtgtccagacagagccctgtgaggctgggtccaattgtggcacttggggcaccttgctcctccttctgctgctgcccccacctctgctgcctccctctgctgtcaccttgctcagccatcccgtcttctccaacaccacctctccagaggccaaggaggccttggaaacgattcccccagtcattctgggaacatgttgtaagcactgactgggaccaggcaccaggcagggtctagaaggctgtggtgagggaagacgcctttctcctccaacccaacctcatcctccttcttcagggacttgggtgggtacttgggtgaggatccctgaaggccttcaacccgagaaaacaaacccaggttggcgactgcaacaggaacttggagtggagaggaaaagcatcagaaagaggcagaccatccaccaggcctttgagaaagggtagaattctggctggtagagcaggtgagatgggacattccaaagaacagcctgagccaaggcctcgtggtagtaagaatctagcaagaattgaggaagaatggtgtgggagagggatgatgaagagagagagggcctgctggagagcatagggtctggaacaccaggctgaggtcctgatcagcttcaaggagtatgcagggagctgggcttccagaaaatgaacacagcagttctgcagaggacgggaggctggaagctgggaggtcaggtggggtggatgatataatgcgggtgagagtaatgaggcttggggctggagaggacaagatgggtaaaccctcacatcagagtgacatccaggaggaataagctcccagggcctgtctcaagctcttccttactcccaggcactgtcttaaggcatctgacatgcatcatctcatttaatcctcccttcctccctattaacctagagattgtttttgttttttattctcctcctccctccccgccctcacccgccccactccctcctaacctagagattgttacagaagctgaaattgcgttctaagaggtgaagtgattttttttctgaaactcacacaactaggaagtggctgagtcaggacttgaacccaggtctccctggatcagaacaggagctcttaactacagtggctgaatagcttctccaaaggctccctgtgttctcaccgtgatcaagttgaggggcttccggctcccttctacagcctcagaaaccagactcgttcttctgggaaccctgcccactcccaggaccaagattggcctgaggctgcactaaaattcacttagggtcgagcatcctgtttgctgataaatattaaggagaattca

SEQ ID NO: 286209 - DNA, 749 bp, Homo sapiens
tttgctaggcaccggcagtggcggcggcagcggcggctggagcctctgattgggtttcggagtccggtactggagccaatcagcgcgggcagcgaaccgggggagcgaggcacggagtgtacctcacagccttctaggatctccagagtggacaggaatctcacttggagggaccatggagcagtatacagcaaacagcaatagttcgacagagcagattgttgtccaggcaggacagattcagcagcaggtccaagggcagccattaatggtgcaggtcagtggaggccagctaatcacatcaactggccaacccatcatggtccaggctgtccctggtggacaaggtcaaaccatcatgcaagtacctgtttctggaacacagggtttgcagcaaatacagttggtcccacctggacagatccagatccagggtggacaggctgtgcaggtgcagggccagcagggccagacccagcagatcatcatccagcagccccagacggctgtcactgctggccagactcagacacagcagcagattgctgtccagggacagcaagtggcacagactgctgaagggcagaccatcgtctatcaaccagttaatgcagatggcaccattctccagcaaggtaagtgtacccataagcttccctaggactttttggggcaacttttttgtcccttagacaactgacatctttagaatttgagtggtgaacttgacactacatattttttggaca

SEQ ID NO: 286210 - DNA, 884 bp, Homo sapiens
agcctgggcaaaacagcaagaccccatctcaaaataagtacataaataaagtttaaaaaaaaaagaatcttagttttgggacatgagagcattgacgtcatgaagatgatttcggttcatagtgattaattactcctcctttcttggtgattgcatttaagcccagaattttttatggtagtttcagggctattaaaacctaatcatttttttcttgtgaactcatctgaggagataaaaagggcattaaacaattgtgtaagtagaagtgtcagattcctgtttctggagggaaagattgcattacaaatctttgtgttaatgatgacaactgttttgagtttttgagtcaaatttttgaggtccactctggagacaaagggctaatatctttaatcctactaccttcaacaaaacagcttcaatatagggagtctgtacattttgaaagtccttcaggcttccgtctctctcctccaagaggtaaggtgatctgtgtcttgaactacacatttccttcctgacatatttcaagctcttcctgttcctgttctcagcagcagggtggtgtcactgctgtgcagttgcagactgaggcccaggtggcatccgcctcaggccagcaagtccagaccctccaggtagtggtaccctctctgattctctgtgagcactgcatgaacttctcctctcctcatgtctggtgctgtttgtgttaggatctccagtaggaatggcaaagtcagttgcatgtctttgatgctgctaacttgtctttgaggcttataagatgccagtttcctaatatttcatgccaagtcatatagagaccccgtatcaactttctgagaattggatttgactagcatgtttctttgagaatg

SEQ ID NO: 286211 - DNA, 4023 bp, Homo sapiens
tttgctaggcaccggcagtggcggcggcagcggcggctggagcctctgattgggtttcggagtccggtactggagccaatcagcgcgggcagcgaaccgggggagcgaggcacggagtgtacctcacagccttctaggatctccagagtggacaggaatctcacttggagggaccatggagcagtatacagcaaacagcaatagttcgacagagcagattgttgtccaggcaggacagattcagcagcagcagcagggtggtgtcactgctgtgcagttgcagactgaggcccaggtggcatccgcctcaggccagcaagtccagaccctccaggtagtccaagggcagccattaatggtgcaggtcagtggaggccagctaatcacatcaactggccaacccatcatggtccaggctgtccctggtggacaaggtcaaaccatcatgcaagtacctgtttctggaacacagggtttgcagcaaatacagttggtcccacctggacagatccagatccagggtggacaggctgtgcaggtgcagggccagcagggccagacccagcagatcatcatccagcagccccagacggctgtcactgctggccagactcagacacagcagcagattgctgtccagggacagcaagtggcacagactgctgaagggcagaccatcgtctatcaaccagttaatgcagatggcaccattctccagcaagttacagtccctgtttcaggcatgatcactatcccagcagccagtttggcaggagcacagattgttcaaacaggagccaataccaacacaaccagcagtgggcaagggactgtcactgtgacactaccagtggcaggcaatgtggtcaattcaggagggatggtcatgatggttcctggggctggctctgtgcctgctatccaaagaatccctctacctggagcagagatgcttgaagaagagcctctctacgtgaatgccaaacaataccaccgtattcttaagaggaggcaagcccgagctaaactagaggcagaagggaaaattccaaaggagagaaggaaatacctgcatgagtctcggcaccgtcatgccatggcacggaagcgtggtgaaggtggacgatttttctctccaaaggaaaaggatagtccccatatgcaggatccaaaccaagccgatgaagaagcaatgacacagatcatccgagtgtcctaaccccacgccatgtgatggagctgatcaaggtcatgtttctcactgttccaggaaattgatcaactcttccaatgggacattgatgatcacattctgccctttactacaggacagaaaccacttagtttttaataagtggctcagtattacaattgcagcgatgcctggcaaattgaagttgcaagcctttgtcttactctttcagtcaggacctatttcagactgttgatgacattgacatttcatggattcggatgatgcaaggagacacatgccaccccagcagtacacaaagcacttaccttgactggtgaagtcagccagccatctcagcagggaagaacaaccttctcaaccaaaactgcaatcaggaaagcagcagcccactccttcccatggaatctagacagcatttatccctctggtgggggaatctcacactgactaactgaatggacgctttgtattcagagatggcttccaggcaaggaagttctatcttgtgatacggaaacaataaattcctgagatacattcttccaatctgtggtaataataagaattcctctctgcccagatggtaggttgatatttctggactctagccaagaaaaagctaattctggggatagaatgataaaagactcaagcactaaaaatatacattgccgaatctctttttctagctttgaaaagttgtggcctgcttgtccctctgttgactggtcatctggaccatcgtacttgctgtggctacttctaagacaatgtagagggttattaaaccttgaaactgcctttcctaagtagagaacaagactattcaacaacttctttgctgaagcactgaggagatttgtaatactcctaaaggaagggccaaactagagattttcaatcatagactttgtgacagcatttggggaactaaaagattcatgtgtttcagcctagtgggagagagtgggggagaggaagagagagagagagcatgtatacccgtatgttatcatagagcacgattctccagtggatggatacctggaatggatcattaagatgaagagagtaattcacatttactctagaacctttaacaagcactgaaaggaagaagcctgagatttgatccttgacaatttctggaaagcactggtcagtcacactgtcctggacagagtccaagttacccactaaagcttgaggtggatgttggcttcactcctgcagcacaatgctggccctagaaagcgagcattttcattcttcccatggcagctgattctttggtgccagttttcatgttttctccataggccttgtgcagaaaggttttctcattgcatccatactgtgagaataaactgcagactgaaagaaacatgcctgcagggtcaggaactgggccactgttcccagaacgggttgtgcctcagaaatctatttctcttttagatgttgaaccctgagagaactaagatgatatttcagaagagttggctgccttctctggaaacaaggaaaacccaataattccgaggaacattgggggttaaataccaagaataaaaattggttcttctttgacttcagcttaactgtattaagacagaaattaagccctctaaaaacaccacaaagagagatgattgtaatgatagaaatagaggtacagagctatgcaaaggaaacaggaagtgaaatattcctagtcccagggatctggtaatcgctcctggcttccagatgtcaaaggactgatcctttggtaagctcactagaaacttctagctctacaagagtttgggatattaatgttattcagtaagtcccaagtttttcagagaatagattactaacaatgaggaatttatattccttggttaatttaggagtctaagatgcagagttcagaaagaaattactcagacctaactttgagtgcttaagctgccaacagttagaagatgctatttatttgtgtctgtaagtttgtacatagtaatgccagccttgttgctgaattttttatttggggggagatgactttgaattttgtttgaaatgcttcagttgtcattttgtcattgcatttcaaatagctcatgacccttttcttgtggtcactttggcacaccatagtagcccacaaagtgggggcagggtattgacatttggattttttctttgatactagttcttttattcatttttatttgtgactgtagtgataactttacagatggagaaagagtgaatggatgaatgaataattggtttaatgcctagttatgcaacttgagtgctttttttttttttttgcaggataattttaagtgtatatattttaactgcactggtacattgaacatgtcagtgtcgatgccactggaccaacagagcattttgtggctatagggtgcctgataataatgtcttgatttttctttgggattcaactatatcgaaggtttttcccccagcagtatgggggcgtacaggtgatcgatcattaatgtcattgcaattgttattttttaaaataaatttataaaaataaccgaaaagtaatgtgacttttgaggaatctgcaactcctgggttctagtttgtgtttccagtgttgaaattttgatctcccccgacaagacttgtctgcatggacggtgtctctgtaaacagtatcaaacttgtaatgtctgagcctcttagctttatctccccttaatttcttcccttttggcccttccaccctgttgaggagattttttctgtcacctgcaggctgatcatacatttgatgc

SEQ ID NO: 286212 - DNA, 3936 bp, Homo sapiens
tttgctaggcaccggcagtggcggcggcagcggcggctggagcctctgattgggtttcggagtccggtactggagccaatcagcgcgggcagcgaaccgggggagcgaggcacggagtgtacctcacagccttctaggatctccagagtggacaggaatctcacttggagggaccatggagcagtatacagcaaacagcaatagttcgacagagcagattgttgtccaggcaggacagattcagcagcaggtccaagggcagccattaatggtgcaggtcagtggaggccagctaatcacatcaactggccaacccatcatggtccaggctgtccctggtggacaaggtcaaaccatcatgcaagtacctgtttctggaacacagggtttgcagcaaatacagttggtcccacctggacagatccagatccagggtggacaggctgtgcaggtgcagggccagcagggccagacccagcagatcatcatccagcagccccagacggctgtcactgctggccagactcagacacagcagcagattgctgtccagggacagcaagtggcacagactgctgaagggcagaccatcgtctatcaaccagttaatgcagatggcaccattctccagcaagttacagtccctgtttcaggcatgatcactatcccagcagccagtttggcaggagcacagattgttcaaacaggagccaataccaacacaaccagcagtgggcaagggactgtcactgtgacactaccagtggcaggcaatgtggtcaattcaggagggatggtcatgatggttcctggggctggctctgtgcctgctatccaaagaatccctctacctggagcagagatgcttgaagaagagcctctctacgtgaatgccaaacaataccaccgtattcttaagaggaggcaagcccgagctaaactagaggcagaagggaaaattccaaaggagagaaggaaatacctgcatgagtctcggcaccgtcatgccatggcacggaagcgtggtgaaggtggacgatttttctctccaaaggaaaaggatagtccccatatgcaggatccaaaccaagccgatgaagaagcaatgacacagatcatccgagtgtcctaaccccacgccatgtgatggagctgatcaaggtcatgtttctcactgttccaggaaattgatcaactcttccaatgggacattgatgatcacattctgccctttactacaggacagaaaccacttagtttttaataagtggctcagtattacaattgcagcgatgcctggcaaattgaagttgcaagcctttgtcttactctttcagtcaggacctatttcagactgttgatgacattgacatttcatggattcggatgatgcaaggagacacatgccaccccagcagtacacaaagcacttaccttgactggtgaagtcagccagccatctcagcagggaagaacaaccttctcaaccaaaactgcaatcaggaaagcagcagcccactccttcccatggaatctagacagcatttatccctctggtgggggaatctcacactgactaactgaatggacgctttgtattcagagatggcttccaggcaaggaagttctatcttgtgatacggaaacaataaattcctgagatacattcttccaatctgtggtaataataagaattcctctctgcccagatggtaggttgatatttctggactctagccaagaaaaagctaattctggggatagaatgataaaagactcaagcactaaaaatatacattgccgaatctctttttctagctttgaaaagttgtggcctgcttgtccctctgttgactggtcatctggaccatcgtacttgctgtggctacttctaagacaatgtagagggttattaaaccttgaaactgcctttcctaagtagagaacaagactattcaacaacttctttgctgaagcactgaggagatttgtaatactcctaaaggaagggccaaactagagattttcaatcatagactttgtgacagcatttggggaactaaaagattcatgtgtttcagcctagtgggagagagtgggggagaggaagagagagagagagcatgtatacccgtatgttatcatagagcacgattctccagtggatggatacctggaatggatcattaagatgaagagagtaattcacatttactctagaacctttaacaagcactgaaaggaagaagcctgagatttgatccttgacaatttctggaaagcactggtcagtcacactgtcctggacagagtccaagttacccactaaagcttgaggtggatgttggcttcactcctgcagcacaatgctggccctagaaagcgagcattttcattcttcccatggcagctgattctttggtgccagttttcatgttttctccataggccttgtgcagaaaggttttctcattgcatccatactgtgagaataaactgcagactgaaagaaacatgcctgcagggtcaggaactgggccactgttcccagaacgggttgtgcctcagaaatctatttctcttttagatgttgaaccctgagagaactaagatgatatttcagaagagttggctgccttctctggaaacaaggaaaacccaataattccgaggaacattgggggttaaataccaagaataaaaattggttcttctttgacttcagcttaactgtattaagacagaaattaagccctctaaaaacaccacaaagagagatgattgtaatgatagaaatagaggtacagagctatgcaaaggaaacaggaagtgaaatattcctagtcccagggatctggtaatcgctcctggcttccagatgtcaaaggactgatcctttggtaagctcactagaaacttctagctctacaagagtttgggatattaatgttattcagtaagtcccaagtttttcagagaatagattactaacaatgaggaatttatattccttggttaatttaggagtctaagatgcagagttcagaaagaaattactcagacctaactttgagtgcttaagctgccaacagttagaagatgctatttatttgtgtctgtaagtttgtacatagtaatgccagccttgttgctgaattttttatttggggggagatgactttgaattttgtttgaaatgcttcagttgtcattttgtcattgcatttcaaatagctcatgacccttttcttgtggtcactttggcacaccatagtagcccacaaagtgggggcagggtattgacatttggattttttctttgatactagttcttttattcatttttatttgtgactgtagtgataactttacagatggagaaagagtgaatggatgaatgaataattggtttaatgcctagttatgcaacttgagtgctttttttttttttttgcaggataattttaagtgtatatattttaactgcactggtacattgaacatgtcagtgtcgatgccactggaccaacagagcattttgtggctatagggtgcctgataataatgtcttgatttttctttgggattcaactatatcgaaggtttttcccccagcagtatgggggcgtacaggtgatcgatcattaatgtcattgcaattgttattttttaaaataaatttataaaaataaccgaaaagtaatgtgacttttgaggaatctgcaactcctgggttctagtttgtgtttccagtgttgaaattttgatctcccccgacaagacttgtctgcatggacggtgtctctgtaaacagtatcaaacttgtaatgtctgagcctcttagctttatctccccttaatttcttcccttttggcccttccaccctgttgaggagattttttctgtcacctgcaggctgatcatacatttgatgc

SEQ ID NO: 286213 - DNA, 3969 bp, Homo sapiens
tttgctaggcaccggcagtggcggcggcagcggcggctggagcctctgattgggtttcggagtccggtactggagccaatcagcgcgggcagcgaaccgggggagcgaggcacggagtgtacctcacagccttctaggatctccagagtggacaggaatctcacttggagggaccatggagcagtatacagcaaacagcaatagttcgacagagcagattgttgtccaggcaggacagattcagcagcagcagcagggtggtgtcactgctgtgcagttgcagactgaggcccaggtggcatccgcctcaggccagcaagtccagaccctccaggtagtccaagggcagccattaatggtgcaggtcagtggaggccagctaatcacatcaactggccaacccatcatggtccaggctgtccctggtggacaaggtcaaaccatcatgcaagtacctgtttctggaacacagggtttgcagcaaatacagttggtcccacctggacagatccagatccagggtggacaggctgtgcaggtgcagggccagcagggccagacccagcagatcatcatccagcagccccagacggctgtcactgctggccagactcagacacagcagcagattgctgtccagggacagcaagtggcacagactgctgaagggcagaccatcgtctatcaaccagttaatgcagatggcaccattctccagcaagttacagtccctgtttcaggcatgatcactatcccagcagccagtttggcaggagcacagattgttcaaacaggagccaataccaacacaaccagcagtgggcaagggactgtcactgtgacactaccagtggcaggcaatgtggtcaattcaggagggatggtcatgatggttcctggggctggctctgtgcctgctatccaaagaatccctctacctggagcagagatgcttgaagaagagcctctctacgtgaatgccaaacaataccaccgtattcttaagaggaggcaagcccgagctaaactagaggcagaagggaaaattccaaaggagagaaggaaatacctgcatgagtctcggcaccgtcatgccatggcacggaagcgtggtgaaggtggacgatttttctctccaaaggaaaaggatagtccccatatgcaggatccaaaccaagccgatgaagaagcaatgacacagatcatccgagtgtcctaaccccacgccatgtgatggagctgatcaaggtcatgtttctcactgttccaggaaattgatcaactcttccaatgggacattgatgatcacattctgccctttactacaggacagaaaccacttagtttttaataagtggctcagtattacaattgcagcgatgcctggcaaattgaagttgcaagcctttgtcttactctttcagtcaggacctatttcagactgttgatgacattgacatttcatggattcggatgatgcaaggagacacatgccaccccagcagtacacaaagcacttaccttgactggtgaagtcagccagccatctcagcagggaagaacaaccttctcaaccaaaactgcaatcaggaaagcagcagcccactccttcccatggaatctagacagcatttatccctctggtgggggaatctcacactgactaactgaatggacgctttgtattcagagatggcttccaggcaaggaagttctatcttgtgatacggaaacaataaattcctgagatacattcttccaatctgtggtaataataagaattcctctctgcccagatggtaggttgatatttctggactctagccaagaaaaagctaattctggggatagaatgataaaagactcaagcactaaaaatatacattgccgaatctctttttctagctttgaaaagttgtggcctgcttgtccctctgttgactggtcatctggaccatcgtacttgctgtggctacttctaagacaatgtagagggttattaaaccttgaaactgcctttcctaagtagagaacaagactattcaacaacttctttgctgaagcactgaggagatttgtaatactcctaaaggaagggccaaactagagattttcaatcatagactttgtgacagcatttggggaactaaaagattcatgtgtttcagcctagtgggagagagtgggggagaggaagagagagagagagcatgtatacccgtatgttatcatagagcacgattctccagtggatggatacctggaatggatcattaagatgaagagagtaattcacatttactctagaacctttaacaagcactgaaaggaagaagcctgagatttgatccttgacaatttctggaaagcactggtcagtcacactgtcctggacagagtccaagttacccactaaagcttgaggtggatgttggcttcactcctgcagcacaatgctggccctagaaagcgagcattttcattcttcccatggcagctgattctttggtgccagttttcatgttttctccataggccttgtgcagaaaggttttctcattgcatccatactgtgagaataaactgcagactgaaagaaacatgcctgcagggtcaggaactgggccactgttcccagaacgggttgtgcctcagaaatctatttctcttttagatgttgaaccctgagagaactaagatgatatttcagaagagttggctgccttctctggaaacaaggaaaacccaataattccgaggaacattgggggttaaataccaagaataaaaattggttcttctttgacttcagcttaactgtattaagacagaaattaagcccttatgcaaaggaaacaggaagtgaaatattcctagtcccagggatctggtaatcgctcctggcttccagatgtcaaaggactgatcctttggtaagctcactagaaacttctagctctacaagagtttgggatattaatgttattcagtaagtcccaagtttttcagagaatagattactaacaatgaggaatttatattccttggttaatttaggagtctaagatgcagagttcagaaagaaattactcagacctaactttgagtgcttaagctgccaacagttagaagatgctatttatttgtgtctgtaagtttgtacatagtaatgccagccttgttgctgaattttttatttggggggagatgactttgaattttgtttgaaatgcttcagttgtcattttgtcattgcatttcaaatagctcatgacccttttcttgtggtcactttggcacaccatagtagcccacaaagtgggggcagggtattgacatttggattttttctttgatactagttcttttattcatttttatttgtgactgtagtgataactttacagatggagaaagagtgaatggatgaatgaataattggtttaatgcctagttatgcaacttgagtgctttttttttttttttgcaggataattttaagtgtatatattttaactgcactggtacattgaacatgtcagtgtcgatgccactggaccaacagagcattttgtggctatagggtgcctgataataatgtcttgatttttctttgggattcaactatatcgaaggtttttcccccagcagtatgggggcgtacaggtgatcgatcattaatgtcattgcaattgttattttttaaaataaatttataaaaataaccgaaaagtaatgtgacttttgaggaatctgcaactcctgggttctagtttgtgtttccagtgttgaaattttgatctcccccgacaagacttgtctgcatggacggtgtctctgtaaacagtatcaaacttgtaatgtctgagcctcttagctttatctccccttaatttcttcccttttggcccttccaccctgttgaggagattttttctgtcacctgcaggctgatcatacatttgatgc

SEQ ID NO: 286214 - DNA, 4196 bp, Homo sapiens
ggcggccagcggccccggcccggggcctgcgagcgcctcggggcactcccggccgaggcctgcaggggccgccccgcgcggggatggcgcctcggggagcaggcacctcggggctccgaccctcgcagggtgccagggccagttgggaatgcgtccctgttccccgactcaggcccaggttctcaggccccaggcctggggccacgaatggccctacactaggggacacatgcgcgccctgggcctcggcgatttcctcctggtcgttctggccgcaaacttaaacctgcccttgcactctccactctccggcccttgggacaggaagcctccccggggcccgcgccccccgctccccgctcccagcgagccgggagtgtacctcacagccttctaggatctccagagtggacaggaatctcacttggagggaccatggagcagtatacagcaaacagcaatagttcgacagagcagattgttgtccaggcaggacagattcagcagcaggtccaagggcagccattaatggtgcaggtcagtggaggccagctaatcacatcaactggccaacccatcatggtccaggctgtccctggtggacaaggtcaaaccatcatgcaagtacctgtttctggaacacagggtttgcagcaaatacagttggtcccacctggacagatccagatccagggtggacaggctgtgcaggtgcagggccagcagggccagacccagcagatcatcatccagcagccccagacggctgtcactgctggccagactcagacacagcagcagattgctgtccagggacagcaagtggcacagactgctgaagggcagaccatcgtctatcaaccagttaatgcagatggcaccattctccagcaagttacagtccctgtttcaggcatgatcactatcccagcagccagtttggcaggagcacagattgttcaaacaggagccaataccaacacaaccagcagtgggcaagggactgtcactgtgacactaccagtggcaggcaatgtggtcaattcaggagggatggtcatgatggttcctggggctggctctgtgcctgctatccaaagaatccctctacctggagcagagatgcttgaagaagagcctctctacgtgaatgccaaacaataccaccgtattcttaagaggaggcaagcccgagctaaactagaggcagaagggaaaattccaaaggagagaaggaaatacctgcatgagtctcggcaccgtcatgccatggcacggaagcgtggtgaaggtggacgatttttctctccaaaggaaaaggatagtccccatatgcaggatccaaaccaagccgatgaagaagcaatgacacagatcatccgagtgtcctaaccccacgccatgtgatggagctgatcaaggtcatgtttctcactgttccaggaaattgatcaactcttccaatgggacattgatgatcacattctgccctttactacaggacagaaaccacttagtttttaataagtggctcagtattacaattgcagcgatgcctggcaaattgaagttgcaagcctttgtcttactctttcagtcaggacctatttcagactgttgatgacattgacatttcatggattcggatgatgcaaggagacacatgccaccccagcagtacacaaagcacttaccttgactggtgaagtcagccagccatctcagcagggaagaacaaccttctcaaccaaaactgcaatcaggaaagcagcagcccactccttcccatggaatctagacagcatttatccctctggtgggggaatctcacactgactaactgaatggacgctttgtattcagagatggcttccaggcaaggaagttctatcttgtgatacggaaacaataaattcctgagatacattcttccaatctgtggtaataataagaattcctctctgcccagatggtaggttgatatttctggactctagccaagaaaaagctaattctggggatagaatgataaaagactcaagcactaaaaatatacattgccgaatctctttttctagctttgaaaagttgtggcctgcttgtccctctgttgactggtcatctggaccatcgtacttgctgtggctacttctaagacaatgtagagggttattaaaccttgaaactgcctttcctaagtagagaacaagactattcaacaacttctttgctgaagcactgaggagatttgtaatactcctaaaggaagggccaaactagagattttcaatcatagactttgtgacagcatttggggaactaaaagattcatgtgtttcagcctagtgggagagagtgggggagaggaagagagagagagagcatgtatacccgtatgttatcatagagcacgattctccagtggatggatacctggaatggatcattaagatgaagagagtaattcacatttactctagaacctttaacaagcactgaaaggaagaagcctgagatttgatccttgacaatttctggaaagcactggtcagtcacactgtcctggacagagtccaagttacccactaaagcttgaggtggatgttggcttcactcctgcagcacaatgctggccctagaaagcgagcattttcattcttcccatggcagctgattctttggtgccagttttcatgttttctccataggccttgtgcagaaaggttttctcattgcatccatactgtgagaataaactgcagactgaaagaaacatgcctgcagggtcaggaactgggccactgttcccagaacgggttgtgcctcagaaatctatttctcttttagatgttgaaccctgagagaactaagatgatatttcagaagagttggctgccttctctggaaacaaggaaaacccaataattccgaggaacattgggggttaaataccaagaataaaaattggttcttctttgacttcagcttaactgtattaagacagaaattaagccctctaaaaacaccacaaagagagatgattgtaatgatagaaatagaggtacagagctatgcaaaggaaacaggaagtgaaatattcctagtcccagggatctggtaatcgctcctggcttccagatgtcaaaggactgatcctttggtaagctcactagaaacttctagctctacaagagtttgggatattaatgttattcagtaagtcccaagtttttcagagaatagattactaacaatgaggaatttatattccttggttaatttaggagtctaagatgcagagttcagaaagaaattactcagacctaactttgagtgcttaagctgccaacagttagaagatgctatttatttgtgtctgtaagtttgtacatagtaatgccagccttgttgctgaattttttatttggggggagatgactttgaattttgtttgaaatgcttcagttgtcattttgtcattgcatttcaaatagctcatgacccttttcttgtggtcactttggcacaccatagtagcccacaaagtgggggcagggtattgacatttggattttttctttgatactagttcttttattcatttttatttgtgactgtagtgataactttacagatggagaaagagtgaatggatgaatgaataattggtttaatgcctagttatgcaacttgagtgctttttttttttttttgcaggataattttaagtgtatatattttaactgcactggtacattgaacatgtcagtgtcgatgccactggaccaacagagcattttgtggctatagggtgcctgataataatgtcttgatttttctttgggattcaactatatcgaaggtttttcccccagcagtatgggggcgtacaggtgatcgatcattaatgtcattgcaattgttattttttaaaataaatttataaaaataaccgaaaagtaatgtgacttttgaggaatctgcaactcctgggttctagtttgtgtttccagtgttgaaattttgatctcccccgacaagacttgtctgcatggacggtgtctctgtaaacagtatcaaacttgtaatgtctgagcctcttagctttatctccccttaatttcttcccttttggcccttccaccctgttgaggagattttttctgtcacctgcaggctgatcatacatttgatgc

SEQ ID NO: 286215 - DNA, 853 bp, Homo sapiens
ggtgtcaaagcgggaaggtgggcgtggcttcagggaacgcctgcgcgttgctcctccgaaggggtggggcgatccctgaactggagttagtgggcgtggcctcagaggcgcctgcgcggaggcggttggagggaggcccgattcccctttgttcgggttcgccattttgctaggcaccggcagtggcggcggcagcggcggctggagcctctgattgggtttcggagtccggtactggagccaatcagcgcgggcagcgaaccgggggagcgaggcacggtgagtgtgaggagccaatatccagcggcccagagccggccccagcgccccgattggcgggtctcgctgaccactcaggagaggcccaggcgcccgtcgagcccggggagtcgagctgagcctagccgagccgggcggccagcggccccggcccggggcctgcgagcgcctcggggcactcccggccgaggcctgcaggggccgccccgcgcggggatggcgcctcggggagcaggcacctcggggctccgaccctcgcagggtgccagggccagttgggaatgcgtccctgttccccgactcaggcccaggttctcaggccccaggcctggggccacgaatggccctacactaggggacacatgcgcgccctgggcctcggcgatttcctcctggtcgttctggccgcaaacttaaacctgcccttgcactctccactctccggcccttgggacaggaagcctccccggggcccgcgccccccgctccccgctcccagcgagccgggtctgtcttatctgcagcccctctaggtcgggagggaggcctggggagggtgcgcgccgcggccgcg

SEQ ID NO: 286216 - DNA, 2163 bp, Homo sapiens
ttgcaggtgtgtttctcccaccagcatgctttcataccggtccgtggacatccggaagagcttgcagctggaggaactcctggcgagggagcagctggagtacaccatagaggaggaggtggccaagcagaccatccgcatgtggctcaagaagtgcctgaagcgcatcagagctaaacagcagcagtcgtgcagtatcatccacagcctgagagagagtcagcagcaagagctgagccggtttctgaacccgcccagcatcgagaccacccagcccagtgaggacacgaatgccaacagtcaggacaacagcatgcaacctgagacaagcagccagcagcagctcctgagccccacgctgtcggatcgaggaggaagtcggcaagatgcagccgacgcagggaaaccccagaggaaatttgggcagtggcgtctgccctcagccccaaaaccaataagccattcagtgtcctcagtcaacttacggtttggaggaaggacaaccatgaaatctgtcgtgtgcaaaatgaaccccatgactgacgcggcttcctgcggttctgaagttaagaagtggtggacccggcagctgactgtggagagcgacgaaagtggggatgaccttctggatatttaggtggatgtcaatgtagatgaatttctagtggtggaaaccgttttctaataatgtccttgattgtccagtgagcaatctgtaattgatctataactgaattccagcttgtcacaagatgtttataaattgattttcatcctgccacagaaaggcataagctgcatgtatgatgggttactatcaatcattgctcaaaaaaatttttgtataatgacagtactgataatattagaaatgataccgcaagcaaatgtatatcacttaaaaatgtcatatattctgtctgcgtaaactaaggtatatattcatatgtgctctaatgcagtattatcaccgccccgcaaaagagtgctaagcccaaagtggctgatatttagggtacaggggttatagctttagttcacatctttcccatttccactagaaatatttctcttgagagaatttattatttatgattgatctgaaaaggtcagcactgaacttatgctaaaatgatagtagttttacaaactacagattctgaattttaaaaagtatcttctttttctcgtgttatatttttaaatatacacaagacatttggtgaccagaacaagttgatttctgtcctcagttatgttaatgaaactgttgcctccttctaagaaaattgtgtgtgcaagcaccaggcaaagaaatggactcaggatgcttagcggtttaaaacaaacctgtagataaatcacttgagtgacatagttgcgcaaagatgttaagtttcttaagaaaccttttaataactgagtttagcaaaaagaataaaactatatagctcaatttatttaaaaaaatctttttgcatgtgtgatgttatcattggcttcatttcttacccaaggtatgtctgttttgccataaatcagcagagtcatttcattctgggtgatcctgacacaccattgctatgttagatttgaaatgacatctctgttaaaagaatcttctatggaaataatggtgccctgcaaaatcttcctctgaactcacaggttagggatcacacaacttacttaatcgttttttgtttttgttttttttccttatatgtcaatggcccatgtcctccgggaaaattagaaaagcaaaatgattacaaagtgctgttagatttcttgtgctgggccagccaagtagaagtggacttgacttggacctttaactattttattacagattggacatttgctgttcagatgttttttaacagagggattatctcagaatcctgtgacctccaggttgttttataatctatttttctctatttaacattcctcagatagataggcaaataggacattccttctgtgtcacagaagtatcgtggtagtggcagtctacagtttatatgattcattgtaactatgagataaagaacaaccagtcatgtggccaaaaggattagatttgatttgatgttcacttggagtttactttttgtacatacaagataaaataaatattggatttgtaaaataaaaaac

SEQ ID NO: 286217 - DNA, 664 bp, Homo sapiens
ttgcaggtgtgtttctcccaccagcatgctttcataccggtccgtggacatccggaagagcttgcagctggaggaactcctggcgagggagcagctggagtacaccatagaggaggaggtggccaagcagaccatccgcatgtggctcaagaagtgcctgaagcgcatcagagctaaacagcagcagtcgtgcagtatcatccacagcctgagagagagtcagcagcaagagctgagccggtttctgaacccgcccagcatcgagaccacccagcccagtgaggacacgaatgccaacagtcaggacaacagcatgcaacctgagacaagcagccagcagcagctcctgagccccacgctgtcggatcgaggaggaagtcggcaagatgcagccgacgcagggaaaccccagaggaaatttgggcagtggcgtctgccctcagccccaaaaccaataagccattcagtgtcctcagtcaacttacggtttggaggaaggacaaccatgaaatctgtcgtgtgcaaaatgaaccccatgactgacgcggcttcctgcggttctgaagttaagaagtggtggacccggcagctgactgtggagagcgacctagtggggggaacccggtttctaataaggccctgaatgggccaggggcaattgttg

SEQ ID NO: 286218 - DNA, 2108 bp, Homo sapiens
ttgcaggtgtgtttctcccaccagcatgctttcataccggtccgtggacatccggaagagcttgcagctggaggaactcctggcgagggagcagctggagtacaccatagaggaggaggtggccaagcagaccatccgcatgtggctcaagaagtgcctgaagcgcatcagagctaaacagcagcagtcgtgcagtatcatccacagcctgagagagagtcagcagcaagagctgagccggtttctgaacccgcccagcatcgagaccacccagcccagtgaggacacgaatgccaacagtcaggacaacagcatgcaacctgagacaagcagccagcagcagctcctgagccccacgctgtcggatcgaggaggaagtcggcaagatgcagccgacgcagggaaaccccagaggaaatttgggcagtggcgtctgccctcagccccaaaaccaataagccattcagtgtcctcagtcaacttacggtttggaggaaggacaaccatgaaatctgtcgttggtggacccggcagctgactgtggagagcgacgaaagtggggatgaccttctggatatttaggtggatgtcaatgtagatgaatttctagtggtggaaaccgttttctaataatgtccttgattgtccagtgagcaatctgtaattgatctataactgaattccagcttgtcacaagatgtttataaattgattttcatcctgccacagaaaggcataagctgcatgtatgatgggttactatcaatcattgctcaaaaaaatttttgtataatgacagtactgataatattagaaatgataccgcaagcaaatgtatatcacttaaaaatgtcatatattctgtctgcgtaaactaaggtatatattcatatgtgctctaatgcagtattatcaccgccccgcaaaagagtgctaagcccaaagtggctgatatttagggtacaggggttatagctttagttcacatctttcccatttccactagaaatatttctcttgagagaatttattatttatgattgatctgaaaaggtcagcactgaacttatgctaaaatgatagtagttttacaaactacagattctgaattttaaaaagtatcttctttttctcgtgttatatttttaaatatacacaagacatttggtgaccagaacaagttgatttctgtcctcagttatgttaatgaaactgttgcctccttctaagaaaattgtgtgtgcaagcaccaggcaaagaaatggactcaggatgcttagcggtttaaaacaaacctgtagataaatcacttgagtgacatagttgcgcaaagatgttaagtttcttaagaaaccttttaataactgagtttagcaaaaagaataaaactatatagctcaatttatttaaaaaaatctttttgcatgtgtgatgttatcattggcttcatttcttacccaaggtatgtctgttttgccataaatcagcagagtcatttcattctgggtgatcctgacacaccattgctatgttagatttgaaatgacatctctgttaaaagaatcttctatggaaataatggtgccctgcaaaatcttcctctgaactcacaggttagggatcacacaacttacttaatcgttttttgtttttgttttttttccttatatgtcaatggcccatgtcctccgggaaaattagaaaagcaaaatgattacaaagtgctgttagatttcttgtgctgggccagccaagtagaagtggacttgacttggacctttaactattttattacagattggacatttgctgttcagatgttttttaacagagggattatctcagaatcctgtgacctccaggttgttttataatctatttttctctatttaacattcctcagatagataggcaaataggacattccttctgtgtcacagaagtatcgtggtagtggcagtctacagtttatatgattcattgtaactatgagataaagaacaaccagtcatgtggccaaaaggattagatttgatttgatgttcacttggagtttactttttgtacatacaagataaaataaatattggatttgtaaaataaaaaac

SEQ ID NO: 286219 - DNA, 415 bp, Homo sapiens
tctccctaagaaaaagaatgacaaatgttatggcactgtctaaaagcacttaaagaatccagaggaagaatgttccaaaaatccgcagcaagactaaatatttggggtgtgatgtgtgacaatcaagagccttaaaagaagtgtttagtcttcagtacacacttgatatgaggcaaccaaaaaaaatacttgatctaccaacaacatatgttgagcaaacctacgtattttccctgtgaacttacgctgtgtgacttccatctccggaaaataagaaaacttttcattacacatattgccctcacagcaacaaaaatatacttcagggctgtcttttttttctacacaatcagtcctataaataagcagagaaaaaataattaaaatcaatattattatactgaccctacaacaa

SEQ ID NO: 286220 - DNA, 392 bp, Homo sapiens
agtagagacgaggtttcaccatgttggtcaggctggtctcgaacttcagacctcaggtgttctgaatgatgagtaggagtttgccgggtcggcaggaggggaagggtgttggaagcaccagaagcagcataagcgggggctgggaggtgtgagagctggcaggttatttggggttggcaaggggtgggctgtggctggagtgtagggtggaataatgctggaaggaagggtttacaccctgaaagatgtcaccaccaaggaggcccggggggtgggccgtggagggttgctggagcaggggcacagaggagggggcagtggtgcgagtggccccaggcagagagtgaaggcagagcattcagcctcctagtctggatgacaggttgtctggt

SEQ ID NO: 286221 - DNA, 2137 bp, Homo sapiens
  misc_feature (27)..(27): n is a, c, g, or t
  misc_feature (77)..(77): n is a, c, g, or t
  misc_feature (114)..(114): n is a, c, g, or t
  misc_feature (815)..(815): n is a, c, g, or t
atttttagtagagacggggtttcgtcntgttgggtagactggtctcgatctcttgacctcatgatccgctggcctcngcctcccaaagtgctgggattataggcgtgagccacngcacccggcctcacccttccattctttgggcatcctctgcccaaactcctttgcaaccatcagacccaggcaaccgtgtggccagcttcctggacctggtcctgggcaaggacattcagcatggaggtcaggatgaatgtggtcatgccccctgtatcctcctcccccagcagcccccagagatggttcccacagtcaccgagctcctcaatggtcacagtagcgctgggctcagagagggcgccttccccatcggtccggtagctgcagctgtagttgccaggctgatggactggaaaggtggcctccacatcctcctgggcctcaggcacctccagaaactcatggtcgccctcccgcctcagcagaaaagtcacaccccgcagcacacctcggcacactgctgttgttttcaggccgggggtgatccaggacactggcgccatcgagagccagggagcaggcaaggactctgtgggtggggtggagttgaagagtgcttctgcataacaggagacgtgggaagcccagcagaacctgggccccacactcataagactgtgaaggagacagggatggagggcattgctgggaaaaggcaggcaggcaccagtggaaacaaggcatacggcaagagaaaaagagtgtgtgggagctgtacggcatgccgggcctgctggggacacaaccatgtattcctnacaacacagacatcatccccatttgacagatgggaagattggggcttggggctcagagacatcgggtgacttggaggaagggagaccccccagtcaacaacctacccactgcctcctggcccccaattcatgccccggctcacttggccctgtcagctccaggagcttgctcagctgggtccatcctgtggacaagcccgagcggcagcggtagcggccctgggtgtcacccgtcagcaggaactggtgcttgatggcagggacccagaccccaggaggcctcaccccacagcaagagaaagaccacgagcatggacatgatggtcgcgctcactccggtgcagtgagtgtctgggtgttggatcctggaacctgttctagaaggagacgctgagttctccccactctacctggagctgctgaggtcaagtggagagtgccggggctgaagcccagcgagcccctccctgtcacaccacactgcacatgtgacaccaaaggcatttattgagcatctactgtgtgccagatgcaaagaagacagtgggataactgggcaaggagcattccaggcagagggaacagccagtgcaaacatgggagatgcgggtgcagtgagaagcagcagaggagaccaggagttgaggcgactgcagagcgattgcagagctcatagacgtgatgaagaccagctgggcactgcagcggctctggcttctgctgtgagggacggggagctgtggagactccctctgtttggtcccatttccatattgctgagcacctgctgcatgctctctgtcctgctcagagccagtacctggatggaggctgtgtgttctgggtggactgggggagaatgcattctttgcagaagagacaaccaggtgctgaggcctgaagtcataaccagacctggggcactcagacaaggactggtggccaggccagaggagcagagctcagggtgtgcacagaactcagaagtcagaccactgaacagtgacagaacctttcagcccattggcaatgaggctgcccaggcagccagaggcctggtcaaatctgaggtctgcagagatggagctgtcattctgtgtttcctttggcagtcccaacaccagcctcgttgcaccctcctcttagcttccctgggttctccagccctaagggtggtagcagcttcctgcaagtatccaactctgagattctgcaacatccacttttgctctctgagccttgcaaaacctgcacaatcagtccctaacttatatcccctctgtttgaaatacctagtgtggtttctatttcctgacttgact

SEQ ID NO: 286222 - DNA, 458 bp, Homo sapiens
ccacaccccaggccgcgcccgcgcctgcgcctcagccccggcttcatcttccctgtcttgttcctgggcgcagagggctcctccggcgccgccgagctgcgcccgctgccttcacaccccggacatccgcgccacacgtgagtgtccccgcacccctcccccaggaccgtggaagtcccagattcgggcctgctctggggcttctggggtccccagcctcggtcactctgacgggtgaagggaagaagaaatgatggagaaaacggtgctccttcatggagggaccaaaaaaggacatacaatctatgtcaatagatgagggttttccctccataagtttaactttaaaagtgtatttaaggtgccgggcgcagtggctcacacctgtaatctcagcactttgagaggccgaggcaggcggattgcctgagctcaggagttccagaccagcctgggta

SEQ ID NO: 286223 - DNA, 1614 bp, Homo sapiens
ccacaccccaggccgcgcccgcgcctgcgcctcagccccggcttcatcttccctgtcttgttcctgggcgcagagggctcctccggcgccgccgagctgcgcccgctgccttcacaccccggacatccgcgccacactgttggatcctggaacctgttctagaaggagacgctgagttctccccactctacctggagctgctgaggtcaagtggagagtgccggggctgaagcccagcgagcccctccctgtcacaccacactgcacatgtgacaccaaaggtggggttcacctcttttcagactttctgcggttgccctcacatgggctgtctggaggtgcaccctcactcttcctgaggactgtggttccttctccatcactggttcattctgcatggtgtgacccaccacggctctggagtcggatttccacccaggtcattcagctgagacctgcgcttcccaggcctacccgtgacatgtgctcagttacctgagctgctggtggtcactcatgtggctatagcctgctgcctggaggccaggcctcccgcttcccctgcctccccctctcctcaccacagcctgttgggatggaacaggacaggggtgagaccgtggtgctttcacactcagcctccatggacatcctgtcattcccacccggggaggtctggtccccaccctgggtgtcccagcctagctccgctacgagtgtgagggcccagggcaaccgcctagccctcatctgccccctgcactgcatcctccccactcattcattccacaggcatttattgagcatctactgtgtgccagatgcaaagaagacagtgggataactgggcaaggagcattccaggcagagggaacagccagtgcaaacatgggagatgcgggtgcagtgagaagcagcagaggagaccaggagttgaggcgactgcagagcgattgcagagctcatagacgtgatgaagaccagctgggcactgcagcggctctggcttctgctgtgagggacggggagctgtggagactccctctgtttggtcccatttccatattgctgagcacctgctgcatgctctctgtcctgctcagagccagtacctggatggaggctgtgtgttctgggtggactgggggagaatgcattctttgcagaagagacaaccaggtgctgaggcctgaagtcataaccagacctggggcactcagacaaggactggtggccaggccagaggagcagagctcagggtgtgcacagaactcagaagtcagaccactgaacagtgacagaacctttcagcccattggcaatgaggctgcccaggcagccagaggcctggtcaaatctgaggtctgcagagatggagctgtcattctgtgtttcctttggcagtcccaacaccagcctcgttgcaccctcctcttagcttccctgggttctccagccctaagggtggtagcagcttcctgcaagtatccaactctgagattctgcaacatccacttttgctctctgagccttgcaaaacctgcacaatcagtccctaacttatatcccctctgtttgaaatacctagtgtggtttctatttcctgacttgact

SEQ ID NO: 286224 - DNA, 1710 bp, Homo sapiens
ccacaccccaggccgcgcccgcgcctgcgcctcagccccggcttcatcttccctgtcttgttcctgggcgcagagggctcctccggcgccgccgagctgcgcccgctgccttcacaccccggacatccgcgccacacggacccagaccccaggaggcctcaccccacagcaagagaaagaccacgagcatggacatgatggtcgcgctcactccggtgcagtgagtgtctgggtgttggatcctggaacctgttctagaaggagacgctgagttctccccactctacctggagctgctgaggtcaagtggagagtgccggggctgaagcccagcgagcccctccctgtcacaccacactgcacatgtgacaccaaaggtggggttcacctcttttcagactttctgcggttgccctcacatgggctgtctggaggtgcaccctcactcttcctgaggactgtggttccttctccatcactggttcattctgcatggtgtgacccaccacggctctggagtcggatttccacccaggtcattcagctgagacctgcgcttcccaggcctacccgtgacatgtgctcagttacctgagctgctggtggtcactcatgtggctatagcctgctgcctggaggccaggcctcccgcttcccctgcctccccctctcctcaccacagcctgttgggatggaacaggacaggggtgagaccgtggtgctttcacactcagcctccatggacatcctgtcattcccacccggggaggtctggtccccaccctgggtgtcccagcctagctccgctacgagtgtgagggcccagggcaaccgcctagccctcatctgccccctgcactgcatcctccccactcattcattccacaggcatttattgagcatctactgtgtgccagatgcaaagaagacagtgggataactgggcaaggagcattccaggcagagggaacagccagtgcaaacatgggagatgcgggtgcagtgagaagcagcagaggagaccaggagttgaggcgactgcagagcgattgcagagctcatagacgtgatgaagaccagctgggcactgcagcggctctggcttctgctgtgagggacggggagctgtggagactccctctgtttggtcccatttccatattgctgagcacctgctgcatgctctctgtcctgctcagagccagtacctggatggaggctgtgtgttctgggtggactgggggagaatgcattctttgcagaagagacaaccaggtgctgaggcctgaagtcataaccagacctggggcactcagacaaggactggtggccaggccagaggagcagagctcagggtgtgcacagaactcagaagtcagaccactgaacagtgacagaacctttcagcccattggcaatgaggctgcccaggcagccagaggcctggtcaaatctgaggtctgcagagatggagctgtcattctgtgtttcctttggcagtcccaacaccagcctcgttgcaccctcctcttagcttccctgggttctccagccctaagggtggtagcagcttcctgcaagtatccaactctgagattctgcaacatccacttttgctctctgagccttgcaaaacctgcacaatcagtccctaacttatatcccctctgtttgaaatacctagtgtggtttctatttcctgacttgact

SEQ ID NO: 286225 - DNA, 900 bp, Homo sapiens
agctgggcactgcagcggctctggcttctgctgtgagggacggggagctgtggagactccctctgtttggtcccatttgcatttattgagcatctactgtgtgccagatgcaaagaagacagtgggataactgggcaaggagcattccaggcagagggaacagccagtgcaaacatgggagatgcgggtgcagtgagaagcagcagaggagaccaggagttgaggcgactgcagagcgattgcagagctcatagacgtgatgaagaccagctgggcactgcagcggctctggcttctgctgtgagggacggggagctgtggagactccctctgtttggtcccatttccatattgctgagcacctgctgcatgctctctgtcctgctcagagccagtacctggatggaggctgtgtgttctgggtggactgggggagaatgcattctttgcagaagagacaaccaggtgctgaggcctgaagtcataaccagacctggggcactcagacaaggactggtggccaggccagaggagcagagctcagggtgtgcacagaactcagaagtcagaccactgaacagtgacagaacctttcagcccattggcaatgaggctgcccaggcagccagaggcctggtcaaatctgaggtctgcagagatggagctgtcattctgtgtttcctttggcagtcccaacaccagcctcgttgcaccctcctcttagcttccctgggttctccagccctaagggtggtagcagcttcctgcaagtatccaactctgagattctgcaacatccacttttgctctctgagccttgcaaaacctgcacaatcagtccctaacttatatcccctctgtttgaaatacctagtgtggtttctatttcctgacttgact

SEQ ID NO: 286226 - DNA, 792 bp, Homo sapiens
taatattgtactattaaaatccatctgttgtttaatgttcaaaaatcaatccagataatatgaaatccattgagctatttctaaaaagtgattgttaatttcagtaacatgccattttgatttttagtggattatcttgatggatctctgcctaaaagcataagatcaacggaaccatgtcatctgaatagaagctagtgaatgggattgggtgcagtaaaatggaaatcctttttaatgaaagataagagctgcatccttacctctcaacctttcaatcctttcatttgaggatttaggaggaaccatctggattgtaacagcaagttcttttcaagcacaaaagttccaggagagagagaatatagatttagtattattcctcctggcattcctcattctaacttttgccatcacctgagttccagcattggggaagacaaaagcaccagggtgcacatctttaaagacatttatgctgcttgccttcaagtaaatatcagctacaaccaggaatattagactgtctcccttttccctgtaaagtgggcctttaatgggatggccacactttattgatgggaatcctgtgttcaagttgagatcacaggtacaaatgaagcctaactagtaacctacaaaatatatgcactagaagctatggcagtggttcaaagttagaaagatgattagtatattcatttttatcgactgtagcactttatgatgcttatggaaatattcttagtaaattattcaatcaaataaattttacatgagggttttactaaa

SEQ ID NO: 286227 - DNA, 2048 bp, Homo sapiens
ggccggacgcgcggtggcctgacggtcgcaaggattacattcgcctgacccggcccggcttgaccctgcccgggcgcgccatgttcgcgcgtgggtcccggaggcgccgctccgggcgtgcgcctccagaggcagaggacccagaccggggccagccctgcaactcctgtagggagcagtgccctggcttcctgctccacggctggagaaagatctgccagcattgcaaatgcccgcgggaggagcatgcagtgcacgcggtgcctgtggacctggaacgcatcatgtgtcggctaatctcggacttccagcgccactccatctccgacgacgactcaggctgtgcatcggaggagtatgcctgggtgcccccaggccttaagccggagcaggtatatcaatttttcagctgcctcccagaggacaaggtcccctacgtcaacagtcctggggagaaatacaggatcaagcagctgctgcaccagctgcccccacacgacagtgaggcacagtactgcacagcactggaagaggaggaaaagaaagagctccgagcctttagccagcagcggaagcgggagaatctggggcgtggcatcgtgcgcatcttcccggtgaccatcactggggccatctgtgaggagtgcggaaagcagattggaggtggggacatcgcagtgtttgccagccgtgcaggcctgggtgcctgctggcacccacagtgcttcgtgtgtaccacgtgccaggaactgctggttgacctcatctacttctaccatgttggcaaggtctactgcgggcgtcaccatgccgaatgcctgcgtccacgctgccaagcctgtgacgagatcatcttctcccctgagtgcacggaggctgagggccgccactggcacatggatcacttctgctgctttgagtgtgaagcttcactaggagggcagcgctatgtcatgcgtcagagccgcccccactgctgcgcctgctacgaggcccgccacgcggagtactgtgatggctgtggggagcacatcggcctggaccaaggccagatggcttacgagggccagcactggcatgcctcagaccgctgcttctgctgtagtcgctgtgggcgggccctgctgggccgcccattcctgccacgccgaggcctaatcttctgctctcgagcctgcagccttgggtccgagcccacagctccagggccgagccgccgcagctggagtgccggccctgtcacagccccacttgcagcctccacagcctctttctctgctgtgaagggggcatcagagaccaccaccaaaggcaccagcacagagttagcgccagctacaggccctgaggagccctcccgctttctgagaggggctccccaccgccactccatgccggaactggggctccgcagtgtccccgagccgcccccagagtcccccggccagcctaacctgcgcccagatgatagtgccttcggtcgtcagagcaccccacgcgtcagcttccgcgaccctctggtgtctgaaggaggcccgcgccggaccctgagtgcacccccggcccagcgccgcaggccacgcagtcccccacccagggcccccagccgtcgccgccaccatcatcataatcaccatcaccatcacaaccgccacccaagcagacgtcgccactatcaatgtgacgcgggatcagggtcagactcggaatcttgctccagctcgccctccagttccagttccgaatcatcagaggatgatggcttcttcctaggagagcgcatccctctgcccccgcatttgtgcaggcccatgcctgctcaggacactgcaatggagaccttcaactccccatctttatcgctccccagggactctcgcgcagggatgcctcgtcaggcccgagacaagaactgcatcgtggcttgaaggcaggccgtcctggagggggctccattctccagtcagagtagatgatgaggcccatgcccctcacccccacgccccgcccctacaacctaagtcataaatcctcttcctccctccttt

SEQ ID NO: 286228 - DNA, 2129 bp, Homo sapiens
ggccggacgcgcggtggcctgacggtcgcaaggattacattcgcctgacccggcccggcttgaccctgcccgggcgcgccatgttcgcgcgtgggtcccggaggcgccgctccgggcgtgcgcctccagaggcagaggacccagaccggggccagccctgcaactcctgtagggagcagtgccctggcttcctgctccacggctggagaaagatctgccagcattgcaaatgcccgcgggaggagcatgcagtgcacgcggtgcctgtggacctggaacgcatcatgtgtcggctaatctcggacttccagcgccactccatctccgacgacgactcaggctgtgcatcggaggagtatgcctgggtgcccccaggccttaagccggagcaggtatatcaatttttcagctgcctcccagaggacaaggtcccctacgtcaacagtcctggggagaaatacaggatcaagcagctgctgcaccagctgcccccacacgacagtgaggcacagtactgcacagcactggaagaggaggaaaagaaagagctccgagcctttagccagcagcggaagcgggagaatctggggcgtggcatcgtgcgcatcttcccggtgaccatcactggggccatctgtgaggagtgcggaaagcagattggaggtggggacatcgcagtgtttgccagccgtgcaggcctgggtgcctgctggcacccacagtgcttcgtgtgtaccacgtgccaggaactgctggttgacctcatctacttctaccatgttggcaaggtctactgcgggcgtcaccatgccgaatgcctgcgtccacgctgccaagcctgtgacgagatcatcttctcccctgagtgcacggaggctgagggccgccactggcacatggatcacttctgctgctttgagtgtgaagcttcactaggagggcagcgctatgtcatgcgtcagagccgcccccactgctgcgcctgctacgaggcccgccacgcggagtactgtgatggctgtggggagcacatcggcctggaccaaggccagatggcttacgagggccagcactggcatgcctcagaccgctgcttctgctgtagtcgctgtgggcgggccctgctgggccgcccattcctgccacgccgaggcctaatcttctgctctcgagcctgcagccttgggtccgagcccacagctccagggccgagccgccgcagctggagtgccggccctgtcacagccccacttgcagcctccacagcctctttctctgctgtgaagggggcatcagagaccaccaccaaaggcaccagcacagagttagcgccagctacaggccctgaggagccctcccgctttctgagaggggctccccaccgccactccatgccggaactggggctccgcagtgtccccgagccgcccccagagtcccccggccagcctaacctgcgcccagatgatagtgccttcggtcgtcagagcaccccacgcgtcagcttccgcgaccctctggtgtctgaaggaggcccgcgccggaccctgagtgcacccccggcccagcgccgcaggccacgcagtcccccacccagggcccccagccgtcgccgccaccatcatcataatcaccatcaccatcacaaccgccacccaagcagacgtcgccactatcaatgtgacgcgggatcagggtcagactcggaatcttgctccagctcgccctccagttccagttccgaatcatcagaggatgatggcttcttcctaggagagcgcatccctctgcccccgcatttgtgcaggcccatgcctgctcaggacactgcaatggagaccttcaactccccatctttatcgctccccagggactctcgcgcagggatgcctcgtcaggcccgagacaagaactgcatcgtggcttgaaggcaggccgtcctggagggggctccattctccagtcagagtagatgatgaggcccatgcccctcacccccacgccccgcccctacaacctaagtcataaatcctcttcctccctcctttatcagtttgtttctatttttgtttctgttttagagacttggtctaccctattgcccaggctggagtgcagtggtgtgatca

SEQ ID NO: 286229 - DNA, 437 bp, Homo sapiens
agccaccccctaatgtctaagcctggcccgaatcttagagtccaatgcccaccccgctctgggagagagcaccctgggaaagaaagggaggagtgagagagaggttcaccagccagtctccaggagagaaccaaaacctgtttcctgctttctccaaaagggccccattctggaggagggaggaaggcacccaggggtgccctgcctcggattccccacctcttcttgagaagggactcgttcacgaggggtggggttacgcctgggggttctgcctcagtttttccccctcgtcgttccccacaggcctggaccaaggccagatggcttacgagggccagcactggcatgcctcagaccgctgcttctgctgtagtcgctgtgggcgggccctgctgggccgcccattcctgccacgccgaggcctaatcttctgc

SEQ ID NO: 286230 - DNA, 764 bp, Homo sapiens
ctggatctcactggatccttcactgctaaaggacccccaccgcggattctaagatccttagcacccacctggaggactgggggttttaggtgtccaagaagaaagctcagacctgccgaccgcaggtaccttacctgggatttactatccgacaggggtccgaacgcagctcgggatcagaaaaaaagcaggggtccgaacgcagcccgggatcagaaagaaagcaggtcgtttgcaatctaccggagcctaagggcagaaggcaggaccgtgggaacaatatgccagggggatttccactttctgccatatatgtagtcacatcacccactctgccttggaatattattaaggaccatctaacacgagggtgtatacgtcctgcaatactacgagtaatatcaacttcttggcctctgaatatgaggaagaatatcacagggtgggtgtacacctcgtgctctattatgcggagtcatatctgtctattatggggagtaatatcattctctccctttcaggatattaataacaatttcacaggctgggtgaacacagccggcaatgctgaaattattatcaacctctccccatcttcccctcctggctcttaggacccccatcgcagggggctgaggcatcccccgcgaggcggggactgagtgccagcccctcttccctagccccttcgtcagggctgagagaattttgagcgctagccgtctctcgatcgctggctaataaagaactcctgaattagtaaa

SEQ ID NO: 286231 - DNA, 978 bp, Homo sapiens
ctggatctcactggatccttcactgctaaaggacccccaccgcggattctaagatccttagcacccacctggaggactgggggttttaggtgtccaagaagaaagctcagacctgccgaccgcaggtaccttacctgggatttactatccgacaggggtccgaacgcagctcgggatcagaaaaaaagcaggggtccgaacgcagcccgggatcagaaagaaagcaggtcgtttgcaatctaccggagcctaagggcagaaggcaggaccgtgggaacaatatgccagggggatttccactttctgccatatatgtagtcacatcacccactctgccttggaatattattaaggaccatctaacacgagggtgtatacgtcctgcaatactacgagtaatatcaacttcttggcctctgaatatgaggaagaatatcacagggggtccgaatgcagcccgggatcacaaagaaagcaggtcgtttgcaatctaccagagcctaagggcagaaggcaggatcgtgggaacaatatcccatgggggtgtaccctttctgccatatatgtagtcacatcacccactccgccttggaatattattaaggaccatctaacacgagggtgtatacgtcctgtgatattgggagtaatatcaacttctcggcctctgaatatgaggaagaatatcacaggtcttagaatctcaagtgactctgactctacagtctattgaatgtgcattcagctgcctgaaatcagaaatgacgggaatccatacagtggaattgagcccagcttcaaagaacatcccaacaacatatgcagtgagtgaaatgtcctcttcatctccaccctgaaaacaaaggaacaatgagtcattcgggacagcagagcacaaaatagcaagtattcttttgaagtaaaactaggtatgaaaaaaatactggaacaaataccattattcataaaaacacccga

SEQ ID NO: 286232 - DNA, 685 bp, Homo sapiens
ctggatctcactggatccttcactgctaaaggacccccaccgcggattctaagatccttagcacccacctggaggactgggggttttaggtgtccaagaagaaagctcagacctgccgaccgcaggtaccttacctgggatttactatccgacaggggtccgaacgcagctcgggatcagaaaaaaagcaggggtccgaacgcagcccgggatcagaaagaaagcaggtcgtttgcaatctaccggagcctaagggcagaaggcaggaccgtgggaacaatatgccagggggatttccactttctgccatatatgtagtcacatcacccactctgccttggaatattattaaggaccatctaacacgagggtgtatacgtcctgcaatactacgagtaatatcaacttcttggcctctgaatatgaggaagaatatcacagggatattaataacaatttcacaggctgggtgaacacagccggcaatgctgaaattattatcaacctctccccatcttcccctcctggctcttaggacccccatcgcagggggctgaggcatcccccgcgaggcggggactgagtgccagcccctcttccctagccccttcgtcagggctgagagaattttgagcgctagccgtctctcgatcgctggctaataaagaactcctgaattagtaaa

SEQ ID NO: 286233 - DNA, 663 bp, Homo sapiens
ctggatctcactggatccttcactgctaaaggacccccaccgcggattctaagatccttagcacccacctggaggactgggggttttaggtgtccaagaagaaagctcagacctgccgaccgcaggtaccttacctgggatttactatccgacaggggtccgaacgcagctcgggatcagaaaaaaagcaggggtccgaacgcagcccgggatcagaaagaaagcaggtcgtttgcaatctaccggagcctaagggcagaaggcaggaccgtgggaacaatatgccagggggatttccactttctgccatatatgtagtcacatcacccactctgccttggaatattattaaggaccatctaacacgagggtgtatacgtcctgcaatactacgagtaatatcaacttcttggcctctgaatatgaggaagaatatcacagggctgggtgaacacagccggcaatgctgaaattattatcaacctctccccatcttcccctcctggctcttaggacccccatcgcagggggctgaggcatcccccgcgaggcggggactgagtgccagcccctcttccctagccccttcgtcagggctgagagaattttgagcgctagccgtctctcgatcgctggctaataaagaactcctgaattagtaaa

SEQ ID NO: 286234 - DNA, 848 bp, Homo sapiens
ggctttggcacattattcatacttgtaagatttctctccaatgagttatcttatctgtggtgaggtgcgaggaccgattaaaggctttgccaaatttttcccatttgtagggttgctctccagtatgaattctcttatgtttagttagggttgaggaccagaaaaatgctttgccacattcttcacatttgtagggttttactccagtatgaattaccttatgtttagtaaaagttgaagaccggttaaaagatttgccacattcttcacatttatagggtttctctccagtatgaattctcttatggttagtaaggattgaagactgcttaaaggctttgccacatttttcacatttgtagggtttctcttcagtatgaattatcttatgtttagtaagagttgaggaccagttaaaggctttgccacattcttcacatttgtagggtttctctccagtatgaattatcttatgtgtagtaagggttgaggattggctaaaagatttgccacattcttcacatttgtagggtttctctccagtatgaattatcttatgtgtagtaagatttgaagatcgattaaaacctttgccgcattcttcacatttgtagagtttctctccaacatgaattattttatgtgtagtaagagttgagagttgcttaaaagctttgccacattctaagcatttgtagcgtttctctccagtatgaattatcttatgtgtagtaagggttgaggactggctaaaagctttgccacattcttcacatttgtagggtttctctccagtgtgcatcctcttatgtctagttagtgttgaggaccatataaatgctttgcca

SEQ ID NO: 286235 - DNA, 465 bp, Homo sapiens
ggcatttgttcatttaaacgggctcctaggacgagaacccggggacgccaggcctcgcgggccggcctgggccacaggtgtccccggcgcggaggtcgcagcgccccggacccctctcacctttcgggtctgcggcgcccggggtctcccttcctctgcggctgcggcggctccggggcttcccagggcgcgggcccaggaggcgcggctgcgtcccagaagtgctactgtgacccctgaagcctttcttcccagagtggagaggatggggccaaattctaggaccttccacaaatctttattgagcaaagccctgttctgaacccgggacaactatggatgcagaggaagcctggtaaacaagcagacacaggatggtttgtggaacagcatagcccttcctctcttcgaccttcgctcttgacttctgcagacctctttcagaataaacaaaccctcaaacca

SEQ ID NO: 286236 - DNA, 529 bp, Homo sapiens
tccattttggacatggtaaatttgagatggctataattcatccaagtgtagatgtctagttgcagttgaatatatgagtctgaaatatggggagaggattgggctggagatgctctgtgggagtagagaaaggaggaaagtagaatggagaagaggccttaggcagagtccctagggaattctaacttttagagctaagactcaagaggattaagaagtgatgagtgagtagaaggaaaaagaagagggtgggggtgacaagacatcaacctccaacccacagaagtgctactgtgacccctgaagcctttcttcccagagtggagaggatggggccaaattctaggaccttccacaaatctttattgagcaaagccctgttctgaacccgggacaactatggatgcagaggaagcctggtaaacaagcagacacaggatggtttgtggaacagcatagcccttcctctcttcgaccttcgctcttgacttctgcagacctctttcagaataaacaaaccctcaaacca

SEQ ID NO: 286237 - DNA, 489 bp, Homo sapiens
cgctgagctggcgggcgggcagcccatctggcggcccccgcggggcggcgcggggaggcggcccagacttgctggagccaggcgccggcccgggggcccccctgcccgcctggagaacccagtcttgcccgtgtttggggtgactcagcttccctgcttgtgcaagaacagctgaactctgacctcctgaatggccgactcttgccttgctcctcagggaccccagacacgatcgtaggaaccggagattttatggaaagaagctgatattatttggagaatgaaaaaagaaagatgcacctagacaaaggcacatcaggccactgtgcagaagaacaagcatgctctagaagtgtatgtgctgctgtggaaacacctctaagaaataccgtagaaacccaatgtgcagaatgctccaagaatgccaccgtctgtgcaagaaaaagtatacacacatcagtgcacaggtgtctgaatgtctgtgtaaca

SEQ ID NO: 286238 - DNA, 284 bp, Homo sapiens
agagcagaactgtcttgtttttacctatttttgcacttccagattttatggaaagaagctgatattatttggagaatgaaaaaagaaagatgcacctagacaaaggcacatcaggccactgtgcagaagaacaagcatgctctagaagtgtatgtgctgctgtggaaacacctctaagaaataccgtagaaacccaatgtgcagaatgctccaagaatgccaccgtctgtgcaagaaaaagtatacacacatcagtgcacaggtgtctgaatgtctgtgtaaca

SEQ ID NO: 286239 - DNA, 604 bp, Homo sapiens
cccacgcgtccgcggacgcgtgggcccgcttgcacctcggcgatccccgactcccttctttatggcgtcgctcctgtgctgtgggccgaagctggccgcctgcggcatcgtcctcagcgcctggggagtgatcatgttgataatgctcggaatatttttcaatgtccattccgctgtgttgattgaggacgttcccttcacggagaaagattttgagaatggcccccagaacatatacaacctttacgagcaagtcagctacaactgtttcatcgctgcaggcctttacctcctcctcggaggcttctctttctgccaagttcggctcaataagcgcaaggaatacatggtgcgctagggccccggcgcgtttccccgctccagcccctcctctatttaaagactccctgcaccgtgtcacccaggtcgcgtcccacccttgccggcgccctctgtgggactgggtttcccgggcgagagactgaatcccttctcccatctctggcatccggcccccgtggagagggctgaggctggggggctgttccgtctctccacccttcgctgtgtcccgtatctcaataaagagaatctgctctcttca

SEQ ID NO: 286240 - DNA, 291 bp, Homo sapiens
ctcgaattcaagcttctaacgatgtacggggacatggtgcgctagggccccggcgcgtttccccgctccagcccctcctctatttaaagactccctgcaccgtgtcacccaggtcgcgtcccacccttgccggcgccctctgtgggactgggtttcccgggcgagagactgaatcccttctcccatctctggcatccggcccccgtggagagggctgaggctggggggctgttccgtctctccacccttcgctgtgtcccgtatctcaataaagagaatctgctctcttca

SEQ ID NO: 286241 - DNA, 779 bp, Homo sapiens
ctcgaattcaagcttctaacgatgtacggggacatggtgcgctagggccccggcgcgtttccccgctccagcccctcctctatttaaagactccctgcaccgtgtcacccaggtcgcgtcccacccttgccggcgccctctgtgggactgggtttcccgggcgagagactgaatcccttctcccatctctggcatccggcccccgtggagagggctgaggctggggggctgttccgtctctccacccttcgctgtgtcccgtatctcaataaagagaatctgctctcttcaaaaaaaaatcttatcaaacacaacctacacagcaccctcacatcagtcatacacaacactatacttttctcactcgacagtaaaacacagaacaaaaaatatttactctgaccagtccctacaacgctggaatacttgtttctattcgtagtgtcgcacgcctatgacttgctactcggtctatgtgctaacacatgaggagcaggcacgcgcgggcaggactcatacacatcatcagtcgtggtcgtctcagcggggtataacagtcatcactagtttacaacaagcgcggctcgagtactcttaaaacttgttattccattctcactcccataatatttcttattttgttttctacttaaatcttatcttctcatgtagtgctacctaatcttatattgattcgatatcttacaatctaatatctacctcctcccgattacgtcctgttaatattttagatcaccgattagcttactccttcctcc

SEQ ID NO: 286242 - DNA, 332 bp, Homo sapiens
tctccaccccaggcgtccgctctatttaaagactccctgcaccgtgtcccacagagggcgccggcaagggtgggacgcgacctgggtgacacggtgcagggagtctttaaatagaggaggggctggagcggggaaacgcgccggggccctagcgcaccatgtattccttgccggcgccctctgtgggactgggtttcccgggcgagagactgaatcccttctcccatctctggcatccggcccccgtggagagggctgaggctggggggctgttccgtctctccacccttcgctgtgtcccgtatctcaataaagagaatctgctctcttca

SEQ ID NO: 286243 - DNA, 486 bp, Homo sapiens
tacacgtaacagcgcctaaacaggtgtcgggcacatagtgctcagaaaatgttggctcctattaaagtttgacccctttgcttcattcccacccccaggaatggcccccagaacatatacaacctttacgagcaagtcagctacaactgtttcatcgctgcaggcctttacctcctcctcggaggcttctctttctgccaagttcggctcaataagcgcaaggaatacatggtgcgctagggccccggcgcgtttccccgctccagcccctcctctatttaaagactccctgcaccgtgtcacccaggtcgcgtcccacccttgccggcgccctctgtgggactgggtttcccgggcgagagactgaatcccttctcccatctctggcatccggcccccgtggagagggctgaggctggggggctgttccgtctctccacccttcgctgtgtcccgtatctcaataaagagaatctgctctcttca

SEQ ID NO: 286244 - DNA, 505 bp, Homo sapiens
tacacgtaacagcgcctaaacaggtgtcgggcacatagtgctcagaaaatgttggctcctattaaagtttgacccctttgcttcattcccacccccaggaatggcccccagaacatatacaacctttacgagcaagtcagctacaactgtttcatcgctgcaggcctttacctcctcctcggaggcttctctttctgccaagttcggctcaataagcgcaaggaatacatggtgcgctagggccccggcgcgtttccccgctccagcccctcctctatttaaagactccctgcaccgtgtcacccaggtcgcgtcccacccttgccggcgccctctgtgggactgggtttcccgggcgagagactgaatcccttctcccatctctggcatccggcccccgtggagagggctgaggctggggggctgttcccgttccctcgccagatcatttattgtgcaacgttcggcgggttcagtttttgaaataagagcttttgctatgctc

SEQ ID NO: 286245 - DNA, 448 bp, Homo sapiens
ccaggccaacctggccaacaaggattcagccggatcaacatctaccacaacactgccaaccacacttcagagttgttggagtccagttgcaggatcagcaggttgtgatccattattccattgttaaaaggcttaaggacaatcaggccacgccaaccttcccccagtggggaaaagcccgccaggtttacggctttaactttgcaagtaaagaagaggcaaccacgttctcctgctgagccttccacctctgacctctcactgttcatgccggacctgtggatctcctgggactccgagcaaggcctgcacgagagagggctgaaaggctgctggggctgccacctcgctattcccgcataagcatctgcccccaacccctttgaccttcatctgatggacatttttatacagaaaacaataaagatttccctctcaaaaaaaaaaa

SEQ ID NO: 286246 - DNA, 1770 bp, Homo sapiens
aattcgcggccgcgtcgacacggctggagaagacgacagaagggggagggcatcctgggctttctcccaccgctttccgagcccgcttgcacctcggcgatccccgactcccttctttatggcgtcgctcctgtgctgtgggccgaagctggccgcctgcggcatcgtcctcagcgcctggggagtgatcatgttgataatgctcggaatatttttcaatgtccattccgctgtgttgattgaggacgttcccttcacggagaaagattttgagaatggcccccagaacatatacaacctttacgagcaagtcagctacaactgtttcatcgctgcaggcctttacctcctcctcggaggcttctctttctgccaagttcggctcaataagcgcaaggaatacatggtgcgctagggccccggcgcgtttccccgctccagcccctcctctatttaaagactccctgcaccgtgtcacccaggtcgcgtcccacccttgccggcgccctctgtgggactgggtttcccgggcgagagactgaatcccttctcccatctctggcatccggcccccgtggagagggctgaggctggggggctgttccgtctctccacccttcgctgtgtcccgtatctcaataaagagaatctgctctcttcagccctgtgtctgtgcttgagtgggggcgagcacggggctgagactagaggtcggcctctgcctggaaagtcccgatctctgagcggaagtggagcgaagtgtggcgcggaagtgaggcgaaggctttccccatcgactgggcgcgccgagcggtctaagcgactgcgtctgatggggcggggagccgccgggttgagcctatccgctgcggggagggcgggacttcctgcgcgggggcccgagccgctcagtctccctgctctccgtggtcccggctcgcgtgtagcggcggcggcggcgtctccgtgaggaggcgcgcggggccatgacgtcagcgtccacaaaggtcggagagatcttctcggcggccggcgccgccttcacgaagctcggggagctgacgatgcagctgcatcccgtggccgactcttctcctgcgggcgcgaagtggacggagacggaaatagagatgctgagggctgctgtgaagcgatttggggacgatcttaatcacatcagctgtgtcatcaaggaacggacagtggcccagataaaggccactgtgaaacgcaaggtatatgaagattctggcatcccccttccagctgagtcacccaagaaagggcccaagaaggtggcatctggtgtcttgtcacctcctccagctgcccctcctcccagcagctccagtgtccctgaggccgggggtccccccataaagaaacagaaggctgatgtgacactcagtgctctgaacgactccgatgccaacagtgacgtggtggatattgaagggctaggagaaactcctccagctaagaaactcaacttcgaccaggcctgaccctggattctggccttctcatgacctctgctgatcctcctctcctctcctgctgagccttccacctctgacctctcactgttcatgccggacctgtggatctcctgggactccgagcaaggcctgcacgagagagggctgaaaggctgctggggctgccacctcgctattcccgcataagcatctgcccccaacccctttgaccttcatctgatggacatttttatacagaaaacaataaagatttccctctcaaaaaaaaaaa

SEQ ID NO: 286247 - DNA, 661 bp, Homo sapiens
aattcgcggccgcgtcgacacggctggagaagacgacagaagggggagggcatcctgggctttctcccaccgctttccgagcccgcttgcacctcggcgatccccgactcccttctttatggcgtcgctcctgtgctgtgggccgaagctggccgcctgcggcatcgtcctcagcgcctggggagtgatcatgttgataatgctcggaatatttttcaatgtccattccgctgtgttgattgaggacgttcccttcacggagaaagattttgagaatggcccccagaacatatacaacctttacgagcaagtcagctacaactgtttcatcgctgcaggcctttacctcctcctcggaggcttctctttctgccaagttcggctcaataagcgcaaggaatacatggtgcgctagggccccggcgcgtttccccgctccagcccctcctctatttaaagactccctgcaccgtgtcacccaggtcgcgtcccacccttgccggcgccctctgtgggactgggtttcccgggcgagagactgaatcccttctcccatctctggcatccggcccccgtggagagggctgaggctggggggctgttccgtctctccacccttcgctgtgtcccgtatctcaataaagagaatctgctctcttca

SEQ ID NO: 286248 - DNA, 1728 bp, Homo sapiens
caaaggacacatacttgcctccaccgagtcctacgatggcccgcttgcacctcggcgatccccgactcccttctttatggcgtcgctcctgtgctgtgggccgaagctggccgcctgcggcatcgtcctcagcgcctggggagtgatcatgttgataatgctcggaatatttttcaatgtccattccgctgtgttgattgaggacgttcccttcacggagaaagattttgagaatggcccccagaacatatacaacctttacgagcaagtcagctacaactgtttcatcgctgcaggcctttacctcctcctcggaggcttctctttctgccaagttcggctcaataagcgcaaggaatacatggtgcgctagggccccggcgcgtttccccgctccagcccctcctctatttaaagactccctgcaccgtgtcacccaggtcgcgtcccacccttgccggcgccctctgtgggactgggtttcccgggcgagagactgaatcccttctcccatctctggcatccggcccccgtggagagggctgaggctggggggctgttccgtctctccacccttcgctgtgtcccgtatctcaataaagagaatctgctctcttcagccctgtgtctgtgcttgagtgggggcgagcacggggctgagactagaggtcggcctctgcctggaaagtcccgatctctgagcggaagtggagcgaagtgtggcgcggaagtgaggcgaaggctttccccatcgactgggcgcgccgagcggtctaagcgactgcgtctgatggggcggggagccgccgggttgagcctatccgctgcggggagggcgggacttcctgcgcgggggcccgagccgctcagtctccctgctctccgtggtcccggctcgcgtgtagcggcggcggcggcgtctccgtgaggaggcgcgcggggccatgacgtcagcgtccacaaaggtcggagagatcttctcggcggccggcgccgccttcacgaagctcggggagctgacgatgcagctgcatcccgtggccgactcttctcctgcgggcgcgaagtggacggagacggaaatagagatgctgagggctgctgtgaagcgatttggggacgatcttaatcacatcagctgtgtcatcaaggaacggacagtggcccagataaaggccactgtgaaacgcaaggtatatgaagattctggcatcccccttccagctgagtcacccaagaaagggcccaagaaggtggcatctggtgtcttgtcacctcctccagctgcccctcctcccagcagctccagtgtccctgaggccgggggtccccccataaagaaacagaaggctgatgtgacactcagtgctctgaacgactccgatgccaacagtgacgtggtggatattgaagggctaggagaaactcctccagctaagaaactcaacttcgaccaggcctgaccctggattctggccttctcatgacctctgctgatcctcctctcctctcctgctgagccttccacctctgacctctcactgttcatgccggacctgtggatctcctgggactccgagcaaggcctgcacgagagagggctgaaaggctgctggggctgccacctcgctattcccgcataagcatctgcccccaacccctttgaccttcatctgatggacatttttatacagaaaacaataaagatttccctctcaaaaaaaaaaa

SEQ ID NO: 286249 - DNA, 1953 bp, Homo sapiens
aattcgcggccgcgtcgacacggctggagaagacgacagaagggggagggcatcctgggctttctcccaccgctttccgagcccgcttgcacctcggcgatccccgactcccttctttatggcgtcgctcctgtgctgtgggccgaagctggccgcctgcggcatcgtcctcagcgcctggggagtgatcatgttgataatgctcggaatatttttcaatgtccattccgctgtgttgattgaggacgttcccttcacggagaaagattttgagaatggcccccagaacatatacaacctttacgagcaagtcagctacaactgtttcatcgctgcaggcctttacctcctcctcggaggcttctctttctgccaagttcggctcaataagcgcaaggaatacatggtgcgctagggccccggcgcgtttccccgctccagcccctcctctatttaaagactccctgcaccgtgtcacccaggtcgcgtcccacccttgccggcgccctctgtgggactgggtttcccgggcgagagactgaatcccttctcccatctctggcatccggcccccgtggagagggctgaggctggggggctgttccgtctctccacccttcgctgtgtcccgtatctcaataaagagaatctgctctcttcagccctgtgtctgtgcttgagtgggggcgagcacggggctgagactagaggtcggcctctgcctggaaagtcccgatctctgagcggaagtggagcgaagtgtggcgcggaagtgaggcgaaggctttccccatcgactgggcgcgccgagcggtctaagcgactgcgtctgatggggcggggagccgccgggttgagcctatccgctgcggggagggcgggacttcctgcgcgggggcccgagccgctcagtctccctgctctccgtggtcccggctcgcgtgtagcggcggcggcggcgtctccgtgaggaggcgcgcggggccatgacgtcagcgtccacaaaggttcgacctccctcgcggacagcgctccctggcggccacgggagggcgggccccccacttggctcgcggctcttccgccccgggcggggggcgggcgggagccgagcctggggtggggctaggggctccgggcgggacggggagggcgggcgccggccccccgtgacgctgccccgcccccaggtcggagagatcttctcggcggccggcgccgccttcacgaagctcggggagctgacgatgcagctgcatcccgtggccgactcttctcctgcgggcgcgaagtggacggagacggaaatagagatgctgagggctgctgtgaagcgatttggggacgatcttaatcacatcagctgtgtcatcaaggaacggacagtggcccagataaaggccactgtgaaacgcaaggtatatgaagattctggcatcccccttccagctgagtcacccaagaaagggcccaagaaggtggcatctggtgtcttgtcacctcctccagctgcccctcctcccagcagctccagtgtccctgaggccgggggtccccccataaagaaacagaaggctgatgtgacactcagtgctctgaacgactccgatgccaacagtgacgtggtggatattgaagggctaggagaaactcctccagctaagaaactcaacttcgaccaggcctgaccctggattctggccttctcatgacctctgctgatcctcctctcctctcctgctgagccttccacctctgacctctcactgttcatgccggacctgtggatctcctgggactccgagcaaggcctgcacgagagagggctgaaaggctgctggggctgccacctcgctattcccgcataagcatctgcccccaacccctttgaccttcatctgatggacatttttatacagaaaacaataaagatttccctctcaaaaaaaaaaa

SEQ ID NO: 286250 - DNA, 2618 bp, Homo sapiens
cccacgcgtccgcggacgcgtgggcccgcttgcacctcggcgatccccgactcccttctttatggcgtcgctcctgtgctgtgggccgaagctggccgcctgcggcatcgtcctcagcgcctggggagtgatcatgttggtgaggggactccccggcaaggatcggagagggcctgaggggctccgggctgggagggctgggaggcgaggaaactctgggccgcaggcaggccggaggggccggggatctacaggccccggagaaggagacagactgaaattgaaaaatgggaactgttcgagaccagcctgaccaacatggtgaaaccccgtctccaataaaaatacaaaaattagccgggcgtggtggcgcccgcctgtaatcccagctactcaggaggctgaggcaggagaatcgcttgaatccgggaggcggagggtgcagtgagccgagatcgcgccactgcactccagcctgggtgacagagcgagactccgtccccaaagaaaaagaaaaaagggaactggagcggagggccctggagtgggaggagccagggctggtaaaggtggagacccctcaaggtaggagaaacaagagcggggttcctgagaggtgcttgagttgaatggaggacatgggaggaaaagagagtgcttgttccagaaatgtgtagctgggccttgttttcccaggtaatccacccaccgccacttcaagaagaaatgatatgaagaagtgccggttctccctcccctcttccgcactgtcccgtgatgatgacgcctccagagaggacgataatctgggttcctgggagagatggcttggtcactattcccacccttgcctcgaccacttgtctcaatgtcaccacctcacgccctgttccaggtggctgagtccgaatccagtaaccaccacctcgttttggttaatctcaggctcgggtgttgtagcaacattggaaatgggaggggtttacgaagtgaacatgaggtcaggtgcctgaattcaacagtctacccattccccttttccagataatgctcggaatatttttcaatgtccattccgctgtgttgattgaggacgttcccttcacggagaaagattttgagaatggcccccagaacatatacaacctttacgagcaagtcagctacaactgtttcatcgctgcaggcctttacctcctcctcggaggcttctctttctgccaagttcggctcaataagcgcaaggaatacatggtgcgctagggccccggcgcgtttccccgctccagcccctcctctatttaaagactccctgcaccgtgtcacccaggtcgcgtcccacccttgccggcgccctctgtgggactgggtttcccgggcgagagactgaatcccttctcccatctctggcatccggcccccgtggagagggctgaggctggggggctgttccgtctctccacccttcgctgtgtcccgtatctcaataaagagaatctgctctcttcagccctgtgtctgtgcttgagtgggggcgagcacggggctgagactagaggtcggcctctgcctggaaagtcccgatctctgagcggaagtggagcgaagtgtggcgcggaagtgaggcgaaggctttccccatcgactgggcgcgccgagcggtctaagcgactgcgtctgatggggcggggagccgccgggttgagcctatccgctgcggggagggcgggacttcctgcgcgggggcccgagccgctcagtctccctgctctccgtggtcccggctcgcgtgtagcggcggcggcggcgtctccgtgaggaggcgcgcggggccatgacgtcagcgtccacaaaggtcggagagatcttctcggcggccggcgccgccttcacgaagctcggggagctgacgatgcagctgcatcccgtggccgactcttctcctgcgggcgcgaagtggacggagacggaaatagagatgctgagggctgctgtgaagcgatttggggacgatcttaatcacatcagctgtgtcatcaaggaacggacagtggcccagataaaggccactgtgaaacgcaaggtatatgaagattctggcatcccccttccagctgagtcacccaagaaagggcccaagaaggtggcatctggtgtcttgtcacctcctccagctgcccctcctcccagcagctccagtgtccctgaggccgggggtccccccataaagaaacagaaggctgatgtgacactcagtgctctgaacgactccgatgccaacagtgacgtggtggatattgaagggctaggagaaactcctccagctaagaaactcaacttcgaccaggcctgaccctggattctggccttctcatgacctctgctgatcctcctctcctctcctgctgagccttccacctctgacctctcactgttcatgccggacctgtggatctcctgggactccgagcaaggcctgcacgagagagggctgaaaggctgctggggctgccacctcgctattcccgcataagcatctgcccccaacccctttgaccttcatctgatggacatttttatacagaaaacaataaagatttccctctcaaaaaaaaaaa

SEQ ID NO: 286251 - DNA, 1667 bp, Homo sapiens
aattcgcggccgcgtcgacacggctggagaagacgacagaagggggagggcatcctgggctttctcccaccgctttccgagcccgcttgcacctcggcgatccccgactcccttctttatggcgtcgctcctgtgctgtgggccgaagctggccgcctgcggcatcgtcctcagcgcctggggagtgatcatgttgataatgctcggaatatttttcaatgtccattccgctgtgttgattgaggacgttcccttcacggagaaagattttgagaatggcccccagaacatatacaacctttacgagcaagtcagctacaactgtttcatcgctgcaggcctttacctcctcctcggaggcttctctttctgccaagttcggctcaataagcgcaaggaatacatggtgcgctagggccccggcgcgtttccccgctccagcccctcctctatttaaagactccctgcaccgtgtcacccaggtcgcgtcccacccttgccggcgccctctgtgggactgggtttcccgggcgagagactgaatcccttctcccatctctggcatccggcccccgtggagagggctgaggctggggggctgttccgtctctccacccttcgctgtgtcccgtatctcaataaagagaatctgctctcttcagccctgtgtctgtgcttgagtgggggcgagcacggggctgagactagaggtcggcctctgcctggaaagtcccgatctctgagcggaagtggagcgaagtgtggcgcggaagtgaggcgaaggctttccccatcgactgggcgcgccgagcggtctaagcgactgcgtctgatggggcggggagccgccgggttgagcctatccgctgcggggagggcgggacttcctgcgcgggggcccgagccgctcagtctccctgctctccgtggtcccggctcgcgtgtagcggcggcggcggcgtctccgtgaggaggcgcgcggggccatgacgtcagcgtccacaaaggtcggagagatcttctcggcggccggcgccgccttcacgaagctcggggagctgacgatgcagctgcatcccgtggccgactcttctcctgcggggcccagataaaggccactgtgaaacgcaaggtatatgaagattctggcatcccccttccagctgagtcacccaagaaagggcccaagaaggtggcatctggtgtcttgtcacctcctccagctgcccctcctcccagcagctccagtgtccctgaggccgggggtccccccataaagaaacagaaggctgatgtgacactcagtgctctgaacgactccgatgccaacagtgacgtggtggatattgaagggctaggagaaactcctccagctaagaaactcaacttcgaccaggcctgaccctggattctggccttctcatgacctctgctgatcctcctctcctctcctgctgagccttccacctctgacctctcactgttcatgccggacctgtggatctcctgggactccgagcaaggcctgcacgagagagggctgaaaggctgctggggctgccacctcgctattcccgcataagcatctgcccccaacccctttgaccttcatctgatggacatttttatacagaaaacaataaagatttccctctcaaaaaaaaaaa

SEQ ID NO: 286252 - DNA, 2469 bp, Homo sapiens
cccacgcgtccgcggacgcgtgggcccgcttgcacctcggcgatccccgactcccttctttatggcgtcgctcctgtgctgtgggccgaagctggccgcctgcggcatcgtcctcagcgcctggggagtgatcatgttggtgaggggactccccggcaaggatcggagagggcctgaggggctccgggctgggagggctgggaggcgaggaaactctgggccgcaggcaggccggaggggccggggatctacaggccccggagaaggagacagactgaaattgaaaaatgggaactgttcgagaccagcctgaccaacatggtgaaaccccgtctccaataaaaatacaaaaattagccgggcgtggtggcgcccgcctgtaatcccagctactcaggaggctgaggcaggagaatcgcttgaatccgggaggcggagggtgcagtgagccgagatcgcgccactgcactccagcctgggtgacagagcgagactccgtccccaaagaaaaagaaaaaagggaactggagcggagggccctggagtgggaggagccagggctggtaaaggtggagacccctcaaggtaggagaaacaagagcggggttcctgagaggtgcttgagttgaatggaggacatgggaggaaaagagagtgcttgttccagaaatgtgtagctgggccttgttttcccaggtaatccacccaccgccacttcaagaagaaatgatatgaagaagtgccggttctccctcccctcttccgcactgtcccgtgatgatgacgcctccagagaggacgataatctgggttcctgggagagatggcttggtcactattcccacccttgcctcgaccacttgtctcaatgtcaccacctcacgccctgttccagataatgctcggaatatttttcaatgtccattccgctgtgttgattgaggacgttcccttcacggagaaagattttgagaatggcccccagaacatatacaacctttacgagcaagtcagctacaactgtttcatcgctgcaggcctttacctcctcctcggaggcttctctttctgccaagttcggctcaataagcgcaaggaatacatggtgcgctagggccccggcgcgtttccccgctccagcccctcctctatttaaagactccctgcaccgtgtcacccaggtcgcgtcccacccttgccggcgccctctgtgggactgggtttcccgggcgagagactgaatcccttctcccatctctggcatccggcccccgtggagagggctgaggctggggggctgttccgtctctccacccttcgctgtgtcccgtatctcaataaagagaatctgctctcttcagccctgtgtctgtgcttgagtgggggcgagcacggggctgagactagaggtcggcctctgcctggaaagtcccgatctctgagcggaagtggagcgaagtgtggcgcggaagtgaggcgaaggctttccccatcgactgggcgcgccgagcggtctaagcgactgcgtctgatggggcggggagccgccgggttgagcctatccgctgcggggagggcgggacttcctgcgcgggggcccgagccgctcagtctccctgctctccgtggtcccggctcgcgtgtagcggcggcggcggcgtctccgtgaggaggcgcgcggggccatgacgtcagcgtccacaaaggtcggagagatcttctcggcggccggcgccgccttcacgaagctcggggagctgacgatgcagctgcatcccgtggccgactcttctcctgcgggcgcgaagtggacggagacggaaatagagatgctgagggctgctgtgaagcgatttggggacgatcttaatcacatcagctgtgtcatcaaggaacggacagtggcccagataaaggccactgtgaaacgcaaggtatatgaagattctggcatcccccttccagctgagtcacccaagaaagggcccaagaaggtggcatctggtgtcttgtcacctcctccagctgcccctcctcccagcagctccagtgtccctgaggccgggggtccccccataaagaaacagaaggctgatgtgacactcagtgctctgaacgactccgatgccaacagtgacgtggtggatattgaagggctaggagaaactcctccagctaagaaactcaacttcgaccaggcctgaccctggattctggccttctcatgacctctgctgatcctcctctcctctcctgctgagccttccacctctgacctctcactgttcatgccggacctgtggatctcctgggactccgagcaaggcctgcacgagagagggctgaaaggctgctggggctgccacctcgctattcccgcataagcatctgcccccaacccctttgaccttcatctgatggacatttttatacagaaaacaataaagatttccctctcaaaaaaaaaaa

SEQ ID NO: 286253 - DNA, 1523 bp, Homo sapiens
agcgatctagaggatcccaagaggctgaatggcccccagaacatatacaacctttacgagcaagtcagctacaactgtttcatcgctgcaggcctttacctcctcctcggaggcttctctttctgccaagttcggctcaataagcgcaaggaatacatggtgcgctagggccccggcgcgtttccccgctccagcccctcctctatttaaagactccctgcaccgtgtcacccaggtcgcgtcccacccttgccggcgccctctgtgggactgggtttcccgggcgagagactgaatcccttctcccatctctggcatccggcccccgtggagagggctgaggctggggggctgttccgtctctccacccttcgctgtgtcccgtatctcaataaagagaatctgctctcttcagccctgtgtctgtgcttgagtgggggcgagcacggggctgagactagaggtcggcctctgcctggaaagtcccgatctctgagcggaagtggagcgaagtgtggcgcggaagtgaggcgaaggctttccccatcgactgggcgcgccgagcggtctaagcgactgcgtctgatggggcggggagccgccgggttgagcctatccgctgcggggagggcgggacttcctgcgcgggggcccgagccgctcagtctccctgctctccgtggtcccggctcgcgtgtagcggcggcggcggcgtctccgtgaggaggcgcgcggggccatgacgtcagcgtccacaaaggtcggagagatcttctcggcggccggcgccgccttcacgaagctcggggagctgacgatgcagctgcatcccgtggccgactcttctcctgcgggcgcgaagtggacggagacggaaatagagatgctgagggctgctgtgaagcgatttggggacgatcttaatcacatcagctgtgtcatcaaggaacggacagtggcccagataaaggccactgtgaaacgcaaggtatatgaagattctggcatcccccttccagctgagtcacccaagaaagggcccaagaaggtggcatctggtgtcttgtcacctcctccagctgcccctcctcccagcagctccagtgtccctgaggccgggggtccccccataaagaaacagaaggctgatgtgacactcagtgctctgaacgactccgatgccaacagtgacgtggtggatattgaagggctaggagaaactcctccagctaagaaactcaacttcgaccaggcctgaccctggattctggccttctcatgacctctgctgatcctcctctcctctcctgctgagccttccacctctgacctctcactgttcatgccggacctgtggatctcctgggactccgagcaaggcctgcacgagagagggctgaaaggctgctggggctgccacctcgctattcccgcataagcatctgcccccaacccctttgaccttcatctgatggacatttttatacagaaaacaataaagatttccctctcaaaaaaaaaaa

SEQ ID NO: 286254 - DNA, 1807 bp, Homo sapiens
  misc_feature (1777)..(1777): n is a, c, g, or t
aattcgcggccgcgtcgacacggctggagaagacgacagaagggggagggcatcctgggctttctcccaccgctttccgagcccgcttgcacctcggcgatccccgactcccttctttatggcgtcgctcctgtgctgtgggccgaagctggccgcctgcggcatcgtcctcagcgcctggggagtgatcatgttgataatgctcggaatatttttcaatgtccattccgctgtgttgattgaggacgttcccttcacggagaaagattttgagaatggcccccagaacatatacaacctttacgagcaagtcagctacaactgtttcatcgctgcaggcctttacctcctcctcggaggcttctctttctgccaagttcggctcaataagcgcaaggaatacatggtgcgctagggccccggcgcgtttccccgctccagcccctcctctatttaaagactccctgcaccgtgtcacccaggtcgcgtcccacccttgccggcgccctctgtgggactgggtttcccgggcgagagactgaatcccttctcccatctctggcatccggcccccgtggagagggctgaggctggggggctgttccgtctctccacccttcgctgtgtcccgtatctcaataaagagaatctgctctcttcagccctgtgtctgtgcttgagtgggggcgagcacggggctgagactagaggtcggcctctgcctggaaagtcccgatctctgagcggaagtggagcgaagtgtggcgcggaagtgaggcgaaggctttccccatcgactgggcgcgccgagcggtctaagcgactgcgtctgatggggcggggagccgccgggttgagcctatccgctgcggggagggcgggacttcctgcgcgggggcccgagccgctcagtctccctgctctccgtggtcccggctcgcgtgtagcggcggcggcggcgtctccgtgaggaggcgcgcggggccatgacgtcagcgtccacaaaggtcggagagatcttctcggcggccggcgccgccttcacgaagctcggggagctgacgatgcagctgcatcccgtggccgactcttctcctgcgggcgcgaagtggacggagacggaaatagagatgctgagggctgctgtgaagcgatttggggacgatcttaatcacatcagctgtgtcatcaaggaacggacagtggcccagataaaggccactgtgaaacgcaaggtatatgaagattctggcatcccccttccagctgagtcacccaagaaagggcccaagaaggtggcatctggtgtcttgtcacctcctccagctgcccctcctcccagcagctccagtgtccctgaggccgggggtccccccataaagaaacagaaggctgatgtgacactcagtgctctgaacgactccgatgccaacagtgacgtggtggatattgaagggctaggagaaactcctccagctaagaaactcaacttcgaccaggcctgaccctggattctggccttctcatgacctctgctgatcctcctctcctctcctgctgagccttccacctctgacctctcactgttcatgccggacctgtggatctcctgggactccgagcaaggcctgcacgagagagggctgaaaggctgctggggctgccacctcgctattcccgcataagcatctgcccccaacccctttgaccttcatctgatggacatttttatacagaaaacaataaagatttccctctcaaaaaaaaaaataaaaancgacaacaggaaaacaactcccacatatta

SEQ ID NO: 286255 - DNA, 1109 bp, Homo sapiens
cccacgcgtccgcggacgcgtgggcccgcttgcacctcggcgatccccgactcccttctttatggcgtcgctcctgtgctgtgggccgaagctggccgcctgcggcatcgtcctcagcgcctggggagtgatcatgttgataatgctcggaatatttttcaatgtccattccgctgtgttgattgaggacgttcccttcacggagaaagattttgagaatggcccccagaacatatacaacctttacgagcaagtcagctacaactgtttcatcgctgcaggcctttacctcctcctcggaggcttctctttctgccaagttcggctcaataagcgcaaggaataggtcggagagatcttctcggcggccggcgccgccttcacgaagctcggggagctgacgatgcagctgcatcccgtggccgactcttctcctgcgggcgcgaagtggacggagacggaaatagagatgctgagggctgctgtgaagcgatttggggacgatcttaatcacatcagctgtgtcatcaaggaacggacagtggcccagataaaggccactgtgaaacgcaaggtatatgaagattctggcatcccccttccagctgagtcacccaagaaagggcccaagaaggtggcatctggtgtcttgtcacctcctccagctgcccctcctcccagcagctccagtgtccctgaggccgggggtccccccataaagaaacagaaggctgatgtgacactcagtgctctgaacgactccgatgccaacagtgacgtggtggatattgaagggctaggagaaactcctccagctaagaaactcaacttcgaccaggcctgaccctggattctggccttctcatgacctctgctgatcctcctctcctctcctgctgagccttccacctctgacctctcactgttcatgccggacctgtggatctcctgggactccgagcaaggcctgcacgagagagggctgaaaggctgctggggctgccacctcgctattcccgcataagcatctgcccccaacccctttgaccttcatctgatggacatttttatacagaaaacaataaagatttccctctcaaaaaaaaaaa

SEQ ID NO: 286256 - DNA, 1609 bp, Homo sapiens
aattcgcggccgcgtcgacacggctggagaagacgacagaagggggagggcatcctgggctttctcccaccgctttccgagcccgcttgcacctcggcgatccccgactcccttctttatggcgtcgctcctgtgctgtgggccgaagctggccgcctgcggcatcgtcctcagcgcctggggagtgatcatgttgataatgctcggaatatttttcaatgtccattccgctgtgttgattgaggacgttcccttcacggagaaagattttgagaatggcccccagaacatatacaacctttacgagcaagtcagctacaactgtttcatcgctgcaggcctttacctcctcctcggaggcttctctttctgccaagttcggctcaataagcgcaaggaatacatggtgcgctagggccccggcgcgtttccccgctccagcccctcctctatttaaagactccctgcaccgtgtcacccaggtcgcgtcccacccttgccggcgccctctgtgggactgggtttcccgggcgagagactgaatcccttctcccatctctggcatccggcccccgtggagagggctgaggctggggggctgttccgtctctccacccttcgctgtgtcccgtatctcaataaagagaatctgctctcttcagccctgtgtctgtgcttgagtgggggcgagcacggggctgagactagaggtcggcctctgcctggaaagtcccgatctctgagcggaagtggagcgaagtgtggcgcggaagtgaggcgaaggctttccccatcgactgggcgcgccgagcggtctaagcgactgcgtctgatggggcggggagccgccgggttgagcctatccgctgcggggagggcgggacttcctgcgcgggggcccgagccgctcagtctccctgctctccgtggtcccggctcgcgtgtagcggcggcggcggcgtctccgtgaggaggcgcgcggggccatgacgtcagcgtccacaaaggtcggagagatcttctcggcggccggcgccgccttcacgaagctcggggagctgacgatgcagctgcatcccgtggccgactcttctcctgcgggcgcgaagtggacggagacggaaatagagatgctgagggctgctgtgaagcgatttggggacgatcttaatcacatcagctgtgtcatcaaggaacggacagtggcccagataaaggccactgtgaaacgcaagtgtgacactcagtgctctgaacgactccgatgccaacagtgacgtggtggatattgaagggctaggagaaactcctccagctaagaaactcaacttcgaccaggcctgaccctggattctggccttctcatgacctctgctgatcctcctctcctctcctgctgagccttccacctctgacctctcactgttcatgccggacctgtggatctcctgggactccgagcaaggcctgcacgagagagggctgaaaggctgctggggctgccacctcgctattcccgcataagcatctgcccccaacccctttgaccttcatctgatggacatttttatacagaaaacaataaagatttccctctcaaaaaaaaaaa

SEQ ID NO: 286257 - DNA, 2018 bp, Homo sapiens
aattcgcggccgcgtcgacacggctggagaagacgacagaagggggagggcatcctgggctttctcccaccgctttccgagcccgcttgcacctcggcgatccccgactcccttctttatggcgtcgctcctgtgctgtgggccgaagctggccgcctgcggcatcgtcctcagcgcctggggagtgatcatgttgataatgctcggaatatttttcaatgtccattccgctgtgttgattgaggacgttcccttcacggagaaagattttgagaatggcccccagaacatatacaacctttacgagcaagtcagctacaactgtttcatcgctgcaggcctttacctcctcctcggaggcttctctttctgccaagttcggctcaataagcgcaaggaatacatggtgcgctagggccccggcgcgtttccccgctccagcccctcctctatttaaagactccctgcaccgtgtcacccaggtcgcgtcccacccttgccggcgccctctgtgggactgggtttcccgggcgagagactgaatcccttctcccatctctggcatccggcccccgtggagagggctgaggctggggggctgttccgtctctccacccttcgctgtgtcccgtatctcaataaagagaatctgctctcttcagccctgtgtctgtgcttgagtgggggcgagcacggggctgagactagaggtcggcctctgcctggaaagtcccgatctctgagcggaagtggagcgaagtgtggcgcggaagtgaggcgaaggctttccccatcgactgggcgcgccgagcggtctaagcgactgcgtctgatggggcggggagccgccgggttgagcctatccgctgcggggagggcgggacttcctgcgcgggggcccgagccgctcagtctccctgctctccgtggtcccggctcgcgtgtagcggcggcggcggcgtctccgtgaggaggcgcgcggggccatgacgtcagcgtccacaaaggtcggagagatcttctcggcggccggcgccgccttcacgaagctcggggagctgacgatgcagctgcatcccgtggccgactcttctcctgcgggcgcgaagtggacggagacggaaatagagatgctgagggctgctgtgaagcgatttggggacgatcttaatcacatcagctgtgtcatcaaggaacggacagtggcccagataaaggccactgtgaaacgcaaggtatatgaagattctggcatcccccttccagctgagtcacccaagaaagggcccaagaaggtggcatctggtgtcttgtcacctcctccagctgcccctcctcccagcagctccagtgtccctgaggccgggggtccccccataaagaaacagaaggctgatgtgacactcagtgctctgaacgactccgatgccaacagtgacgtggtggatattgaagggctaggagaaactcctccagctaagaaactcaacttcgaccagccagggtaggagtcctcctcctcccacacagctgacggggttggggagaaagggctcacctggatggcagggcacggtctccgcaggggcccctcccttgtataggggtttcagaagagaaggtgctctcatacacagcgcagggcattggatcagtacgtagcagggtgtttcagggaggtgggagtggccttggaagcacactgggggctcgctccatctcggcccattttacttcctgttccagagcctgaccctggattctggccttctcatgacctctgctgatcctcctctcctctcctgctgagccttccacctctgacctctcactgttcatgccggacctgtggatctcctgggactccgagcaaggcctgcacgagagagggctgaaaggctgctggggctgccacctcgctattcccgcataagcatctgcccccaacccctttgaccttcatctgatggacatttttatacagaaaacaataaagatttccctctcaaaaaaaaaaa

SEQ ID NO: 286258 - DNA, 2721 bp, Homo sapiens
  misc_feature (2631)..(2631): n is a, c, g, or t
  misc_feature (2694)..(2694): n is a, c, g, or t
aattcgcggccgcgtcgacacggctggagaagacgacagaagggggagggcatcctgggctttctcccaccgctttccgagcccgcttgcacctcggcgatccccgactcccttctttatggcgtcgctcctgtgctgtgggccgaagctggccgcctgcggcatcgtcctcagcgcctggggagtgatcatgttgataatgctcggaatatttttcaatgtccattccgctgtgttgattgaggacgttcccttcacggagaaagattttgagaatggcccccagaacatatacaacctttacgagcaagtcagctacaactgtttcatcgctgcaggcctttacctcctcctcggaggcttctctttctgccaagttcggctcaataagcgcaaggaatacatggtgcgctagggccccggcgcgtttccccgctccagcccctcctctatttaaagactccctgcaccgtgtcacccaggtcgcgtcccacccttgccggcgccctctgtgggactgggtttcccgggcgagagactgaatcccttctcccatctctggcatccggcccccgtggagagggctgaggctggggggctgttccgtctctccacccttcgctgtgtcccgtatctcaataaagagaatctgctctcttcagccctgtgtctgtgcttgagtgggggcgagcacggggctgagactagaggtcggcctctgcctggaaagtcccgatctctgagcggaagtggagcgaagtgtggcgcggaagtgaggcgaaggctttccccatcgactgggcgcgccgagcggtctaagcgactgcgtctgatggggcggggagccgccgggttgagcctatccgctgcggggagggcgggacttcctgcgcgggggcccgagccgctcagtctccctgctctccgtggtcccggctcgcgtgtagcggcggcggcggcgtctccgtgaggaggcgcgcggggccatgacgtcagcgtccacaaaggtcggagagatcttctcggcggccggcgccgccttcacgaagctcggggagctgacgatgcagctgcatcccgtggccgactcttctcctgcgggcgcgaagtggacggagacggaaatagagatgctgagggctgctgtgaagcgatttggggacgatcttaatcacatcagctgtgtcatcaaggaacggacagtggcccagataaaggccactgtgaaacgcaaggtatatgaagattctggcatcccccttccagctgagtcacccaagaaagggcccaagaaggtggcatctggtgtcttgtcacctcctccagctgcccctcctcccagcagctccagtgtccctgaggccgggggtccccccataaagaaacagaaggctgagcctgaccctggattctggccttctcatgacctctgctgatcctcctctcctctcctgctgagccttccacctctgacctctcactgttcatgccggacctgtggatctcctgggactccgagcaaggcctgcacgagagagggctgaaaggctgctggggctgccacctcgctattcccgcataagcatctgcccccaacccctttgaccttcatctgatggacatttttatacagaaaacaataaagatttccctctcaaaaaaaaaaaaaaaaaaaaaaaaaaaaaaaaaaaaaaaaaaaaaaaaaaaaaaaataaaaaaaataacaatgcgcccgcatttcgagttaattggcccaattccccctattgagagtcggtttacaatttatggccctttgtttaacaacgccttaacgggaaaacccctgacgtcccccacctaaagcgctttgagaaaatcccgcttttccctgttgccgcaccaccaaggagccccccccggatcccctttctaaacagttgggcaaccaaaaacgcctatccaattggtaggcctttaaaattgggtccaaacccggggttatatcttggaaaaatccgcccattcttttaccgataaagccgaaaggggacaaatccctttataaacacctggataacccctggttaggtctgcgggttgtctcccatctgggtccaagagtccccttattacatgacggggcgtctcaaattcaaaggggcgaaaaacccgcctctttatgccgaatgggccacctagagggacctcatctcctcaaaacacggttctcttgggacagggcgccactaaaggctcttaatgggcgacctacaagttggtccccctttaacgccttacatgttttatgccgccccaccggcgcgaaaccctatatttctctacaaggagccgcctcttattgactctcctctccaaacacgccgacccttgtcgtgatacaacacacacgtgccgcttctacagtcgccggtacaccggcgctctctaaacagacattttcccttctgtcttcgccacatactcctcctctcggcttttttcgtgcggtcactatcgaggtcttctctacaacagtaggctgctctctacacaatcgttcaggactcctctctactatctccgccatcgtcatactcgttgtggcccttcatacatcatctctttccgccactattatatagacgcgtntctcactaccgctctcgggctcacgtactctctcttgctcacttacgtctcgccacagcgtcntctctcgcctctttcttctcctgctct

SEQ ID NO: 286259 - DNA, 859 bp, Homo sapiens
aattcgcggccgcgtcgacacggctggagaagacgacagaagggggagggcatcctgggctttctcccaccgctttccgagcccgcttgcacctcggcgatccccgactcccttctttatggcgtcgctcctgtgctgtgggccgaagctggccgcctgcggcatcgtcctcagcgcctggggagtgatcatgttgtaatccacccaccgccacttcaagaagaaatgatatgaagaagtgccggttctccctcccctcttccgcactgtcccgtgatgatgacgcctccagagaggacgataatctgggttcctgggagagatggcttggtcactattcccacccttgcctcgaccacttgtctcaatgtcaccacctcacgccctgttccagataatgctcggaatatttttcaatgtccattccgctgtgttgattgaggacgttcccttcacggagaaagattttgagaatggcccccagaacatatacaacctttacgagcaagtcagctacaactgtttcatcgctgcaggcctttacctcctcctcggaggcttctctttctgccaagttcggctcaataagcgcaaggaatacatggtgcgctagggccccggcgcgtttccccgctccagcccctcctctatttaaagactccctgcaccgtgtcacccaggtcgcgtcccacccttgccggcgccctctgtgggactgggtttcccgggcgagagactgaatcccttctcccatctctggcatccggcccccgtggagagggctgaggctggggggctgttccgtctctccacccttcgctgtgtcccgtatctcaataaagagaatctgctctcttca

SEQ ID NO: 286260 - DNA, 1815 bp, Homo sapiens
aattcgcggccgcgtcgacacggctggagaagacgacagaagggggagggcatcctgggctttctcccaccgctttccgagcccgcttgcacctcggcgatccccgactcccttctttatggcgtcgctcctgtgctgtgggccgaagctggccgcctgcggcatcgtcctcagcgcctggggagtgatcatgttgataatgctcggaatatttttcaatgtccattccgctgtgttgattgaggacgttcccttcacggagaaagattttgagaatggcccccagaacatatacaacctttacgagcaagtcagctacaactgtttcatcgctgcaggcctttacctcctcctcggaggcttctctttctgccaagttcggctcaataagcgcaaggaatacatggtgcgctagggccccggcgcgtttccccgctccagcccctcctctatttaaagactccctgcaccgtgtcacccaggtcgcgtcccacccttgccggcgccctctgtgggactgggtttcccgggcgagagactgaatcccttctcccatctctggcatccggcccccgtggagagggctgaggctggggggctgttccgtctctccacccttcgctgtgtcccgtatctcaataaagagaatctgctctcttcagccctgtgtctgtgcttgagtgggggcgagcacggggctgagactagaggtcggcctctgcctggaaagtcccgatctctgagcggaagtggagcgaagtgtggcgcggaagtgaggcgaaggctttccccatcgactgggcgcgccgagcggtctaagcgactgcgtctgatggggcggggagccgccgggttgagcctatccgctgcggggagggcgggacttcctgcgcgggggcccgagccgctcagtctccctgctctccgtggtcccggctcgcgtgtagcggcggcggcggcgtctccgtgaggaggcgcgcggggccatgacgtcagcgtccacaaaggttcgacctccctcgcggacagcgctccctggcggccacgggagggcgggccccccacttggctcgcggctcttccgccccgggcggggggcgggcgggagccgagcctggggtggggctaggggctccgggcgggacggggagggcgggcgccggccccccgtgacgctgccccgcccccaggtcggagagatcttctcggcggccggcgccgccttcacgaagctcggggagctgacgatgcagctgcatcccgtggccgactcttctcctgcgggcgcgaagtggacggagacggaaatagagatgctgagggctgctgtgaagcgatttggggacgatcttaatcacatcagctgtgtcatcaaggaacggacagtggcccagataaaggccactgtgaaacgcaagtgtgacactcagtgctctgaacgactccgatgccaacagtgacgtggtggatattgaagggctaggagaaactcctccagctaagaaactcaacttcgaccaggcctgaccctggattctggccttctcatgacctctgctgatcctcctctcctctcctgctgagccttccacctctgacctctcactgttcatgccggacctgtggatctcctgggactccgagcaaggcctgcacgagagagggctgaaaggctgctggggctgccacctcgctattcccgcataagcatctgcccccaacccctttgaccttcatctgatggacatttttatacagaaaacaataaagatttccctctcaaaaaaaaaaagcttcgtgctgtctgcttaacat

SEQ ID NO: 286261 - DNA, 1202 bp, Homo sapiens
aattcgcggccgcgtcgacacggctggagaagacgacagaagggggagggcatcctgggctttctcccaccgctttccgagcccgcttgcacctcggcgatccccgactcccttctttatggcgtcgctcctgtgctgtgggccgaagctggccgcctgcggcatcgtcctcagcgcctggggagtgatcatgttgataatgctcggaatatttttcaatgtccattccgctgtgttgattgaggacgttcccttcacggagaaagattttgagaatggcccccagaacatatacaacctttacgagcaagtcagctacaactgtttcatcgctgcaggcctttacctcctcctcggaggcttctctttctgccaagttcggctcaataagcgcaaggaatacatggtgcgctagggccccggcgcgtttccccgctccagcccctcctctatttaaagactccctgcaccgtgtcacccaggtcgcgtcccacccttgccggcgccctctgtgggactgggtttcccgggcgagagactgaatcccttctcccatctctggcatccggcccccgtggagagggctgaggctggggggctgttccgtctctccacccttcgctgtgtcccgtatctcaataaagagaatctgctctcttcattctcttaaacaaaaaaaaaaaaaaaaaaaaaacaacaaaagtttgtgggcgcgctatcgacccctaaaaaaaagtttttcagacaccccactcgtgcttggggggcgggggcccaagtggtttatgtgccaccctgggcccaagcggggtcccaaggaaaccgggccccagaacatggggtgctggttttctccacccaaaaaaaagcgcgcggcggcaccccgcgcggtctagacaaccccagggggcgctctggcgactcgtgccgaacctctacggcccagcaagccagatgcatccctgcacggccgggggagtgggggaaacagagctcagcacagacaagacgagcaaccacgaggcagatggcagacggacgacagcagacccgaataggatcaggatagcagcacaacgataacgagcaaaggaaacgagaatacaagacgagatcaggagcagacaatagctggagatacacacagccgagtacacgagacgcaagagacatcgaacgaaagaacatggaggacacacgtg

SEQ ID NO: 286262 - DNA, 1149 bp, Homo sapiens
aattcgcggccgcgtcgacacggctggagaagacgacagaagggggagggcatcctgggctttctcccaccgctttccgagcccgcttgcacctcggcgatccccgactcccttctttatggcgtcgctcctgtgctgtgggccgaagctggccgcctgcggcatcgtcctcagcgcctggggagtgatcatgttgataatgctcggaatatttttcaatgtccattccgctgtgttgattgaggacgttcccttcacggagaaagattttgagaatggcccccagaacatatacaacctttacgagcaagtcagctacaactgtttcatcgctgcaggcctttacctcctcctcggaggcttctctttctgccaagttcggctcaataagcgcaaggaatacatggtgcgctagggccccggcgcgtttccccgctccagcccctcctctatttaaagactccctgcaccgtgtcacccaggtcgcgtcccacccttgccggcgccctctgtgggactgggtttcccgggcgagagactgaatcccttctcccatctctggcatccggcccccgtggagagggctgaggctggggggctgttccgtctctccacccttcgctgtgtcccgtatctcaataaagagaatctgctctcttcaaaaaaaaatcttatcaaacacaacctacacagcaccctcacatcagtcatacacaacactatacttttctcactcgacagtaaaacacagaacaaaaaatatttactctgaccagtccctacaacgctggaatacttgtttctattcgtagtgtcgcacgcctatgacttgctactcggtctatgtgctaacacatgaggagcaggcacgcgcgggcaggactcatacacatcatcagtcgtggtcgtctcagcggggtataacagtcatcactagtttacaacaagcgcggctcgagtactcttaaaacttgttattccattctcactcccataatatttcttattttgttttctacttaaatcttatcttctcatgtagtgctacctaatcttatattgattcgatatcttacaatctaatatctacctcctcccgattacgtcctgttaatattttagatcaccgattagcttactccttcctcc

SEQ ID NO: 286263 - DNA, 829 bp, Homo sapiens
  misc_feature (665)..(665): n is a, c, g, or t
  misc_feature (668)..(668): n is a, c, g, or t
  misc_feature (670)..(670): n is a, c, g, or t
  misc_feature (675)..(676): n is a, c, g, or t
aattcgcggccgcgtcgacacggctggagaagacgacagaagggggagggcatcctgggctttctcccaccgctttccgagcccgcttgcacctcggcgatccccgactcccttctttatggcgtcgctcctgtgctgtgggccgaagctggccgcctgcggcatcgtcctcagcgcctggggagtgatcatgttgataatgctcggaatatttttcaatgtccattccgctgtgttgattgaggacgttcccttcacggagaaagattttgagaatggcccccagaacatatacaacctttacgagcaagtcagctacaactgtttcatcgctgcaggcctttacctcctcctcggaggcttctctttctgccaagttcggctcaataagcgcaaggaatacatggtgcgctagggccccggcgcgtttccccgctccagcccctcctctatttaaagactccctgcaccgtgtcacccaggtcgcgtcccacccttgccggcgccctctgtgggactgggtttcccgggcgagagactgaatcccttctcccatctctggcatccggcccccgtggagagggctgaggctggggggctgttccgtctctccacccttcgctgtgtcccgtatctcaataaagagaatctgctctcttcataanaananaaaannaaaaaaaaaacaaaatgttggggccgctcgggccagtcggatcttgactcagcaaacttattcatgcggccgcaatttaggtcacttggcccaattgcccatagggggcggtatacaatatataggccgcggttttcaaacacgggcatggga

SEQ ID NO: 286264 - DNA, 1007 bp, Homo sapiens
aattcgcggccgcgtcgacacggctggagaagacgacagaagggggagggcatcctgggctttctcccaccgctttccgagcccgcttgcacctcggcgatccccgactcccttctttatggcgtcgctcctgtgctgtgggccgaagctggccgcctgcggcatcgtcctcagcgcctggggagtgatcatgttgataatgctcggaatatttttcaatgtccattccgctgtgttgattgaggacgttcccttcacggagaaagattttgagaatggcccccagaacatatacaacctttacgagcaagtcagctacaactgtttcatcgctgcaggcctttacctcctcctcggaggcttctctttctgccaagttcggctcaataagcgcaaggaatacatggtgcgctagggccccggcgcgtttccccgctccagcccctcctctatttaaagactccctgcaccgtgtcacccaggtcgcgtcccacccttgccggcgccctctgtgggactgggtttcccgggcgagagactgaatcccttctcccatctctggcatccggcccccgtggagagggctgaggctggggggctgtgtgtcccgtatctaaataaagagaatcgctctcttaagagagaaagaaaaaagttcttttatatggggcgaagtgtatccctttggtggggtaatttagttggacggcggtgtttaaaaggcggacgggaaacttggggtaccaataagggttgagaaacccgttgcggtgggaaatagaaggccgccgtttcttcaagtgccctgaatggaagaccccttaggcaaaacggggttttgtagcgacgtaattgagcccgcgcttgttttttgttgaaggggccgaaaaaagggttggttttttccccccagagagtgtggcgcacagtttgggtatgatgacaaacattttgtttgagagagaaaaagagggggtgttggttgggtgtcgtgtgttatgatttga

SEQ ID NO: 286265 - DNA, 635 bp, Homo sapiens
aattcgcggccgcgtcgacacggctggagaagacgacagaagggggagggcatcctgggctttctcccaccgctttccgagcccgcttgcacctcggcgatccccgactcccttctttatggcgtcgctcctgtgctgtgggccgaagctggccgcctgcggcatcgtcctcagcgcctggggagtgatcatgttgataatgctcggaatatttttcaatgtccattccgctgtgttgattgaggacgttcccttcacggagaaagattttgagaatggcccccagaacatatacaacctttacgagcaagtcagctacaactgtttcatcgctgcaggcctttacctcctcctcggaggcttctctttctgccaagttcggctcaataagcgcaaggaatacatggtgcgctagggccccggcgcgtttccccgctccagcccctcctctatttaaagactccctgcaccgtgtcacccaggtcgcgtcccacccttgccggcgccctctgtgggactgggtttcccgggcgagagactgaatcccttctcccatctctggcatccggcccccgtggagagggctgaggctggggggctgtcccgtatctcaataaagagaatctgctctctta

SEQ ID NO: 286266 - DNA, 897 bp, Homo sapiens
aattcgcggccgcgtcgacacggctggagaagacgacagaagggggagggcatcctgggctttctcccaccgctttccgagcccgcttgcacctcggcgatccccgactcccttctttatggcgtcgctcctgtgctgtgggccgaagctggccgcctgcggcatcgtcctcagcgcctggggagtgatcatgttgtaatccacccaccgccacttcaagaagaaatgatatgaagaagtgccggttctccctcccctcttccgcactgtcccgtgatgatgacgcctccagagaggacgataatctgggttcctgggagagatggcttggtcactattcccacccttgcctcgaccacttgtctcaatgtcaccacctcacgccctgttccagataatgctcggaatatttttcaatgtccattccgctgtgttgattgaggacgttcccttcacggagaaagattttgagaatggcccccagaacatatacaacctttacgagcaagtcagctacaactgtttcatcgctgcaggcctttacctcctcctcggaggcttctctttctgccaagttcggctcaataagcgcaaggaatacatggtgcgctagggccccggcgcgtttccccgctccagcccctcctctatttaaagactccctgcaccgtgtcacccaggtcgcgtcccacccttgccggcgccctctgtgggactgggtttcccgggcgagagactgaatcccttctcccatctctggcatccggcccccgtggagagggctgaggctggggggctgttccgtctctccacccttcgctgtgtcccgtatctcaataaagagaatctgctctcttcaaaaaaaaaaaacctttctctggaaaggggcccggtacc

SEQ ID NO: 286267 - DNA, 263 bp, Homo sapiens
cccacgcgtccgcggacgcgtgggcccgcttgcacctcggcgatccccgactcccttctttatggcgtcgctcctgtgctgtgggccgaagctggccgcctgcggcatcgtcctcagcgcctggggagtgatcatgttgataatgctcggaatatttttcaatgtccattccgctgtgttgattgaggacgttcccttcacggagaaagattttgagaatggcccccagaacatatctcaataaagagaatctgctctcttca

SEQ ID NO: 286268 - DNA, 638 bp, Homo sapiens
cccacgcgtccgcggacgcgtgggcccgcttgcacctcggcgatccccgactcccttctttatggcgtcgctcctgtgctgtgggccgaagctggccgcctgcggcatcgtcctcagcgcctggggagtgatcatgttgtaatccacccaccgccacttcaagaagaaatgatatgaagaagtgccggttctccctcccctcttccgcactgtcccgtgatgatgacgcctccagagaggacgataatctgggttcctgggagagatggcttggtcactattcccacccttgcctcgaccacttgtctcaatgtcaccacctcacgccctgttccaggtggctgagtccgaatccagtaaccaccacctcgttttggttaatctcaggctcgggtgttgtagcaacattggaaatgggaggggtttacgaagtgaacatgaggtcaggtgcctgaattcaacagtctacccattccccttttccagataatgctcggaatatttttcaatgtccattccgctgtgttgattgaggacgttcccttcacggagaaagattttgagtaagtattcgggtgggggaggcgggctgggagcaggtgggaggtggcgaggcctagggtcagaattacgtctgg

SEQ ID NO: 286269 - DNA, 1968 bp, Homo sapiens
aattcgcggccgcgtcgacacggctggagaagacgacagaagggggagggcatcctgggctttctcccaccgctttccgagcccgcttgcacctcggcgatccccgactcccttctttatggcgtcgctcctgtgctgtgggccgaagctggccgcctgcggcatcgtcctcagcgcctggggagtgatcatgttgtaatccacccaccgccacttcaagaagaaatgatatgaagaagtgccggttctccctcccctcttccgcactgtcccgtgatgatgacgcctccagagaggacgataatctgggttcctgggagagatggcttggtcactattcccacccttgcctcgaccacttgtctcaatgtcaccacctcacgccctgttccagataatgctcggaatatttttcaatgtccattccgctgtgttgattgaggacgttcccttcacggagaaagattttgagaatggcccccagaacatatacaacctttacgagcaagtcagctacaactgtttcatcgctgcaggcctttacctcctcctcggaggcttctctttctgccaagttcggctcaataagcgcaaggaatacatggtgcgctagggccccggcgcgtttccccgctccagcccctcctctatttaaagactccctgcaccgtgtcacccaggtcgcgtcccacccttgccggcgccctctgtgggactgggtttcccgggcgagagactgaatcccttctcccatctctggcatccggcccccgtggagagggctgaggctggggggctgttccgtctctccacccttcgctgtgtcccgtatctcaataaagagaatctgctctcttcagccctgtgtctgtgcttgagtgggggcgagcacggggctgagactagaggtcggcctctgcctggaaagtcccgatctctgagcggaagtggagcgaagtgtggcgcggaagtgaggcgaaggctttccccatcgactgggcgcgccgagcggtctaagcgactgcgtctgatggggcggggagccgccgggttgagcctatccgctgcggggagggcgggacttcctgcgcgggggcccgagccgctcagtctccctgctctccgtggtcccggctcgcgtgtagcggcggcggcggcgtctccgtgaggaggcgcgcggggccatgacgtcagcgtccacaaaggtcggagagatcttctcggcggccggcgccgccttcacgaagctcggggagctgacgatgcagctgcatcccgtggccgactcttctcctgcgggcgcgaagtggacggagacggaaatagagatgctgagggctgctgtgaagcgatttggggacgatcttaatcacatcagctgtgtcatcaaggaacggacagtggcccagataaaggccactgtgaaacgcaaggtatatgaagattctggcatcccccttccagctgagtcacccaagaaagggcccaagaaggtggcatctggtgtcttgtcacctcctccagctgcccctcctcccagcagctccagtgtccctgaggccgggggtccccccataaagaaacagaaggctgatgtgacactcagtgctctgaacgactccgatgccaacagtgacgtggtggatattgaagggctaggagaaactcctccagctaagaaactcaacttcgaccaggcctgaccctggattctggccttctcatgacctctgctgatcctcctctcctctcctgctgagccttccacctctgacctctcactgttcatgccggacctgtggatctcctgggactccgagcaaggcctgcacgagagagggctgaaaggctgctggggctgccacctcgctattcccgcataagcatctgcccccaacccctttgaccttcatctgatggacatttttatacagaaaacaataaagatttccctctcaaaaaaaaaaa

SEQ ID NO: 286270 - DNA, 2418 bp, Homo sapiens
cccacgcgtccgcggacgcgtgggcccgcttgcacctcggcgatccccgactcccttctttatggcgtcgctcctgtgctgtgggccgaagctggccgcctgcggcatcgtcctcagcgcctggggagtgatcatgttggtgaggggactccccggcaaggatcggagagggcctgaggggctccgggctgggagggctgggaggcgaggaaactctgggccgcaggcaggccggaggggccggggatctacaggccccggagaaggagacagactgaaattgaaaaatgggaactgttcgagaccagcctgaccaacatggtgaaaccccgtctccaataaaaatacaaaaattagccgggcgtggtggcgcccgcctgtaatcccagctactcaggaggctgaggcaggagaatcgcttgaatccgggaggcggagggtgcagtgagccgagatcgcgccactgcactccagcctgggtgacagagcgagactccgtccccaaagaaaaagaaaaaagggaactggagcggagggccctggagtgggaggagccagggctggtaaaggtggagacccctcaaggtaggagaaacaagagcggggttcctgagaggtgcttgagttgaatggaggacatgggaggaaaagagagtgcttgttccagaaatgtgtagctgggccttgttttcccaggtaatccacccaccgccacttcaagaagaaatgatatgaagaagtgccggttctccctcccctcttccgcactgtcccgtgatgatgacgcctccagagaggacgataatctgggttcctgggagagatggcttggtcactattcccacccttgcctcgaccacttgtctcaatgtcaccacctcacgccctgttccaggtggctgagtccgaatccagtaaccaccacctcgttttggttaatctcaggctcgggtgttgtagcaacattggaaatgggaggggtttacgaagtgaacatgaggtcaggtgcctgaattcaacagtctacccattccccttttccagataatgctcggaatatttttcaatgtccattccgctgtgttgattgaggacgttcccttcacggagaaagattttgagtaagtattcgggtgggggaggcgggctgggagcaggtgggaggtggcgaggcccgggcgagagactgaatcccttctcccatctctggcatccggcccccgtggagagggctgaggctggggggctgttccgtctctccacccttcgctgtgtcccgtatctcaataaagagaatctgctctcttcagccctgtgtctgtgcttgagtgggggcgagcacggggctgagactagaggtcggcctctgcctggaaagtcccgatctctgagcggaagtggagcgaagtgtggcgcggaagtgaggcgaaggctttccccatcgactgggcgcgccgagcggtctaagcgactgcgtctgatggggcggggagccgccgggttgagcctatccgctgcggggagggcgggacttcctgcgcgggggcccgagccgctcagtctccctgctctccgtggtcccggctcgcgtgtagcggcggcggcggcgtctccgtgaggaggcgcgcggggccatgacgtcagcgtccacaaaggtcggagagatcttctcggcggccggcgccgccttcacgaagctcggggagctgacgatgcagctgcatcccgtggccgactcttctcctgcgggcgcgaagtggacggagacggaaatagagatgctgagggctgctgtgaagcgatttggggacgatcttaatcacatcagctgtgtcatcaaggaacggacagtggcccagataaaggccactgtgaaacgcaaggtatatgaagattctggcatcccccttccagctgagtcacccaagaaagggcccaagaaggtggcatctggtgtcttgtcacctcctccagctgcccctcctcccagcagctccagtgtccctgaggccgggggtccccccataaagaaacagaaggctgatgtgacactcagtgctctgaacgactccgatgccaacagtgacgtggtggatattgaagggctaggagaaactcctccagctaagaaactcaacttcgaccaggcctgaccctggattctggccttctcatgacctctgctgatcctcctctcctctcctgctgagccttccacctctgacctctcactgttcatgccggacctgtggatctcctgggactccgagcaaggcctgcacgagagagggctgaaaggctgctggggctgccacctcgctattcccgcataagcatctgcccccaacccctttgaccttcatctgatggacatttttatacagaaaacaataaagatttccctctcaaaaaaaaaaa

SEQ ID NO: 286271 - DNA, 1793 bp, Homo sapiens
aattcgcggccgcgtcgacacggctggagaagacgacagaagggggagggcatcctgggctttctcccaccgctttccgagcccgcttgcacctcggcgatccccgactcccttctttatggcgtcgctcctgtgctgtgggccgaagctggccgcctgcggcatcgtcctcagcgcctggggagtgatcatgttgataatgctcggaatatttttcaatgtccattccgctgtgttgattgaggacgttcccttcacggagaaagattttgagaatggcccccagaacatatacaacctttacgagcaagtcagctacaactgtttcatcgctgcaggcctttacctcctcctcggaggcttctctttctgccaagttcggctcaataagcgcaaggaatacatggtgcgctagggccccggcgcgtttccccgctccagcccctcctctatttaaagactccctgcaccgtgtcacccaggtcgcgtcccacccttgccggcgccctctgtgggactgggtttcccgggcgagagactgaatcccttctcccatctctggcatccggcccccgtggagagggctgaggctggggggctgttccgtctctccacccttcgctgtgtcccgtatctcaataaagagaatctgctctcttcagccctgtgtctgtgcttgagtgggggcgagcacggggctgagactagaggtcggcctctgcctggaaagtcccgatctctgagcggaagtggagcgaagtgtggcgcggaagtgaggcgaaggctttccccatcgactgggcgcgccgagcggtctaagcgactgcgtctgatggggcggggagccgccgggttgagcctatccgctgcggggagggcgggacttcctgcgcgggggcccgagccgctcagtctccctgctctccgtggtcccggctcgcgtgtagcggcggcggcggcgtctccgtgaggaggcgcgcggggccatgacgtcagcgtccacaaaggtcggagagatcttctcggcggccggcgccgccttcacgaagctcggggagctgacgatgcagctgcatcccgtggccgactcttctcctgcgggcgcgaagtggacggagacggaaatagagatgctgagggctgctgtgaagcgatttggggacgatcttaatcacatcagctgtgtcatcaaggaacggacagtggcccagataaaggccactgtgaaacgcaaggtatatgaagattctggcatcccccttccagctgagtcacccaagaaagggcccaagaaggtggcatctggtgtcttgtcacctcctccagctgcccctcctcccagcagctccagtgtccctgaggccgggggtccccccataaagaaacagaaggctgatgtgacactcagtgctctgaacgactccgatgccaacagtgacgtggtggatattgaagggctaggagaaactcctccagctaagaaactcaacttcgaccaggcctgaccctggattctggccttctcatgacctctgctgatcctcctctcctctcctgctgagccttccacctctgacctctcactgttcatgccggacctgtggatctcctgggactccgagcaaggcctgcacgagagagggctgaaaggctgctggggctgccacctcgctattcccgcataagcatctgcccccaacccctttgaccttcatctgatggacatttttatacagaaaacaataaagatttccctctcaaaaaaaaaaagcttcgtgctgtctgcttaacat

SEQ ID NO: 286272 - DNA, 1667 bp, Homo sapiens
aattcgcggccgcgtcgacacggctggagaagacgacagaagggggagggcatcctgggctttctcccaccgctttccgagcccgcttgcacctcggcgatccccgactcccttctttatggcgtcgctcctgtgctgtgggccgaagctggccgcctgcggcatcgtcctcagcgcctggggagtgatcatgttgataatgctcggaatatttttcaatgtccattccgctgtgttgattgaggacgttcccttcacggagaaagattttgagaatggcccccagaacatatacaacctttacgagcaagtcagctacaactgtttcatcgctgcaggcctttacctcctcctcggaggcttctctttctgccaagttcggctcaataagcgcaaggaatacatggtgcgctagggccccggcgcgtttccccgctccagcccctcctctatttaaagactccctgcaccgtgtcacccaggtcgcgtcccacccttgccggcgccctctgtgggactgggtttcccgggcgagagactgaatcccttctcccatctctggcatccggcccccgtggagagggctgaggctggggggctgttccgtctctccacccttcgctgtgtcccgtatctcaataaagagaatctgctctcttcagccctgtgtctgtgcttgagtgggggcgagcacggggctgagactagaggtcggcctctgcctggaaagtcccgatctctgagcggaagtggagcgaagtgtggcgcggaagtgaggcgaaggctttccccatcgactgggcgcgccgagcggtctaagcgactgcgtctgatggggcggggagccgccgggttgagcctatccgctgcggggagggcgggacttcctgcgcgggggcccgagccgctcagtctccctgctctccgtggtcccggctcgcgtgtagcggcggcggcggcgtctccgtgaggaggcgcgcggggccatgacgtcagcgtccacaaaggtcggagagatcttctcggcggccggcgccgccttcacgaagctcggggagctgacgatgcagctgcatcccgtggccgactcttctcctgcgggcgcgaagtggacggagacggaaatagagatgctgagggctgctgtgaagcgatttggggacgatcttaatcacatcagctgtgtcatcaaggaacggacagtggcccagataaaggccactgtgaaacgcaaggtatatgaagattctggcatcccccttccagctgagtcacccaagaaagggcccaagaaggtggcatctggtgtcttgtcacctcctccagctgcccctcctcccagcagctccagtgtccctgaggccgggggtccccccataaagaaacagaaggctgagcctgaccctggattctggccttctcatgacctctgctgatcctcctctcctctcctgctgagccttccacctctgacctctcactgttcatgccggacctgtggatctcctgggactccgagcaaggcctgcacgagagagggctgaaaggctgctggggctgccacctcgctattcccgcataagcatctgcccccaacccctttgaccttcatctgatggacatttttatacagaaaacaataaagatttccctctcaaaaaaaaaaa

SEQ ID NO: 286273 - DNA, 824 bp, Homo sapiens
aattcgcggccgcgtcgacacggctggagaagacgacagaagggggagggcatcctgggctttctcccaccgctttccgagcccgcttgcacctcggcgatccccgactcccttctttatggcgtcgctcctgtgctgtgggccgaagctggccgcctgcggcatcgtcctcagcgcctggggagtgatcatgttgataatgctcggaatatttttcaatgtccattccgctgtgttgattgaggacgttcccttcacggagaaagattttgagaatggcccccagaacatatacaacctttacgagcaagtcagctacaactgtttcatcgctgcaggcctttacctcctcctcggaggcttctctttctgccaagttcggctcaataagcgcaaggaatacatggtgcgctagggccccggcgcgtttccccgctccagcccctcctctatttaaagactccctgcaccgtgtcacccaggtcgcgtcccacccttgccggcgccctctgtgggactgggtttcccgggcgagagactgaatcccttctcccatctctggcatccggcccccgtggagagggctgaggctggggggctgttccgtctctccacccttcgctgtgtcccgtatctcaataaagagaatctgctctcttcaaaaaaaaaaaaaaaaaaaaaaaaaaaaaaaaaaataaaatacacataaaaaaaaaaggggggggcgcgcccccaaagaagtttcccccggggggggccccagttttgggcctccccccctttttttgtgacacaggggggcccctttgggggcggcgttttta

SEQ ID NO: 286274 - DNA, 1360 bp, Homo sapiens
cccacgcgtccgcggacgcgtgggcccgcttgcacctcggcgatccccgactcccttctttatggcgtcgctcctgtgctgtgggccgaagctggccgcctgcggcatcgtcctcagcgcctggggagtgatcatgttggtgaggggactccccggcaaggatcggagagggcctgaggggctccgggctgggagggctgggaggcgaggaaactctgggccgcaggcaggccggaggggccggggatctacaggccccggagaaggagacagactgaaattgaaaaatgggaactgttcgagaccagcctgaccaacatggtgaaaccccgtctccaataaaaatacaaaaattagccgggcgtggtggcgcccgcctgtaatcccagctactcaggaggctgaggcaggagaatcgcttgaatccgggaggcggagggtgcagtgagccgagatcgcgccactgcactccagcctgggtgacagagcgagactccgtccccaaagaaaaagaaaaaagggaactggagcggagggccctggagtgggaggagccagggctggtaaaggtggagacccctcaaggtaggagaaacaagagcggggttcctgagaggtgcttgagttgaatggaggacatgggaggaaaagagagtgcttgttccagaaatgtgtagctgggccttgttttcccaggtaatccacccaccgccacttcaagaagaaatgatatgaagaagtgccggttctccctcccctcttccgcactgtcccgtgatgatgacgcctccagagaggacgataatctgggttcctgggagagatggcttggtcactattcccacccttgcctcgaccacttgtctcaatgtcaccacctcacgccctgttccagataatgctcggaatatttttcaatgtccattccgctgtgttgattgaggacgttcccttcacggagaaagattttgagaatggcccccagaacatatacaacctttacgagcaagtcagctacaactgtttcatcgctgcaggcctttacctcctcctcggaggcttctctttctgccaagttcggctcaataagcgcaaggaatacatggtgcgctagggccccggcgcgtttccccgctccagcccctcctctatttaaagactccctgcaccgtgtcacccaggtcgcgtcccacccttgccggcgccctctgtgggactgggtttcccgggcgagagactgaatcccttctcccatctctggcatccggcccccgtggagagggctgaggctggggggctgttccgtctctccacccttcgctgtgtcccgtatctcaataaagagaatctgctctcttca

SEQ ID NO: 286275 - DNA, 2005 bp, Homo sapiens
aattcgcggccgcgtcgacacggctggagaagacgacagaagggggagggcatcctgggctttctcccaccgctttccgagcccgcttgcacctcggcgatccccgactcccttctttatggcgtcgctcctgtgctgtgggccgaagctggccgcctgcggcatcgtcctcagcgcctggggagtgatcatgttgataatgctcggaatatttttcaatgtccattccgctgtgttgattgaggacgttcccttcacggagaaagattttgagaatggcccccagaacatatacaacctttacgagcaagtcagctacaactgtttcatcgctgcaggcctttacctcctcctcggaggcttctctttctgccaagttcggctcaataagcgcaaggaatacatggtgcgctagggccccggcgcgtttccccgctccagcccctcctctatttaaagactccctgcaccgtgtcacccaggtcgcgtcccacccttgccggcgccctctgtgggactgggtttcccgggcgagagactgaatcccttctcccatctctggcatccggcccccgtggagagggctgaggctggggggctgttccgtctctccacccttcgctgtgtcccgtatctcaataaagagaatctgctctcttcagccctgtgtctgtgcttgagtgggggcgagcacggggctgagactagaggtcggcctctgcctggaaagtcccgatctctgagcggaagtggagcgaagtgtggcgcggaagtgaggcgaaggctttccccatcgactgggcgcgccgagcggtctaagcgactgcgtctgatggggcggggagccgccgggttgagcctatccgctgcggggagggcgggacttcctgcgcgggggcccgagccgctcagtctccctgctctccgtggtcccggctcgcgtgtagcggcggcggcggcgtctccgtgaggaggcgcgcggggccatgacgtcagcgtccacaaaggttcgacctccctcgcggacagcgctccctggcggccacgggagggcgggccccccacttggctcgcggctcttccgccccgggcggggggcgggcgggagccgagcctggggtggggctaggggctccgggcgggacggggagggcgggcgccggccccccgtgacgctgccccgcccccaggtcggagagatcttctcggcggccggcgccgccttcacgaagctcggggagctgacgatgcagctgcatcccgtggccgactcttctcctgcgggcgcgaagtggacggagacggaaatagagatgctgagggctgctgtgaagcgatttggggacgatcttaatcacatcagctgtgtcatcaaggaacggacagtggcccagataaaggccactgtgaaacgcaaggtgacgtggtggatattgaagggctaggagaaactcctccagctaagaaactcaacttcgaccaggcctgaccctggattctggccttctcatgacctctgctgatcctcctctcctctcctgctgagccttccacctctgacctctcactgttcatgccggacctgtggatctcctgggactccgagcaaggcctgcacgagagagggctgaaaggctgctggggctgccacctcgctattcccgcataagcatctgcccccaacccctttgaccttcatctgatggacatttttatacagaaaacaataaagatttccctctcaaaaaaaaaaaaaaaaacaaaacaaaaacacaacttttgggggccggcctcgggaccacgaaaaaaggtgttctctaacacccatttccgtgtgggccgcgggcccagtaaggaaagtgagctggccatacggggtcgaaggagaacccggggcatggcatagggcgggttccccaaaaaaaccgcggcggccagcggtttgacacccagagggtccgggcctcgggcccacagggccacgcgaccgccccacgccaggagt

SEQ ID NO: 286276 - DNA, 865 bp, Homo sapiens
  misc_feature (665)..(665): n is a, c, g, or t
  misc_feature (670)..(670): n is a, c, g, or t
aattcgcggccgcgtcgacacggctggagaagacgacagaagggggagggcatcctgggctttctcccaccgctttccgagcccgcttgcacctcggcgatccccgactcccttctttatggcgtcgctcctgtgctgtgggccgaagctggccgcctgcggcatcgtcctcagcgcctggggagtgatcatgttgataatgctcggaatatttttcaatgtccattccgctgtgttgattgaggacgttcccttcacggagaaagattttgagaatggcccccagaacatatacaacctttacgagcaagtcagctacaactgtttcatcgctgcaggcctttacctcctcctcggaggcttctctttctgccaagttcggctcaataagcgcaaggaatacatggtgcgctagggccccggcgcgtttccccgctccagcccctcctctatttaaagactccctgcaccgtgtcacccaggtcgcgtcccacccttgccggcgccctctgtgggactgggtttcccgggcgagagactgaatcccttctcccatctctggcatccggcccccgtggagagggctgaggctggggggctgttccgtctctccacccttcgctgtgtcccgtatctcaataaagagaatctgctctcttcaaaanacaancaaaacacccacacaaaaaacacaactttctggcccccacaagcctctgtataaccttttacagaacacaatacagtgatcgcccgctggccccattaggtcacagtgctacacgtgtgttacgagtgtttctccggacaccataccgcggtcacaacacatgcgatgtacatttctcacacattacaaaaacgg

SEQ ID NO: 286277 - DNA, 699 bp, Homo sapiens
aattcgcggccgcgtcgacacggctggagaagacgacagaagggggagggcatcctgggctttctcccaccgctttccgagcccgcttgcacctcggcgatccccgactcccttctttatggcgtcgctcctgtgctgtgggccgaagctggccgcctgcggcatcgtcctcagcgcctggggagtgatcatgttgataatgctcggaatatttttcaatgtccattccgctgtgttgattgaggacgttcccttcacggagaaagattttgagaatggcccccagaacatatacaacctttacgagcaagtcagctacaactgtttcatcgctgcaggcctttacctcctcctcggaggcttctctttctgccaagttcggctcaataagcgcaaggaatacatggtgcgctagggccccggcgcgtttccccgctccagcccctcctctatttaaagactccctgcaccgtgtcacccaggtcgcgtcccacccttgccggcgccctctgtgggactgggtttcccgggcgagagactgaatcccttctcccatctctggcatccggcccccgtggagagggctgaggctggggggctgttccgtctctccacccttcgctgtgtcccgtatctcaataaagagaatctgctctcttcaaaaaaaaaaaacctttctctggaaaggggcccggtacc

SEQ ID NO: 286278 - DNA, 755 bp, Homo sapiens
aattcgcggccgcgtcgacacggctggagaagacgacagaagggggagggcatcctgggctttctcccaccgctttccgagcccgcttgcacctcggcgatccccgactcccttctttatggcgtcgctcctgtgctgtgggccgaagctggccgcctgcggcatcgtcctcagcgcctggggagtgatcatgttgataatgctcggaatatttttcaatgtccattccgctgtgttgattgaggacgttcccttcacggagaaagattttgagaatggcccccagaacatatacaacctttacgagcaagtcagctacaactgtttcatcgctgcaggcctttacctcctcctcggaggcttctctttctgccaagttcggctcaataagcgcaaggaatacatggtgcgctagggccccggcgcgtttccccgctccagcccctcctctatttaaagactccctgcaccgtgtcacccaggtcgcgtcccacccttgccggcgccctctgtgggactgggtttcccgggcgagagactgaatcccttctcccatctctggcatccggcccccgtggagagggctgaggctggggggctgtcccgtatctcaataaagagaatctgctctcttaaaaaaaacaaaacaaaaaaacatttttgcggggctcgggacccagaaaaacttttaaaaacctcggttgggcgggggccccatattggatgtgaactgggcaaagggttccaagaaaacc

SEQ ID NO: 286279 - DNA, 394 bp, Homo sapiens
cgagcctggggtggggctaggggctccgggcgggacggggagggcgggcgccggccccccgtgacgctgccccgcccccaggtcggagagatcttctcggcggccggcgccgccttcacgaagctcggggagctgacgatgcagctgcatcccgtggccgactcttctcctgcggggtacgtgagcccggactgggacgtggacgctgagagcgggcgcttggactcggtcacagacacggaccctctctagcacagggacagacattagtttccctttgtgcgtggcacagcacagagtcggtgttaataaatgatcgttgggtgagggaatgaatgacagataaaaatacagacaggcccatagcccagactcctgtttcacagttctccct

SEQ ID NO: 286280 - DNA, 555 bp, Homo sapiens
gttcaagcgattcttctgcctcagcctcccgagtagctgggattacaggcacctgtcaccacgcctggctaatttttgtagttttttagtagttacgggatttcaccatcttggccaggctggtcttgaactcctgacctcgtgatccacccacctcggcctcccaaagtgctgggattacaggcatgagccaccgcgcccatcctgtactcactttttcatactcctttgcaggttggctgtgataggtgtccctggccacgtcagtggagcacccaggcctcaagcagcatgctggggaagggaaaaccccccattctggtgatggaggtggccatgaccatgtctggttttcaaaggcagctttgtaagaacagaaaccagcagctccccaacatctggccctatctgctgtgcaaaccacagggaccaggacctttccggggtgccagtggcatcctctggaaccagcttctcagtggaatttcagatgctattcctggtcaattgcctttgctatgtgctatcctttaataaattctgtttctcctcata

SEQ ID NO: 286281 - DNA, 396 bp, Homo sapiens
cagtcacagcaagctcacttcacaggaaccaagctgtgggctgatcctacagacttgaaaagacaactcaaaaaggttggctgtgataggtgtccctggccacgtcagtggagcacccaggcctcaagcagcatgctggggaagggaaaaccccccattctggtgatggaggtggccatgaccatgtctggttttcaaaggcagctttgtaagaacagaaaccagcagctccccaacatctggccctatctgctgtgcaaaccacagggaccaggacctttccggggtgccagtggcatcctctggaaccagcttctcagtggaatttcagatgctattcctggtcaattgcctttgctatgtgctatcctttaataaattctgtttctcctcata

SEQ ID NO: 286282 - DNA, 771 bp, Homo sapiens
gtgggaggatagcttgagcctgggaggtcgaggctgcagtgagctgattgcaccattgcactctaggatgacagagtgagaccctgtctcaaaaaaacaaaacaaaaattgccctgatccacacaaattcttggttttgtttttataaatgtgcttctataaaatgaaagccaaagtgttctgttatttcagtttttttttttaatctccttttaggttaaaaattttgcagttatttatcttgtggatattacagaagtgcctgacttcaacaaaatgtatgagttatacgatccatgtactgtcatgtttttcttcaggaacaagcacatcatgattgacttggggactggcaacaacaacaagattaactgggccatggaggacaagcaggagatggtggacatcatcgagacggtgtaccgcggggcccgcaaaggccgcggcctggtggtgtcccccaaggactactccaccaagtaccgctactgaggcgccctcagtctgcgcggataaatgtcgtggagccctttttgtatggaaacgttttaagctatttaaagcctttggaaaatacaggaagctccagggctggagcacctctgagatggaattgataacatggtcttaactcaccgaaataaacaagcacgtggtgagaggagcaggcctacttgtttgttctcaggaaacttaatgaatagattactgattttcctagtcaaagttaattcttacccttggagtaaaacgaaggtgtttatcctgtga

SEQ ID NO: 286283 - DNA, 909 bp, Homo sapiens
agcacgcacggcgtcggtgcgtgcgcgcccagacgttctgccgggtggcagtcccagcggagtttgcgggtgcgggcgggaccggatttcgtccgtgggcccgggggcggcgggggccggggagtgaggggccggctgagcccacctcgctgggccctccctggcgccccgccttgggcggcggcgagcgcgcgggccgccatgtcgtacatgctcccgcacctgcacaacggctggcaggtggaccaggccatcctctcggaggaggaccgcgtggtcgtcatccgcttcggccacgactgggatcctacgtgcatgaagatggacgaggtcctgtacagcatcgccgagaaggttaaaaattttgcagttatttatcttgtggatattacagaagtgcctgacttcaacaaaatgtatgagttatacgatccatgtactgtcatgtttttcttcaggaacaagcacatcatgattgacttggggactggcaacaacaacaagattaactgggccatggaggacaagcaggagatggtggacatcatcgagacggtgtaccgcggggcccgcaaaggccgcggcctggtggtgtcccccaaggactactccaccaagtaccgctactgaggcgccctcagtctgcgcggataaatgtcgtggagccctttttgtatggaaacgttttaagctatttaaagcctttggaaaatacaggaagctccagggctggagcacctctgagatggaattgataacatggtcttaactcaccgaaataaacaagcacgtggtgagaggagcaggcctacttgtttgttctcaggaaacttaatgaatagattactgattttcctagtcaaagttaattcttacccttggagtaaaacgaaggtgtttatcctgtga

SEQ ID NO: 286284 - DNA, 1446 bp, Homo sapiens
agcacgcacggcgtcggtgcgtgcgcgcccagacgttctgccgggtggcagtcccagcggagtttgcgggtgcgggcgggaccggatttcgtccgtgggcccgggggcggcgggggccggggagtgaggggccggctgagcccacctcgctgggccctccctggcgccccgccttgggcggcggcgagcgcgcgggccgccatgtcgtacatgctcccgcacctgcacaacggctggcaggtggaccaggccatcctctcggaggaggaccgcgtggtcgtcatccgcttcggccacgactgggatcctacgtgcatgaagatggacgaggtcctgtacagcatcgccgagaaggttaaaaattttgcagttatttatcttgtggatattacagaagtgcctgacttcaacaaaatgtatgagttatacgatccatgtactgtcatgtttttcttcaggaacaagcacatcatgattgacttggggactggcaacaacaacaagattaactgggccatggaggacaagcaggagatggtggacatcatcgagacggtgtaccgcggggcccgcaaaggccgcggcctggtggtgtcccccaaggactactccaccaagtaccgctactgaggcgccctcagtctgcgcggataaatgtcgtggagccctttttgtatggaaacgttttaagctatttaaagcctttggaaaatacaggaagctccagggctggagcacctctgagatggaattgataacatggtcttaactcaccgaaataaacaagcacgtggtgagaggagcaggcctacttgtttgttctcaggaaacttaatgaatagattactgattttcctagtcaaagttaattcttacccttggagtaaaacgaaggtgtttatcctgtgagcctgtgcgttttgcatactgggttggtttgctggggctgcggtgacagcatatgccgcgagctgggctttaacagagatgtgtgctctcacagctttgcaggcgggggtctgagatcagggtgtcgcgggtggggggtcactgctgaggccgtgaggggaatctgctcaggcctgtccctggcttctgggggctgctggtggtattttcagttccttggtgtgtggatacttcgccccatctctgccttcacctgtgtcctccctgtgtgggtgctggtgtccaaaatttccccttttcgtagtgacaccagctgtgttggattggggcccaccctgctccagcatggcctaatcttaactaattacatttgcaaggatcttatgtccacaaaagtcacagtctgaggtgctgggggttaggacttcaatatataaattttgcggttacacaattcaatccatgacagaatccaaaggtttactctggttataaaaacagtacaataaaatattgtttatagccttccctgtaagg

SEQ ID NO: 286285 - DNA, 797 bp, Homo sapiens
agcacgcacggcgtcggtgcgtgcgcgcccagacgttctgccgggtggcagtcccagcggagtttgcgggtgcgggcgggaccggatttcgtccgtgggcccgggggcggcgggggccggggagtgaggggccggctgagcccacctcgctgggccctccctggcgccccgccttgggcggcggcgagcgcgcgggccgccatgtcgtacatgctcccgcacctgcacaacggctggcaggtggaccaggccatcctctcggaggaggaccgcgtggtcgtcatccgcttcggccacgactgggatcctacgtgcatgaagatggacgaggtcctgtacagcatcgccgagaaggttaaaaattttgcagttatttatcttgtggatattacagaagtgcctgacttcaacaaaatgtatgagttatacgatccatgtactgtcatgtttttcttcaggaacaagcacatcatgattgacttggggactggcaacaacaacaagattaactgggccatggaggacaagcaggagatggtggacatcatcgagacggtgtaccgcggggcccgcaaaggccgcggcctggtggtgtcccccaaggactactccaccaagtaccgctactgaggcgccctcagtctgcgcggataaatgtcgtggagccctttttgtatggaaacgttttaagctatttaaagcctttggaaaatacaggaagctccagggctggagcacctctgagatggaattgataacatggtcttaactcaccgaaataaacaagcacgtggtga

SEQ ID NO: 286286 - DNA, 904 bp, Homo sapiens
agcacgcacggcgtcggtgcgtgcgcgcccagacgttctgccgggtggcagtcccagcggagtttgcgggtgcgggcgggaccggatttcgtccgtgggcccgggggcggcgggggccggggagtgaggggccggctgagcccacctcgctgggccctccctggcgccccgccttgggcggcggcgagcgcgcgggccgccatgtcgtacatgctcccgcacctgcacaacggctggcaggtggaccaggccatcctctcggaggaggaccgcgtggtcgtcatccgcttcggccacgactgggatcctacgtgcatgaagatggacgaggtcctgtacagcatcgccgagaaggttaaaaattttgcagttatttatcttgtggatattacagaagtgcctgacttcaacaaaatgtatgagttatacgatccatgtactgtcatgtttttcttcaggaacaagcacatcatgattgacttggggactggcaacaacaacaagattaactgggccatggaggacaagcaggagatggtggacatcatcgagacggtgtaccgcggggcccgcaaaggccgcggcctggtggtgtcccccaaggactactccaccaagtaccgctactgaggcgccctcagtctgcgcggataaatgtcgtggagccctttttgtatggaaacgttttaagctatttaaagcctttggaaaatacaggaagctccagggctggagcacctctgagatggaattgataacatggtcttaactcaccgaaataaacaagcacgtggtgaaaaaaccaaaaaaaaaccggggtttttgggggggggaaaaaggggtgagggcggttgttcggccgcttttggaaagggggagcggggccaaagggggaagaaccgac

SEQ ID NO: 286287 - DNA, 597 bp, Homo sapiens
ggttagaatggctgaaaatgtaagggctttgtatgtgttaatgttaaaaattttgcagttatttatcttgtggatattacagaagtgcctgacttcaacaaaatgtatgagttatacgatccatgtactgtcatgtttttcttcaggaacaagcacatcatgattgacttggggactggcaacaacaacaagattaactgggccatggaggacaagcaggagatggtggacatcatcgagacggtgtaccgcggggcccgcaaaggccgcggcctggtggtgtcccccaaggactactccaccaagtaccgctactgaggcgccctcagtctgcgcggataaatgtcgtggagccctttttgtatggaaacgttttaagctatttaaagcctttggaaaatacaggaagctccagggctggagcacctctgagatggaattgataacatggtcttaactcaccgaaataaacaagcacgtggtgagaggagcaggcctacttgtttgttctcaggaaacttaatgaatagattactgattttcctagtcaaagttaattcttacccttggagtaaaacgaaggtgtttatcctgtga

SEQ ID NO: 286288 - DNA, 1002 bp, Homo sapiens
agcacgcacggcgtcggtgcgtgcgcgcccagacgttctgccgggtggcagtcccagcggagtttgcgggtgcgggcgggaccggatttcgtccgtgggcccgggggcggcgggggccggggagtgaggggccggctgagcccacctcgctgggccctccctggcgccccgccttgggcggcggcgagcgcgcgggccgccatgtcgtacatgctcccgcacctgcacaacggctggcaggtggaccaggccatcctctcggaggaggaccgcgtggtcgtcatccgcttcggccacgactgggatcctacgtgcatgaagatggacgaggtcctgtacagcatcgccgagaaggtggtggcataaacatcgggtggtgttcagatcctgctgccggcagctcgaggctaggatggctggagatgtgagggcctttgtctcatcacatccgagcacagctcagcaagatgctcttagctaggaaacagattttatgtgttaatgttaaaaattttgcagttatttatcttgtggatattacagaagtgcctgacttcaacaaaatgtatgagttatacgatccatgtactgtcatgtttttcttcaggaacaagcacatcatgattgacttggggactggcaacaacaacaagattaactgggccatggaggacaagcaggagatggtggacatcatcgagacggtgtaccgcggggcccgcaaaggccgcggcctggtggtgtcccccaaggactactccaccaagtaccgctactgaggcgccctcagtctgcgcggataaatgtcgtggagccctttttgtatggaaacgttttaagctatttaaagcctttggaaaatacaggaagctccagggctggagcacctctgagatggaattgataacatggtcttaactcaccgaaataaacaagcacgtggtgagcgatgcggccgaagtcttgtcttacaataaagatcttacgtaacatatagtctct

SEQ ID NO: 286289 - DNA, 563 bp, Homo sapiens
cggacgcgtgggtcgacccacgcgtccggatggctggagatgtgagggcctttgtctcatcacatccgagcacagctcagcaagatgctcttagctaggaaacagattttatgtgttaatgttaaaaattttgcagttatttatcttgtggatattacagaagtgcctgacttcaacaaaatgtatgagttatacgatccatgtactgtcatgtttttcttcaggaacaagcacatcatgattgacttggggactggcaacaacaacaagattaactgggccatggaggacaagcaggagatggtggacatcatcgagacggtgtaccgcggggcccgcaaaggccgcggcctggtggtgtcccccaaggactactccaccaagtaccgctactgaggcgccctcagtctgcgcggataaatgtcgtggagccctttttgtatggaaacgttttaagctatttaaagcctttggaaaatacaggaagctccagggctggagcacctctgagatggaattgataacatggtcttaactcaccgaaataaacaagcacgtggtga

SEQ ID NO: 286290 - DNA, 522 bp, Homo sapiens
  misc_feature (28)..(28): n is a, c, g, or t
  misc_feature (30)..(30): n is a, c, g, or t
  misc_feature (36)..(36): n is a, c, g, or t
aagactgaagcgagaagggcagcgcgantnggcacnacggcgagcgagcggcgtgtaggcggggtgaagacaacgccaggttaaaaattttgcagttatttatcttgtggatattacagaagtgcctgacttcaacaaaatgtatgagttatacgatccatgtactgtcatgtttttcttcaggaacaagcacatcatgattgacttggggactggcaacaacaacaagattaactgggccatggaggacaagcaggagatggtggacatcatcgagacggtgtaccgcggggcccgcaaaggccgcggcctggtggtgtcccccaaggactactccaccaagtaccgctactgaggcgccctcagtctgcgcggataaatgtcgtggagccctttttgtatggaaacgttttaagctatttaaagcctttggaaaatacaggaagctccagggctggagcacctctgagatggaattgataacatggtcttaactcaccgaaataaacaagcacgtggtga

SEQ ID NO: 286291 - DNA, 483 bp, Homo sapiens
gttatggcgtgactgactctcttactaaccagcgctacaggttaaaaattttgcagttatttatcttgtggatattacagaagtgcctgacttcaacaaaatgtatgagttatacgatccatgtactgtcatgtttttcttcaggaacaagcacatcatgattgacttggggactggcaacaacaacaagattaactgggccatggaggacaagcaggagatggtggacatcatcgagacggtgtaccgcggggcccgcaaaggccgcggcctggtggtgtcccccaaggactactccaccaagtaccgctactgaggcgccctcagtctgcgcggataaatgtcgtggagccctttttgtatggaaacgttttaagctatttaaagcctttggaaaatacaggaagctccagggctggagcacctctgagatggaattgataacatggtcttaactcaccgaaataaacaagcacgtggtga

SEQ ID NO: 286292 - DNA, 552 bp, Homo sapiens
  misc_feature (28)..(28): n is a, c, g, or t
  misc_feature (30)..(30): n is a, c, g, or t
  misc_feature (36)..(36): n is a, c, g, or t
aagactgaagcgagaagggcagcgcgantnggcacnacggcgagcgagcggcgtgtaggcggggtgaagacaacgccaggttaaaaattttgcagttatttatcttgtggatattacagaagtgcctgacttcaacaaaatgtatgagttatacgatccatgtactgtcatgtttttcttcaggaacaagcacatcatgattgacttggggactggcaacaacaacaagattaactgggccatggaggacaagcaggagatggtggacatcatcgagacggtgtaccgcggggcccgcaaaggccgcggcctggtggtgtcccccaaggactactccaccaagtaccgctactgaggcgccctcagtctgcgcggataaatgtcgtggagccctttttgtatggaaacgttttaagctatttaaagcctttggaaaatacaggaagctccagggctggagcacctctgagatggaattgataacatggtcttaactcaccgaaataaacaagcacgtggtgaaaaaaaaaaaatcggtctcgttggcactca

SEQ ID NO: 286293 - DNA, 693 bp, Homo sapiens
agcacgcacggcgtcggtgcgtgcgcgcccagacgttctgccgggtggcagtcccagcggagtttgcgggtgcgggcgggaccggatttcgtccgtgggcccgggggcggcgggggccggggagtgaggggccggctgagcccacctcgctgggccctccctggcgccccgccttgggcggcggcgagcgcgcgggccgccatgtcgtacatgctcccgcacctgcacaacggctggcaggtggaccaggccatcctctcggaggaggaccgcgtggtcgtcatccgcttcggccacgactgggatcctacgtgcatgaagatggacgaggtcctgtacagcatcgccgagaaggaacaagcacatcatgattgacttggggactggcaacaacaacaagattaactgggccatggaggacaagcaggagatggtggacatcatcgagacggtgtaccgcggggcccgcaaaggccgcggcctggtggtgtcccccaaggactactccaccaagtaccgctactgaggcgccctcagtctgcgcggataaatgtcgtggagccctttttgtatggaaacgttttaagctatttaaagcctttggaaaatacaggaagctccagggctggagcacctctgagatggaattgataacatggtcttaactcaccgaaataaacaagcacgtggtga

SEQ ID NO: 286294 - DNA, 3171 bp, Homo sapiens
agcacgcacggcgtcggtgcgtgcgcgcccagacgttctgccgggtggcagtcccagcggagtttgcgggtgcgggcgggaccggatttcgtccgtgggcccgggggcggcgggggccggggagtgaggggccggctgagcccacctcgctgggccctccctggcgccccgccttgggcggcggcgagcgcgcgggccgccatgtcgtacatgctcccgcacctgcacaacggctggcaggtggaccaggccatcctctcggaggaggaccgcgtggtcgtcatccgcttcggccacgactgggatcctacgtgcatgaagatggacgaggtcctgtacagcatcgccgagaaggttaaaaattttgcagttatttatcttgtggatattacagaagtgcctgacttcaacaaaatgtatgagttatacgatccatgtactgtcatgtttttcttcaggaacaagcacatcatgattgacttggggactggcaacaacaacaagattaactgggccatggaggacaagcaggagatggtggacatcatcgagacggtgtaccgcggggcccgcaaaggccgcggcctggtggtgtcccccaaggactactccaccaagtaccgctactgaggcgccctcagtctgcgcggataaatgtcgtggagccctttttgtatggaaacgttttaagctatttaaagcctttggaaaatacaggaagctccagggctggagcacctctgagatggaattgataacatggtcttaactcaccgaaataaacaagcacgtggtgagaggagcaggcctacttgtttgttctcaggaaacttaatgaatagattactgattttcctagtcaaagttaattcttacccttggagtaaaacgaaggtgtttatcctgtgagcctgtgcgttttgcatactgggttggtttgctggggctgcggtgacagcatatgccgcgagctgggctttaacagagatgtgtgctctcacagctttgcaggcgggggtctgagatcagggtgtcgcgggtggggggtcactgctgaggccgtgaggggaatctgctcaggcctgtccctggcttctgggggctgctggtggtattttcagttccttggtgtgtggatacttcgccccatctctgccttcacctgtgtcctccctgtgtgggtgctggtgtccaaaatttccccttttcgtagtgacaccagctgtgttggattggggcccaccctgctccagcatggcctaatcttaactaattacatttgcaaggatcttatgtccacaaaagtcacagtctgaggtgctgggggttaggacttcaatatataaattttgcggttacacaattcaatccatgacagaatccaaaggtttactctggttataaaaacagtacaataaaatattgtttatagccttccctgtaaggaataggagagctattttttattcttcccaagattgtatttgatgtaaacatattttctgtagaagccatggcccttcagttcatatagttagaaaatttccttattggccaggcacggtggctcacacctgtaatcccagcactttgggaggccgaggtgggcagatcacgaagtcaggtgttcgagaccagcctggccaacatggtgaaatcccgtctctactaaaaatacaaaaattagctgggcatggtggcgcgtgcctgtaatcccagctacttggaaggctgaggcaggagaattgcttgaacccgggaggtggaggtttcagtgagccgagatcacaccactgcactccagcctgggcaacagagcaagactccgtctcaaaaaaagaaaagaaaatgtccttattacagtctcaggtttctcttgccctctgtcatcctagcagtgtggatggttggttgggatcttcgtgtcccgtctcagcacactcgagctctgaagtgaaagtgaggaagggcagggatgggggcacttgagcacaccgtgggccctctgacctcagacccaggctctgccccaccaagtgaccttgggcagggtaccttctctgagctttgtttcctccttggtaaaggcggataatagtgtctgccctgcacacagatgtggacgcagaagcacgtggtgcctgccgggcacaggagtggtgcacagggctcgctgctgtcgggagattgattgctgttgtggaaacgggagggtacttacagaatgaagcacattttttacatacagtacaaatgagtgtgtgctttttaaatggatttaaaattcaaatgcaaatctgcagtttaatctcccaagtgctgatttttctatgtataaagtaggagagtgcaacagcgtatcagaatgaggggctagggagaacgtgtatgtgacctcgagtacctggcatgtaacagacactcagtattacactcctgctatttctccagagcaggtgaaacagacggccaggaagcacacgaagagacactcagcatcactgcttgttaaggaaggtgcaaatcaaaaccacagtgagacgccacttcacacctacaagttcggctagatacaaaaagatcgcaacaagcgtttgcaaggatgtggagaaattggagccctcacacactgctggtggcaaagtggtaacacaggcaggcaggtcgtcaaaaagttaaacatgggccgggtgcaggtgtctcaagcctgtaatcccagcactttggaaggctgagacaggcagattgcttgagcccaggagttcacgaccagcctgggcaacctggtgagaccctgtctctacaaaaaatacagaacaattagctgggcatggtggtgcgtgcctgtgggcccagctactcggcgggctgaggcaggaggatcacttaagccccagaggtcaaggctgcagtaagccatggttgtgccactgcactccagcctgggcaactgagcaagaccctgtctcaaaaaaataaaaaaagataaacatggtgttaccatttgacccagcagtttcatacccaggagaattgaacgcatatgtccacatagaaactcgtacacagaagccaaaatgtggaaacccacgtgtccatcaacagatgaacggttaaacaaaatgtccatccatagaacggaatattattcagtcataaacagaatgaagt

SEQ ID NO: 286295 - DNA, 1853 bp, Homo sapiens
agcacgcacggcgtcggtgcgtgcgcgcccagacgttctgccgggtggcagtcccagcggagtttgcgggtgcgggcgggaccggatttcgtccgtgggcccgggggcggcgggggccggggagtgaggggccggctgagcccacctcgctgggccctccctggcgccccgccttgggcggcggcgagcgcgcgggccgccatgtcgtacatgctcccgcacctgcacaacggctggcaggtggaccaggccatcctctcggaggaggaccgcgtggtcgtcatccgcttcggccacgactgggatcctacgtgcatgaagatggacgaggtcctgtacagcatcgccgagaaggttaaaaattttgcagttatttatcttgtggatattacagaagtgcctgacttcaacaaaatgtatgagttatacgatccatgtactgtcatgtttttcttcaggaacaagcacatcatgattgacttggggactggcaacaacaacaagattaactgggccatggaggacaagcaggagatggtggacatcatcgagacggtgtaccgcggggcccgcaaaggccgcggcctggtggtgtcccccaaggactactccaccaagtaccgctactgaggcgccctcagtctgcgcggataaatgtcgtggagccctttttgtatggaaacgttttaagctatttaaagcctttggaaaatacaggaagctccagggctggagcacctctgagatggaattgataacatggtcttaactcaccgaaataaacaagcacgtggtgagaggagcaggcctacttgtttgttctcaggaaacttaatgaatagattactgattttcctagtcaaagttaattcttacccttggagtaaaacgaaggtgtttatcctgtgagcctgtgcgttttgcatactgggttggtttgctggggctgcggtgacagcatatgccgcgagctgggctttaacagagatgtgtgctctcacagctttgcaggcgggggtctgagatcagggtgtcgcgggtggggggtcactgctgaggccgtgaggggaatctgctcaggcctgtccctggcttctgggggctgctggtggtattttcagttccttggtgtgtggatacttcgccccatctctgccttcacctgtgtcctccctgtgtgggtgctggtgtccaaaatttccccttttcgtagtgacaccagctgtgttggattggggcccaccctgctccagcatggcctaatcttaactaattacatttgcaaggatcttatgtccacaaaagtcacagtctgaggtgctgggggttaggacttcaatatataaattttgcggttacacaattcaatccatgacagaatccaaaggtttactctggttataaaaacagtacaataaaatattgtttatagccttccctgtaaggaataggagagctattttttattcttcccaagattgtatttgatgtaaacatattttctgtagaagccatggcccttcagttcatatagttagaaaatttccttattgccactgcacccggccggaggtacagcttttgctataggtgaggggtaattaacacatcaggaagccacataaaagcacagaagtaaatactgggaaatcctaagtaaactattacctactactaccagacaacaaaaagatactccatgataatctaccagtccgaaagaatcacagcatttgttaaaggtagaaaaggatatttctgaggtttaatgttgccgtcagagcttgaaaatgttcctgaagttcctgaaatagattttctgcctgaaaaaataaaccgtaagacaattgaat

SEQ ID NO: 286296 - DNA, 713 bp, Homo sapiens
atctagaggatcccgtacaagccgcactgcacaacggctggcaggtggaccaggccatcctctcggaggaggaccgcgtggtcgtcatccgcttcggccacgactgggatcctacgtgcatgaagatggacgaggtcctgtacagcatcgccgagaaggttaaaaattttgcagttatttatcttgtggatattacagaagtgcctgacttcaacaaaatgtatgagttatacgatccatgtactgtcatgtttttcttcaggaacaagcacatcatgattgacttggggactggcaacaacaacaagattaactgggccatggaggacaagcaggagatggtggacatcatcgagacggtgtaccgcggggcccgcaaaggccgcggcctggtggtgtcccccaaggactactccaccaagtaccgctactgaggcgccctcagtctgcgcggataaatgtcgtggagccctttttgtatggaaacgttttaagctatttaaagcctttggaaaatacaggaagctccagggctggagcacctctgagatggaattgataacatggtcttaactcaccgaaataaacaagcacgtggtgagaggagcaggcctacttgtttgttctcaggaaacttaatgaatagattactgattttcctagtcaaagttaattcttacccttggagtaaaacgaaggtgtttatcctgtga

SEQ ID NO: 286297 - DNA, 684 bp, Homo sapiens
gcctactactactactaaattcgcggccgcgtcgaggaggaggaccgcgtggtcgtcatccgcttcggccacgactgggatcctacgtgcatgaagatggacgaggtcctgtacagcatcgccgagaaggttaaaaattttgcagttatttatcttgtggatattacagaagtgcctgacttcaacaaaatgtatgagttatacgatccatgtactgtcatgtttttcttcaggaacaagcacatcatgattgacttggggactggcaacaacaacaagattaactgggccatggaggacaagcaggagatggtggacatcatcgagacggtgtaccgcggggcccgcaaaggccgcggcctggtggtgtcccccaaggactactccaccaagtaccgctactgaggcgccctcagtctgcgcggataaatgtcgtggagccctttttgtatggaaacgttttaagctatttaaagcctttggaaaatacaggaagctccagggctggagcacctctgagatggaattgataacatggtcttaactcaccgaaataaacaagcacgtggtgagaggagcaggcctacttgtttgttctcaggaaacttaatgaatagattactgattttcctagtcaaagttaattcttacccttggagtaaaacgaaggtgtttatcctgtga

SEQ ID NO: 286298 - DNA, 1058 bp, Homo sapiens
agcacgcacggcgtcggtgcgtgcgcgcccagacgttctgccgggtggcagtcccagcggagtttgcgggtgcgggcgggaccggatttcgtccgtgggcccgggggcggcgggggccggggagtgaggggccggctgagcccacctcgctgggccctccctggcgccccgccttgggcggcggcgagcgcgcgggccgccatgtcgtacatgctcccgcacctgcacaacggctggcaggtggaccaggccatcctctcggaggaggaccgcgtggtcgtcatccgcttcggccacgactgggatcctacgtgcatgaagatggacgaggtcctgtacagcatcgccgagaaggtggtggcataaacatcgggtggtgttcagatcctgctgccggcagctcgaggctaggatggctggagatgtgagggcctttgtctcatcacatccgagcacagctcagcaagatgctcttagctaggaaacagattttatgtgttaatgttaaaaattttgcagttatttatcttgtggatattacagaagtgcctgacttcaacaaaatgtatgagttatacgatccatgtactgtcatgtttttcttcaggaacaagcacatcatgattgacttggggactggcaacaacaacaagattaactgggccatggaggacaagcaggagatggtggacatcatcgagacggtgtaccgcggggcccgcaaaggccgcggcctggtggtgtcccccaaggactactccaccaagtaccgctactgaggcgccctcagtctgcgcggataaatgtcgtggagccctttttgtatggaaacgttttaagctatttaaagcctttggaaaatacaggaagctccagggctggagcacctctgagatggaattgataacatggtcttaactcaccgaaataaacaagcacgtggtgagaggagcaggcctacttgtttgttctcaggaaacttaatgaatagattactgattttcctagtcaaagttaattcttacccttggagtaaaacgaaggtgtttatcctgtga

SEQ ID NO: 286299 - DNA, 604 bp, Homo sapiens
tcgatctcggtacctgaacattcgtgtcctgtacagcatcgccgagaaggttaaaaattttgcagttatttatcttgtggatattacagaagtgcctgacttcaacaaaatgtatgagttatacgatccatgtactgtcatgtttttcttcaggaacaagcacatcatgattgacttggggactggcaacaacaacaagattaactgggccatggaggacaagcaggagatggtggacatcatcgagacggtgtaccgcggggcccgcaaaggccgcggcctggtggtgtcccccaaggactactccaccaagtaccgctactgaggcgccctcagtctgcgcggataaatgtcgtggagccctttttgtatggaaacgttttaagctatttaaagcctttggaaaatacaggaagctccagggctggagcacctctgagatggaattgataacatggtcttaactcaccgaaataaacaagcacgtggtgagaggagcaggcctacttgtttgttctcaggaaacttaatgaatagattactgattttcctagtcaaagttaattcttacccttggagtaaaacgaaggtgtttatcctgtga

SEQ ID NO: 286300 - DNA, 759 bp, Homo sapiens
agcacgcacggcgtcggtgcgtgcgcgcccagacgttctgccgggtggcagtcccagcggagtttgcgggtgcgggcgggaccggatttcgtccgtgggcccgggggcggcgggggccggggagtgaggggccggctgagcccacctcgctgggccctccctggcgccccgccttgggcggcggcgagcgcgcgggccgccatgtcgtacatgctcccgcacctgcacaacggctggcaggtggaccaggccatcctctcggaggaggaccgcgtggtcgtcatccgcttcggccacgactgggatcctacgtgcatgaagatggacgaggtcctgtacagcatcgccgagaaggttaaaaattttgcagttatttatcttgtggatattacagaagtgcctgacttcaacaaaatgtatgagttatacgatccatgtactgtcatgtttttcttcaggaacaagcacatcatgattgacttggggactggcaacaacaacaagattaactgggccatggaggacaagcaggagatggtggacatcatcgagacggtgtaccgcggggcccgcaaaggccgcggcctggtggtgtcccccaaggactactccaccaagtaccgctactgaggcgccctcagtctgcgcggataaatgtcgtggagccctttttgtatggaaacgttttaagctatttaaagcctttggaaaatacaggaagctccagggctggagcttaataacacggtaccgagctga

SEQ ID NO: 286301 - DNA, 3390 bp, Homo sapiens
agcacgcacggcgtcggtgcgtgcgcgcccagacgttctgccgggtggcagtcccagcggagtttgcgggtgcgggcgggaccggatttcgtccgtgggcccgggggcggcgggggccggggagtgaggggccggctgagcccacctcgctgggccctccctggcgccccgccttgggcggcggcgagcgcgcgggccgccatgtcgtacatgctcccgcacctgcacaacggctggcaggtggaccaggccatcctctcggaggaggaccgcgtggtcgtcatccgcttcggccacgactgggatcctacgtgcatgaagatggacgaggtcctgtacagcatcgccgagaaggtggtggcataaacatcgggtggtgttcagatcctgctgccggcagctcgaggctaggatggctggagatgtgagggcctttgtctcatcacatccgagcacagctcagcaagatgctcttagctaggaaacagattttatgtgttaatgttaaaaattttgcagttatttatcttgtggatattacagaagtgcctgacttcaacaaaatgtatgagttatacgatccatgtactgtcatgtttttcttcagttaccatagaggttggtgaattagctacatgagcattagaccattctccaaaggtggagcctcctactcggaacaagcacatcatgattgacttggggactggcaacaacaacaagattaactgggccatggaggacaagcaggagatggtggacatcatcgagacggtgtaccgcggggcccgcaaaggccgcggcctggtggtgtcccccaaggactactccaccaagtaccgctactgaggcgccctcagtctgcgcggataaatgtcgtggagccctttttgtatggaaacgttttaagctatttaaagcctttggaaaatacaggaagctccagggctggagcacctctgagatggaattgataacatggtcttaactcaccgaaataaacaagcacgtggtgagaggagcaggcctacttgtttgttctcaggaaacttaatgaatagattactgattttcctagtcaaagttaattcttacccttggagtaaaacgaaggtgtttatcctgtgagcctgtgcgttttgcatactgggttggtttgctggggctgcggtgacagcatatgccgcgagctgggctttaacagagatgtgtgctctcacagctttgcaggcgggggtctgagatcagggtgtcgcgggtggggggtcactgctgaggccgtgaggggaatctgctcaggcctgtccctggcttctgggggctgctggtggtattttcagttccttggtgtgtggatacttcgccccatctctgccttcacctgtgtcctccctgtgtgggtgctggtgtccaaaatttccccttttcgtagtgacaccagctgtgttggattggggcccaccctgctccagcatggcctaatcttaactaattacatttgcaaggatcttatgtccacaaaagtcacagtctgaggtgctgggggttaggacttcaatatataaattttgcggttacacaattcaatccatgacagaatccaaaggtttactctggttataaaaacagtacaataaaatattgtttatagccttccctgtaaggaataggagagctattttttattcttcccaagattgtatttgatgtaaacatattttctgtagaagccatggcccttcagttcatatagttagaaaatttccttattggccaggcacggtggctcacacctgtaatcccagcactttgggaggccgaggtgggcagatcacgaagtcaggtgttcgagaccagcctggccaacatggtgaaatcccgtctctactaaaaatacaaaaattagctgggcatggtggcgcgtgcctgtaatcccagctacttggaaggctgaggcaggagaattgcttgaacccgggaggtggaggtttcagtgagccgagatcacaccactgcactccagcctgggcaacagagcaagactccgtctcaaaaaaagaaaagaaaatgtccttattacagtctcaggtttctcttgccctctgtcatcctagcagtgtggatggttggttgggatcttcgtgtcccgtctcagcacactcgagctctgaagtgaaagtgaggaagggcagggatgggggcacttgagcacaccgtgggccctctgacctcagacccaggctctgccccaccaagtgaccttgggcagggtaccttctctgagctttgtttcctccttggtaaaggcggataatagtgtctgccctgcacacagatgtggacgcagaagcacgtggtgcctgccgggcacaggagtggtgcacagggctcgctgctgtcgggagattgattgctgttgtggaaacgggagggtacttacagaatgaagcacattttttacatacagtacaaatgagtgtgtgctttttaaatggatttaaaattcaaatgcaaatctgcagtttaatctcccaagtgctgatttttctatgtataaagtaggagagtgcaacagcgtatcagaatgaggggctagggagaacgtgtatgtgacctcgagtacctggcatgtaacagacactcagtattacactcctgctatttctccagagcaggtgaaacagacggccaggaagcacacgaagagacactcagcatcactgcttgttaaggaaggtgcaaatcaaaaccacagtgagacgccacttcacacctacaagttcggctagatacaaaaagatcgcaacaagcgtttgcaaggatgtggagaaattggagccctcacacactgctggtggcaaagtggtaacacaggcaggcaggtcgtcaaaaagttaaacatgggccgggtgcaggtgtctcaagcctgtaatcccagcactttggaaggctgagacaggcagattgcttgagcccaggagttcacgaccagcctgggcaacctggtgagaccctgtctctacaaaaaatacagaacaattagctgggcatggtggtgcgtgcctgtgggcccagctactcggcgggctgaggcaggaggatcacttaagccccagaggtcaaggctgcagtaagccatggttgtgccactgcactccagcctgggcaactgagcaagaccctgtctcaaaaaaataaaaaaagataaacatggtgttaccatttgacccagcagtttcatacccaggagaattgaacgcatatgtccacatagaaactcgtacacagaagccaaaatgtggaaacccacgtgtccatcaacagatgaacggttaaacaaaatgtccatccatagaacggaatattattcagtcataaacagaatgaagt

SEQ ID NO: 286302 - DNA, 2833 bp, Homo sapiens
tgcgttcttcagtgatgttaacaagagcttgtcacagtgggaaaaatacggcattgttttcaaggaattcttttttaaagagacttctatgagaatggatgcccttgtttctcgttgcaggaacaagcacatcatgattgacttggggactggcaacaacaacaagattaactgggccatggaggacaagcaggagatggtggacatcatcgagacggtgtaccgcggggcccgcaaaggccgcggcctggtggtgtcccccaaggactactccaccaagtaccgctactgaggcgccctcagtctgcgcggataaatgtcgtggagccctttttgtatggaaacgttttaagctatttaaagcctttggaaaatacaggaagctccagggctggagcacctctgagatggaattgataacatggtcttaactcaccgaaataaacaagcacgtggtgagaggagcaggcctacttgtttgttctcaggaaacttaatgaatagattactgattttcctagtcaaagttaattcttacccttggagtaaaacgaaggtgtttatcctgtgagcctgtgcgttttgcatactgggttggtttgctggggctgcggtgacagcatatgccgcgagctgggctttaacagagatgtgtgctctcacagctttgcaggcgggggtctgagatcagggtgtcgcgggtggggggtcactgctgaggccgtgaggggaatctgctcaggcctgtccctggcttctgggggctgctggtggtattttcagttccttggtgtgtggatacttcgccccatctctgccttcacctgtgtcctccctgtgtgggtgctggtgtccaaaatttccccttttcgtagtgacaccagctgtgttggattggggcccaccctgctccagcatggcctaatcttaactaattacatttgcaaggatcttatgtccacaaaagtcacagtctgaggtgctgggggttaggacttcaatatataaattttgcggttacacaattcaatccatgacagaatccaaaggtttactctggttataaaaacagtacaataaaatattgtttatagccttccctgtaaggaataggagagctattttttattcttcccaagattgtatttgatgtaaacatattttctgtagaagccatggcccttcagttcatatagttagaaaatttccttattggccaggcacggtggctcacacctgtaatcccagcactttgggaggccgaggtgggcagatcacgaagtcaggtgttcgagaccagcctggccaacatggtgaaatcccgtctctactaaaaatacaaaaattagctgggcatggtggcgcgtgcctgtaatcccagctacttggaaggctgaggcaggagaattgcttgaacccgggaggtggaggtttcagtgagccgagatcacaccactgcactccagcctgggcaacagagcaagactccgtctcaaaaaaagaaaagaaaatgtccttattacagtctcaggtttctcttgccctctgtcatcctagcagtgtggatggttggttgggatcttcgtgtcccgtctcagcacactcgagctctgaagtgaaagtgaggaagggcagggatgggggcacttgagcacaccgtgggccctctgacctcagacccaggctctgccccaccaagtgaccttgggcagggtaccttctctgagctttgtttcctccttggtaaaggcggataatagtgtctgccctgcacacagatgtggacgcagaagcacgtggtgcctgccgggcacaggagtggtgcacagggctcgctgctgtcgggagattgattgctgttgtggaaacgggagggtacttacagaatgaagcacattttttacatacagtacaaatgagtgtgtgctttttaaatggatttaaaattcaaatgcaaatctgcagtttaatctcccaagtgctgatttttctatgtataaagtaggagagtgcaacagcgtatcagaatgaggggctagggagaacgtgtatgtgacctcgagtacctggcatgtaacagacactcagtattacactcctgctatttctccagagcaggtgaaacagacggccaggaagcacacgaagagacactcagcatcactgcttgttaaggaaggtgcaaatcaaaaccacagtgagacgccacttcacacctacaagttcggctagatacaaaaagatcgcaacaagcgtttgcaaggatgtggagaaattggagccctcacacactgctggtggcaaagtggtaacacaggcaggcaggtcgtcaaaaagttaaacatgggccgggtgcaggtgtctcaagcctgtaatcccagcactttggaaggctgagacaggcagattgcttgagcccaggagttcacgaccagcctgggcaacctggtgagaccctgtctctacaaaaaatacagaacaattagctgggcatggtggtgcgtgcctgtgggcccagctactcggcgggctgaggcaggaggatcacttaagccccagaggtcaaggctgcagtaagccatggttgtgccactgcactccagcctgggcaactgagcaagaccctgtctcaaaaaaataaaaaaagataaacatggtgttaccatttgacccagcagtttcatacccaggagaattgaacgcatatgtccacatagaaactcgtacacagaagccaaaatgtggaaacccacgtgtccatcaacagatgaacggttaaacaaaatgtccatccatagaacggaatattattcagtcataaacagaatgaagt

SEQ ID NO: 286303 - DNA, 1016 bp, Homo sapiens
agcacgcacggcgtcggtgcgtgcgcgcccagacgttctgccgggtggcagtcccagcggagtttgcgggtgcgggcgggaccggatttcgtccgtgggcccgggggcggcgggggccggggagtgaggggccggctgagcccacctcgctgggccctccctggcgccccgccttgggcggcggcgagcgcgcgggccgccatgtcgtacatgctcccgcacctgcacaacggctggcaggtggaccaggccatcctctcggaggaggaccgcgtggtcgtcatccgcttcggccacgactgggatcctacgtgcatgaagatggacgaggtcctgtacagcatcgccgagaaggtggtggcataaacatcgggtggtgttcagatcctgctgccggcagctcgaggctaggatggctggagatgtgagggcctttgtctcatcacatccgagcacagctcagcaagatgctcttagctaggaaacagattttatgtgttaatgttaaaaattttgcagttatttatcttgtggatattacagaagtgcctgacttcaacaaaatgtatgagttatacgatccatgtactgtcatgtttttcttcagttaccatagaggttggtgaattagctacatgagcattagaccattctccaaaggtggagcctcctactcggaacaagcacatcatgattgacttggggactggcaacaacaacaagattaactgggccatggaggacaagcaggagatggtggacatcatcgagacggtgtaccgcggggcccgcaaaggccgcggcctggtggtgtcccccaaggactactccaccaagtaccgctactgaggcgccctcagtctgcgcggataaatgtcgtggagccctttttgtatggaaacgttttaagctatttaaagcctttggaaaatacaggaagctccagggctggagcacctctgagatggaattgataacatggtcttaactcaccgaaataaacaagcacgtggtga

SEQ ID NO: 286304 - DNA, 853 bp, Homo sapiens
agcacgcacggcgtcggtgcgtgcgcgcccagacgttctgccgggtggcagtcccagcggagtttgcgggtgcgggcgggaccggatttcgtccgtgggcccgggggcggcgggggccggggagtgaggggccggctgagcccacctcgctgggccctccctggcgccccgccttgggcggcggcgagcgcgcgggccgccatgtcgtacatgctcccgcacctgcacaacggctggcaggtggaccaggccatcctctcggaggaggaccgcgtggtcgtcatccgcttcggccacgactgggatcctacgtgcatgaagatggacgaggtcctgtacagcatcgccgagaaggttaaaaattttgcagttatttatcttgtggatattacagaagtgcctgacttcaacaaaatgtatgagttatacgatccatgtactgtcatgtttttcttcaggaacaagcacatcatgattgacttggggactggcaacaacaacaagattaactgggccatggaggacaagcaggagatggtggacatcatcgagacggtgtaccgcggggcccgcaaaggccgcggcctggtggtgtcccccaaggactactccaccaagtaccgctactgaggcgccctcagtctgcgcggataaatgtcgtggagccctttttgtatggaaacgttttaagctatttaaagcctttggaaaatacaggaagctccagggctggagcacctctgagatggaattgataacatggtcttaactcaccgaaataaacaagcacgtggtgagcgatgcggccgaagtcttgtcttacaataaagatcttacgtaacatatagtctct

SEQ ID NO: 286305 - DNA, 953 bp, Homo sapiens
agacgtatctaccgagtaacagtcccaacaaagatattagtaggggcgagcagagcagagcacagcgaaagccagccatatacgtaacataactacccagcacctaagcacagacgagctaagacagagtagagaccaagaccatacctacacaggagagaggaccgcgtggtcgtcatccgcttcggccacgactgggatcctacgtgcatgaagatggacgaggtcctgtacagcatcgccgagaaggtggtggcataaacatcgggtggtgttcagatcctgctgccggcagctcgaggctaggatggctggagatgtgagggcctttgtctcatcacatccgagcacagctcagcaagatgctcttagctaggaaacagattttatgtgttaatgttaaaaattttgcagttatttatcttgtggatattacagaagtgcctgacttcaacaaaatgtatgagttatacgatccatgtactgtcatgtttttcttcaggaacaagcacatcatgattgacttggggactggcaacaacaacaagattaactgggccatggaggacaagcaggagatggtggacatcatcgagacggtgtaccgcggggcccgcaaaggccgcggcctggtggtgtcccccaaggactactccaccaagtaccgctactgaggcgccctcagtctgcgcggataaatgtcgtggagccctttttgtatggaaacgttttaagctatttaaagcctttggaaaatacaggaagctccagggctggagcacctctgagatggaattgataacatggtcttaactcaccgaaataaacaagcacgtggtgagaggagcaggcctacttgtttgttctcaggaaacttaatgaatagattactgattttcctagtcaaagttaattcttacccttggagtaaaacgaaggtgtttatcctgtga

SEQ ID NO: 286306 - DNA, 634 bp, Homo sapiens
  misc_feature (28)..(28): n is a, c, g, or t
  misc_feature (30)..(30): n is a, c, g, or t
  misc_feature (36)..(36): n is a, c, g, or t
aagactgaagcgagaagggcagcgcgantnggcacnacggcgagcgagcggcgtgtaggcggggtgaagacaacgccaggttaaaaattttgcagttatttatcttgtggatattacagaagtgcctgacttcaacaaaatgtatgagttatacgatccatgtactgtcatgtttttcttcaggaacaagcacatcatgattgacttggggactggcaacaacaacaagattaactgggccatggaggacaagcaggagatggtggacatcatcgagacggtgtaccgcggggcccgcaaaggccgcggcctggtggtgtcccccaaggactactccaccaagtaccgctactgaggcgccctcagtctgcgcggataaatgtcgtggagccctttttgtatggaaacgttttaagctatttaaagcctttggaaaatacaggaagctccagggctggagcacctctgagatggaattgataacatggtcttaactcaccgaaataaacaagcacgtggtgagaggagcaggcctacttgtttgttctcaggaaacttaatgaatagattactgattttcctagtcaaagttaattcttacccttggagtaaaacgaaggtgtttatcctgtga

SEQ ID NO: 286307 - DNA, 3241 bp, Homo sapiens
agcacgcacggcgtcggtgcgtgcgcgcccagacgttctgccgggtggcagtcccagcggagtttgcgggtgcgggcgggaccggatttcgtccgtgggcccgggggcggcgggggccggggagtgaggggccggctgagcccacctcgctgggccctccctggcgccccgccttgggcggcggcgagcgcgcgggccgccatgtcgtacatgctcccgcacctgcacaacggctggcaggtggaccaggccatcctctcggaggaggaccgcgtggtcgtcatccgcttcggccacgactgggatcctacgtgcatgaagatggacgaggtcctgtacagcatcgccgagaaggttaaaaattttgcagttatttatcttgtggatattacagaagtgcctgacttcaacaaaatgtatgagttatacgatccatgtactgtcatgtttttcttcagttaccatagaggttggtgaattagctacatgagcattagaccattctccaaaggtggagcctcctactcggaacaagcacatcatgattgacttggggactggcaacaacaacaagattaactgggccatggaggacaagcaggagatggtggacatcatcgagacggtgtaccgcggggcccgcaaaggccgcggcctggtggtgtcccccaaggactactccaccaagtaccgctactgaggcgccctcagtctgcgcggataaatgtcgtggagccctttttgtatggaaacgttttaagctatttaaagcctttggaaaatacaggaagctccagggctggagcacctctgagatggaattgataacatggtcttaactcaccgaaataaacaagcacgtggtgagaggagcaggcctacttgtttgttctcaggaaacttaatgaatagattactgattttcctagtcaaagttaattcttacccttggagtaaaacgaaggtgtttatcctgtgagcctgtgcgttttgcatactgggttggtttgctggggctgcggtgacagcatatgccgcgagctgggctttaacagagatgtgtgctctcacagctttgcaggcgggggtctgagatcagggtgtcgcgggtggggggtcactgctgaggccgtgaggggaatctgctcaggcctgtccctggcttctgggggctgctggtggtattttcagttccttggtgtgtggatacttcgccccatctctgccttcacctgtgtcctccctgtgtgggtgctggtgtccaaaatttccccttttcgtagtgacaccagctgtgttggattggggcccaccctgctccagcatggcctaatcttaactaattacatttgcaaggatcttatgtccacaaaagtcacagtctgaggtgctgggggttaggacttcaatatataaattttgcggttacacaattcaatccatgacagaatccaaaggtttactctggttataaaaacagtacaataaaatattgtttatagccttccctgtaaggaataggagagctattttttattcttcccaagattgtatttgatgtaaacatattttctgtagaagccatggcccttcagttcatatagttagaaaatttccttattggccaggcacggtggctcacacctgtaatcccagcactttgggaggccgaggtgggcagatcacgaagtcaggtgttcgagaccagcctggccaacatggtgaaatcccgtctctactaaaaatacaaaaattagctgggcatggtggcgcgtgcctgtaatcccagctacttggaaggctgaggcaggagaattgcttgaacccgggaggtggaggtttcagtgagccgagatcacaccactgcactccagcctgggcaacagagcaagactccgtctcaaaaaaagaaaagaaaatgtccttattacagtctcaggtttctcttgccctctgtcatcctagcagtgtggatggttggttgggatcttcgtgtcccgtctcagcacactcgagctctgaagtgaaagtgaggaagggcagggatgggggcacttgagcacaccgtgggccctctgacctcagacccaggctctgccccaccaagtgaccttgggcagggtaccttctctgagctttgtttcctccttggtaaaggcggataatagtgtctgccctgcacacagatgtggacgcagaagcacgtggtgcctgccgggcacaggagtggtgcacagggctcgctgctgtcgggagattgattgctgttgtggaaacgggagggtacttacagaatgaagcacattttttacatacagtacaaatgagtgtgtgctttttaaatggatttaaaattcaaatgcaaatctgcagtttaatctcccaagtgctgatttttctatgtataaagtaggagagtgcaacagcgtatcagaatgaggggctagggagaacgtgtatgtgacctcgagtacctggcatgtaacagacactcagtattacactcctgctatttctccagagcaggtgaaacagacggccaggaagcacacgaagagacactcagcatcactgcttgttaaggaaggtgcaaatcaaaaccacagtgagacgccacttcacacctacaagttcggctagatacaaaaagatcgcaacaagcgtttgcaaggatgtggagaaattggagccctcacacactgctggtggcaaagtggtaacacaggcaggcaggtcgtcaaaaagttaaacatgggccgggtgcaggtgtctcaagcctgtaatcccagcactttggaaggctgagacaggcagattgcttgagcccaggagttcacgaccagcctgggcaacctggtgagaccctgtctctacaaaaaatacagaacaattagctgggcatggtggtgcgtgcctgtgggcccagctactcggcgggctgaggcaggaggatcacttaagccccagaggtcaaggctgcagtaagccatggttgtgccactgcactccagcctgggcaactgagcaagaccctgtctcaaaaaaataaaaaaagataaacatggtgttaccatttgacccagcagtttcatacccaggagaattgaacgcatatgtccacatagaaactcgtacacagaagccaaaatgtggaaacccacgtgtccatcaacagatgaacggttaaacaaaatgtccatccatagaacggaatattattcagtcataaacagaatgaagt

SEQ ID NO: 286308 - DNA, 3067 bp, Homo sapiens
agcacgcacggcgtcggtgcgtgcgcgcccagacgttctgccgggtggcagtcccagcggagtttgcgggtgcgggcgggaccggatttcgtccgtgggcccgggggcggcgggggccggggagtgaggggccggctgagcccacctcgctgggccctccctggcgccccgccttgggcggcggcgagcgcgcgggccgccatgtcgtacatgctcccgcacctgcacaacggctggcaggtggaccaggccatcctctcggaggaggaccgcgtggtcgtcatccgcttcggccacgactgggatcctacgtgcatgaagatggacgaggtcctgtacagcatcgccgagaaggaacaagcacatcatgattgacttggggactggcaacaacaacaagattaactgggccatggaggacaagcaggagatggtggacatcatcgagacggtgtaccgcggggcccgcaaaggccgcggcctggtggtgtcccccaaggactactccaccaagtaccgctactgaggcgccctcagtctgcgcggataaatgtcgtggagccctttttgtatggaaacgttttaagctatttaaagcctttggaaaatacaggaagctccagggctggagcacctctgagatggaattgataacatggtcttaactcaccgaaataaacaagcacgtggtgagaggagcaggcctacttgtttgttctcaggaaacttaatgaatagattactgattttcctagtcaaagttaattcttacccttggagtaaaacgaaggtgtttatcctgtgagcctgtgcgttttgcatactgggttggtttgctggggctgcggtgacagcatatgccgcgagctgggctttaacagagatgtgtgctctcacagctttgcaggcgggggtctgagatcagggtgtcgcgggtggggggtcactgctgaggccgtgaggggaatctgctcaggcctgtccctggcttctgggggctgctggtggtattttcagttccttggtgtgtggatacttcgccccatctctgccttcacctgtgtcctccctgtgtgggtgctggtgtccaaaatttccccttttcgtagtgacaccagctgtgttggattggggcccaccctgctccagcatggcctaatcttaactaattacatttgcaaggatcttatgtccacaaaagtcacagtctgaggtgctgggggttaggacttcaatatataaattttgcggttacacaattcaatccatgacagaatccaaaggtttactctggttataaaaacagtacaataaaatattgtttatagccttccctgtaaggaataggagagctattttttattcttcccaagattgtatttgatgtaaacatattttctgtagaagccatggcccttcagttcatatagttagaaaatttccttattggccaggcacggtggctcacacctgtaatcccagcactttgggaggccgaggtgggcagatcacgaagtcaggtgttcgagaccagcctggccaacatggtgaaatcccgtctctactaaaaatacaaaaattagctgggcatggtggcgcgtgcctgtaatcccagctacttggaaggctgaggcaggagaattgcttgaacccgggaggtggaggtttcagtgagccgagatcacaccactgcactccagcctgggcaacagagcaagactccgtctcaaaaaaagaaaagaaaatgtccttattacagtctcaggtttctcttgccctctgtcatcctagcagtgtggatggttggttgggatcttcgtgtcccgtctcagcacactcgagctctgaagtgaaagtgaggaagggcagggatgggggcacttgagcacaccgtgggccctctgacctcagacccaggctctgccccaccaagtgaccttgggcagggtaccttctctgagctttgtttcctccttggtaaaggcggataatagtgtctgccctgcacacagatgtggacgcagaagcacgtggtgcctgccgggcacaggagtggtgcacagggctcgctgctgtcgggagattgattgctgttgtggaaacgggagggtacttacagaatgaagcacattttttacatacagtacaaatgagtgtgtgctttttaaatggatttaaaattcaaatgcaaatctgcagtttaatctcccaagtgctgatttttctatgtataaagtaggagagtgcaacagcgtatcagaatgaggggctagggagaacgtgtatgtgacctcgagtacctggcatgtaacagacactcagtattacactcctgctatttctccagagcaggtgaaacagacggccaggaagcacacgaagagacactcagcatcactgcttgttaaggaaggtgcaaatcaaaaccacagtgagacgccacttcacacctacaagttcggctagatacaaaaagatcgcaacaagcgtttgcaaggatgtggagaaattggagccctcacacactgctggtggcaaagtggtaacacaggcaggcaggtcgtcaaaaagttaaacatgggccgggtgcaggtgtctcaagcctgtaatcccagcactttggaaggctgagacaggcagattgcttgagcccaggagttcacgaccagcctgggcaacctggtgagaccctgtctctacaaaaaatacagaacaattagctgggcatggtggtgcgtgcctgtgggcccagctactcggcgggctgaggcaggaggatcacttaagccccagaggtcaaggctgcagtaagccatggttgtgccactgcactccagcctgggcaactgagcaagaccctgtctcaaaaaaataaaaaaagataaacatggtgttaccatttgacccagcagtttcatacccaggagaattgaacgcatatgtccacatagaaactcgtacacagaagccaaaatgtggaaacccacgtgtccatcaacagatgaacggttaaacaaaatgtccatccatagaacggaatattattcagtcataaacagaatgaagt

SEQ ID NO: 286309 - DNA, 946 bp, Homo sapiens
agcacgcacggcgtcggtgcgtgcgcgcccagacgttctgccgggtggcagtcccagcggagtttgcgggtgcgggcgggaccggatttcgtccgtgggcccgggggcggcgggggccggggagtgaggggccggctgagcccacctcgctgggccctccctggcgccccgccttgggcggcggcgagcgcgcgggccgccatgtcgtacatgctcccgcacctgcacaacggctggcaggtggaccaggccatcctctcggaggaggaccgcgtggtcgtcatccgcttcggccacgactgggatcctacgtgcatgaagatggacgaggtcctgtacagcatcgccgagaaggtggtggcataaacatcgggtggtgttcagatcctgctgccggcagctcgaggctaggatggctggagatgtgagggcctttgtctcatcacatccgagcacagctcagcaagatgctcttagctaggaaacagattttatgtgttaatgttaaaaattttgcagttatttatcttgtggatattacagaagtgcctgacttcaacaaaatgtatgagttatacgatccatgtactgtcatgtttttcttcaggaacaagcacatcatgattgacttggggactggcaacaacaacaagattaactgggccatggaggacaagcaggagatggtggacatcatcgagacggtgtaccgcggggcccgcaaaggccgcggcctggtggtgtcccccaaggactactccaccaagtaccgctactgaggcgccctcagtctgcgcggataaatgtcgtggagccctttttgtatggaaacgttttaagctatttaaagcctttggaaaatacaggaagctccagggctggagcacctctgagatggaattgataacatggtcttaactcaccgaaataaacaagcacgtggtga

SEQ ID NO: 286310 - DNA, 1361 bp, Homo sapiens
agcggccgcagctgaagttgggccgagagccggcgacggccccgcgccggggtcgcagggtaccagtgtgcggagttcctgttgccaagctgaaggtggccctgggcaggcacaggtgtggtcatatcttcagccaacaggaccatcctccggagggccacctctggggacttcctacgggaagagagtgacagatttggtgcttctgtgtgtttctgccgcttcagtggggccgctgcgggagacagcgggtggatcctccagcagcctgtctgctgagcctgccttctcaagtctactgttaaaatcaggaccgggtcgtgtccgagcctacaggccctgtctccgctccccaggcctgcaggagttgagggctgcacctgctcgctggagagggagaggcagatttagtggacgcctggcatggactcggactggcctttggaagctccctgccctgacggggttgcctgtcaccactgcgaagtgaggcttggcaggacctgcacctgagaaaggctgtgtgtggtcttggggtccacacctgcagagctaacttactgccagacggcgacttactgtgggccaccctcagtgaaccggggtgtcctcagctggccctacagagcacttctgtgctggggatgagtaggaactctgggcgaggagggtcccagcgccgcccctcgatacagcctggctctgccctctgcccgtacttataccaggtgggatccctgccctgcattgcctggggattggctgggcttgggcccgccctgctgtggaactggatgttttcagggagcccagcctttcctcatgtcaacacagttcacaatatagttttcaaagtacagtttaaaactcaaaagtaaacttttcagcaactcaaaggtttgctgagtgatctgaagcactctggccactttttggggccatgggatttggttcacctgaaacagccagtgagaggccgggtgtggtggctcacacccgtaatcccaacacttcaggaggcagacgcgggtgatcgctcacttgagatcaggagttcaagaccagcctgggcaacatggtgaaacctcgtctctactaaaaatacaaaaattagctaggcatggtggtgggcacctgtaatcccagctacttggaaggctgaggcaagagaatcgcttgaacctgggaggtggaggttgcagcgagacgagattacgccgctgcactccagcctgggtgacgagagactctgcctcaaaaaaataaaaaaatgaaacagccagtgaggaggaaggctccccgccttccccccgccggaacatagccatagctgctgctgggacaccctcttggtggggaag

SEQ ID NO: 286311 - DNA, 1079 bp, Homo sapiens
cgcgaccctcctggccccgtgtccgggtctggcgggcaggcgagcggccacacggggacgcgagggcagctggataccgtggggagggggtgccctatggacggggtgtgcctgtctggccagcagggacggcgggtgggggtaagcgaaatcattcgggggctttgctgccctccgcttggtggggctgaggctgggccagataccctcttggagggaactttcttttccttgtgtgtccagggtaccagtgtgcggagttcctgttgccaagctgaaggtggccctgggcaggcacaggtgtggtcatatcttcagccaacaggaccatcctccggagggccacctctggggacttcctacgggaagagagtgacagatttggtgcttctgtgtgtttctgccgcttcagtggggccgctgcgggagacagcgggtggatcctccagcagcctgtctgctgagcctgccttctcaagtctactgttaaaatcaggaccgggtcgtgtccgagcctacaggccctgtctccgctccccaggcctgcaggagttgagggctgcacctgctcgctggagagggagaggcagatttagtggacgcctggcatggactcggactggcctttggaagctccctgccctgacggggttgcctgtcaccactgcgaagtgaggcttggcaggacctgcacctgagaaaggctgtgtgtggtcttggggtccacacctgcagagctaacttactgccagacggcgacttactgtgggccaccctcagtgaaccggggtgtcctcagctggccctacagagcacttctgtgctggggatgagtaggaactctgggcgaggagggtcccagcgccgcccctcgatacagcctggctctgccctctgcccgtacttataccaggtgggatccctgccctgcattgcctggggattggctgggcttgggcccgccctgctgtggaactggatgttttcagggagcccagcctttcctcatgtcaacacagttcacaatatagttttcaaagtacagtttaaaactcaaaagtaaacttttcagcaactca

SEQ ID NO: 286312 - DNA, 915 bp, Homo sapiens
agcggccgcagctgaagttgggccgagagccggcgacggccccgcgccggggtcgcaggtgacgcgcgagggatcccagggtaccagtgtgcggagttcctgttgccaagctgaaggtggccctgggcaggcacaggtgtggtcatatcttcagccaacaggaccatcctccggagggccacctctggggacttcctacgggaagagagtgacagatttggtgcttctgtgtgtttctgccgcttcagtggggccgctgcgggagacagcgggtggatcctccagcagcctgtctgctgagcctgccttctcaagtctactgttaaaatcaggaccgggtcgtgtccgagcctacaggccctgtctccgctccccaggcctgcaggagttgagggctgcacctgctcgctggagagggagaggcagatttagtggacgcctggcatggactcggactggcctttggaagctccctgccctgacggggttgcctgtcaccactgcgaagtgaggcttggcaggacctgcacctgagaaaggctgtgtgtggtcttggggtccacacctgcagagctaacttactgccagacggcgacttactgtgggccaccctcagtgaaccggggtgtcctcagctggccctacagagcacttctgtgctggggatgagtaggaactctgggcgaggagggtcccagcgccgcccctcgatacagcctggctctgccctctgcccgtacttataccaggtgggatccctgccctgcattgcctggggattggctgggcttgggcccgccctgctgtggaactggatgttttcagggagcccagcctttcctcatgtcaacacagttcacaatatagttttcaaagtacagtttaaaactcaaaagtaaacttttcagcaactca

SEQ ID NO: 286313 - DNA, 894 bp, Homo sapiens
agcggccgcagctgaagttgggccgagagccggcgacggccccgcgccggggtcgcagggtaccagtgtgcggagttcctgttgccaagctgaaggtggccctgggcaggcacaggtgtggtcatatcttcagccaacaggaccatcctccggagggccacctctggggacttcctacgggaagagagtgacagatttggtgcttctgtgtgtttctgccgcttcagtggggccgctgcgggagacagcgggtggatcctccagcagcctgtctgctgagcctgccttctcaagtctactgttaaaatcaggaccgggtcgtgtccgagcctacaggccctgtctccgctccccaggcctgcaggagttgagggctgcacctgctcgctggagagggagaggcagatttagtggacgcctggcatggactcggactggcctttggaagctccctgccctgacggggttgcctgtcaccactgcgaagtgaggcttggcaggacctgcacctgagaaaggctgtgtgtggtcttggggtccacacctgcagagctaacttactgccagacggcgacttactgtgggccaccctcagtgaaccggggtgtcctcagctggccctacagagcacttctgtgctggggatgagtaggaactctgggcgaggagggtcccagcgccgcccctcgatacagcctggctctgccctctgcccgtacttataccaggtgggatccctgccctgcattgcctggggattggctgggcttgggcccgccctgctgtggaactggatgttttcagggagcccagcctttcctcatgtcaacacagttcacaatatagttttcaaagtacagtttaaaactcaaaagtaaacttttcagcaactca

SEQ ID NO: 286314 - DNA, 821 bp, Homo sapiens
agcggccgcagctgaagttgggccgagagccggcgacggccccgcgccggggtcgcagggtaccagtgtgcggagttcctgttgccaagctgaaggtggccctgggcaggcacaggtgtggtcatatcttcagccaacaggaccatcctccggagggccacctctggggacttcctacgggaagagagtgacagatttggtgcttctgtgtgtttctgccgcttcagtggggccgctgcgggagacagcgggtggatcctccagcagcctgtctgctgagcctgccttctcaagtctactgttaaaatcaggaccgggtcgtgtccgagcctacaggccctgtctccgctccccaggcctgcaggagttgagggctgcacctgctcgctggagagggagaggcagatttagtggacgcctggcatggactcggactggcctttggaagctccctgccctgacggggttgcctgtcaccactgcgaagtgaggcttggcaggacctgcacctgagaaaggctgtgtgtggtcttggggtccacacctgcagagctaacttactgccagacggcgacttactgtgggccaccctcagtgaaccggggtgtcctcagctggccctacagagcacttctgtgctggggatgagtaggaactctgggcgaggagggtcccagcgccgcccctcgatacagcctggctctgccctctgcccgtacttataccaggtgtggtcatatcttcagccaacaggaccatcctccggagggccacctctggggacttcctacgggaagagagtgacagatttggtgcttctg

SEQ ID NO: 286315 - DNA, 929 bp, Homo sapiens
  misc_feature (904)..(904): n is a, c, g, or t
tactatctcctatatcgcttgctgtctttctaggacaagaacatgtactctcataaagggcagatccctcagacgggtggtagagatgagtgacgtctgaccctcgctgctgcctgtcgcgggagaggaacaagctttcgactagcgcctctccccggggcccgcgccccgagccccacgcgcaagacagcccaacagctgttcctcccctccccgccgactccaactcttcggaatctgcccactcggggctgcagggcaagtgtttaggatggttcccagccccgcgctggcggtgaaaatttcaacgtcattccttcaattaaaaaaaggggggggggcaagggaggggctttgtgataactactcccagcttcttctgatcatttcaaaattaagtcgattttttttaaccagtccccacttactgtcctaactctcctcgctgaccctatctgggagcccggaaccgttaggtactgccgaatgcggtgcaaaatttccccctctcccccagttcgcagtgcctggagccgctggggttactcgtctgttctgatgccaccgcgagatggtccccgagctccccgagagtcctcagtgaaaggattccgcggcactgcctctattattataccgtaaatctttttaaattctggaactaattatatagaggatatgtctcaatttgttctgcattaatgccacagtggggatggaggccaggccgtggccagagcagatacgtaggcccatgaaattgatgaactgagagttgcttccagtcctgagcgcaccatctggaattccagtctgaggttacaattagaactcctgaccccagattcaactttgcaaacaacaggggaaaaaaatggggaaaagaaaaaccacgagagagggnaaaaaaattattctgcacctgtaaa

SEQ ID NO: 286316 - DNA, 6013 bp, Homo sapiens
  misc_feature (1)..(1): n is a, c, g, or t
  misc_feature (4)..(4): n is a, c, g, or t
  misc_feature (7)..(7): n is a, c, g, or t
  misc_feature (472)..(472): n is a, c, g, or t
  misc_feature (1081)..(1081): n is a, c, g, or t
  misc_feature (2062)..(2062): n is a, c, g, or t
  misc_feature (2161)..(2161): n is a, c, g, or t
  misc_feature (2314)..(2314): n is a, c, g, or t
  misc_feature (2372)..(2372): n is a, c, g, or t
  misc_feature (3197)..(3197): n is a, c, g, or t
  misc_feature (3323)..(3324): n is a, c, g, or t
  misc_feature (3339)..(3339): n is a, c, g, or t
  misc_feature (3341)..(3341): n is a, c, g, or t
  misc_feature (3455)..(3455): n is a, c, g, or t
  misc_feature (3472)..(3472): n is a, c, g, or t
  misc_feature (3618)..(3618): n is a, c, g, or t
  misc_feature (5988)..(5988): n is a, c, g, or t
natncgngggagctatccacggacacgacgctgttccagaaagccatttagttactggaggtgcatgtgctcattctagttctctacgatacttaatgtgcacctaagtgtgtgccaacaccgtattataagggctggaggtgctcctggacattttagcgctgcggaggcagcacagcacaggcgctcacccccgcgctggtcccactccgaatccagagtccagacgtctgaaaagcgctacgcttggtgacaatttggcgtttccttaattaacaaaactctccccaaggcagagccagacactgcgccggtctcctggttccactcccgtggggactagcagtcccggaatctctcggactctaaggggccccagacgccctcccggctcttgcgaacagtcaggctcctagctctgcctggctttggaggatgtcgggggccagtgcctgcgtgcactcccactctncggcctcctccccagccgccgcttccgctatcctcacggcccttgggaagcagctgggtaagagctgcggtcaaaaggggtaggagaggggggtgtcctagagcggagagtccctggcgccactgccccgcgcgtagggggcgctccccggcctacttaccctgattgcgaatagcgggctggctctcgaggcagctgggcaggtagggcgcgttaggaaacatcctggcctggccggatgacgcctggctgggcggaggaggaccgaagggcccgtagcgacaggctccggctgtgccagtgaactggccggaaaagtggacagtgaaggcgctcaggcactgctcctcgtgcggctccgcgccgccccagctcggctcctgtttgatgaaggagtgaggcggcggcggcgggggtggcggcggagccggtggcggcgcggggccgcccaacgacccgtaagccgaagcgcccgggggcgcaaagtccagcaccggcgcccactgcgccgcgccgctcacaggcagggcacagccgccgccgccacccagggaggggacggcgggcagcagcgcgttcaggtcccgcacgtcggagcccatttgctgnggctcagacccggacgccccgcggctcctccggccctggagacgttcagcgctggcctcggcggcgcctaacttggcccagatgccgcccgggtcccggactccctgctgctctggctgctgtaggcacccaggcccggagcggagcgtgtgctgagacgccggctccgggacacacgtggaagccgggtcctgcagcaagaggaagtccaggatcgcggcgaggagacggcggggcccgggcgcctgggctgccgtcccggctctgggtgggtgggtgggtgaatgagtaggtgggagggagggcgggaagtgggggagcggacaggcggtcgggttgcggagagcccccgggtgtgggcgctgccttgaactccttaccccagctgcctggctgccctcagcttcccaaagctcaaataagaggggccggcggcgcggggaggaggaggagccaggaggctcggccgctccattcactcagcagcccaagcccggccaggcagcgcgcgctgctccttgggggcgccctcgcagctggggtgagggcgggtccgagggagcgtccctctcggagacaccctcctcttcaacccaacacgcgctctcagctggccggtgtggcacaaccctccccccacctccccttcttggccttcgccagtgtgggagcctcgtctcactggagagtccgttcaggtaagcagtgagtccgggcagggtcgaatgcggtgggagtagagatggggttgttaatctaaaagagtggtttggagggaggggcaggtaggctccaagagggcgggaacttcaggaaagcgcagaaagaactcagtcaagcttcaaagaagcgtatacccttgctttgcacccttgagtctggctcttgcttctagaactgtcgggtaggggagtggccatgatcttggggtcactggggaaagaggtggccctttgtgggttccagaggtcgggactgaangcgaacgtccctcagttgggtggccgggagttgcaccagttataagccgggcgtatttcgatcggctagtagttgtttacttggtgaggtttgcgccangcggaaggcggttgccgcctacctaaaattggagtcagcagcacttagtttccctttccagtgaggaatatctaattcttctacggttaagccgggaaaacagcggctagtttaggagggaagaaaacccttgggcaaacgcccaaagcctgngtatattccggccggagcatcctggcgcccagtttggggaggaggggtgaaggggagngtttggatacgaagcccggcagggagcgggtaactcctggagccactccgccgagcactgcctgtggccctggtcgaggataccattctggttgctcagtgattgaccaggaggcggaagccagttaaggggaccaaggagtggagtagggagaacctccatcggcccacgggcgcgagttagtgttcgaatctttgggagctcgaagagcttcgctaaatctgactcccttcatctagtctctgtttggcagcccccgcgccccagagcaggtgtttggggcgggtagggggtgttgttttggtttggtttttggatcttctaaaggagtcagtatctattgggaaacaacccctaggcaaggagaagaaccgggggccggagcggagcgtgtttcagaggtgcgtataaaatcccaggggcgccaggaggcagcagcgacggcgcagcgtgggacggccaggcgcgacgggagggaagcaaccggttgcagtccggcctcctgtacctggctggcccgggctagggctgcaagctttccagccaaacttatgtgaagcaaagtagttgcagtttgacaaagaatggcgtttcaataaatgacatagtaattttttacgctttggtttttagcttgcattgcataaacgttgtcgccattaaattctggctgcggacccgaagtgtgtgcgggcccaggacttactcgaagggcgcacttcttgggaatgcgcatcccgtaggcgcaggagaccctgagggtaaagatgcggcacttgagccctccgcttgcctcccaggccacctttgctgcttgactttgcntcgtctccactcagaagcttttaaaattattattaagaaaagaaagattctacaagacactgcccccacgctctctgctcagtcctctcccacacgatctatccctaaacctttcgcggggctcgnncgtttggttttttgngnggagaaaggactctcgagacaaaattcactgccagttgccctaagaaccccccagatccctgtatctcccttccttctccccgcctattatttctacttggaagtcgtttttcntaactaggactcaactntgaggggcgaggagccctttatgaaaagccggggactttcatttccaaacgaaaagattgagattgtttcttcttttaccatccttggcacttttagcggggggagaggaggttatctgaagggaggctggcttgaatgtgagtcnttgtgtttgtgaaacccaggtaaggcaaagacacgtaaatctctgccaacatttttcaaaaataagtttttgccccggggtgagggatgtaggggtggataggaggaaaggagagccaagcaaatgtagaactcctctctcctctgccatttattttctcagaatccttgtgggggcggggaggggaagagcaccggtgcgaaccccggggtgccccctcgcccgacttggacttctccgactaaagaggtgggaggagttccctgcagcctgcggggccaagaagaaagtgctaagctgaggagccgcagtcggaggaccccagggacccgacaggaagtctccgtacgaccccaacggatccacatgcccggaagcccaggcgacactaagccagcgctggggaactgacgtactcctgcagtcgcagggcgctccatgcctctctgtcctcttctttgttgtgggtaacgttctctgcgggagacctgaggttttccaagggggacatgccagctacactggccttggcgccctgagctaagcaccaggactcacagcctagcacgaaggcaggtagcaccttcacccgccgcggacgataggcgctctcctgtacctcctttagctcgcgaggcccgcccttcgcgaggtcccagagaaaagcaggctgtggaaaactgggcgcccccttctttcacccaccttcttacccctgtcagcgccgagatctgtagcagaggttcctggtctgaaccaccgattggcaaagaaagctgcagattaaacttctcgttttacagagaaggaaactgaggcccagacagccgaaggagaggcagtctatggagcgcagcggtaaagagcaaggggttggtggccccagaatggaacctcagctctgccaggtaaccaacagctgtgtgaccctagacgagttccgcagtctctctgagcctcagtttccttactggtcaaacgggataatgggatactagcgcccacctcatagagttgttctgaggattagataggagagcagtgtgggcctttgactcaatcaactttacagtttttgttactactactgtttaaggacaggaaacaagttagtggcaacgccgagctgaaacccgggtctctcaacgtccagttggaggttttacccaccacccctctacctcttcagagctaatgggatgcagaggcgaggacagcccctggaaaaccatgtggcgttgatacactggcaaagcgcaggcatcccggcctcgaaggtgcataattattgcaatatgaaaaaatcgaggctgggtaggagcagggcagtgaggatttctcaacccttactttcaccccggcgctgtccactgcatctgacagagcgcggagctgggctgctacagccgcaaccccagggaccagtgcgcacgcctgggccgccctccgggagtcacccagcggccgcggacaactgaataaacaccccaaagcgctgcggtcggtcaagggcggggacagccacactgcgcgcggggcccgcaggccgtaataaagagtggctcgacctcgctgctgcctgtcgcgggagaggaacaagctttcgactagcgcctctccccggggcccgcgccccgagccccacgcgcaagacagcccaacagctgttcctcccctccccgccgactccaactcttcggaatctgcccactcggggctgcagggcaagtgtttaggatggttcccagccccgcgctggcggtgaaaatttcaacgtcattccttcaattaaaaaaaggggggggggcaagggaggggctttgtgataactactcccagcttcttctgatcatttcaaaattaagtcgattttttttaaccagtccccacttactgtcctaactctcctcgctgaccctatctgggagcccggaaccgttaggtactgccgaatgcggtgcaaaatttccccctctcccccagttcgcagtgcctggagccgctggggttactcgtctgttctgatgccaccgcgagatggtccccgagctccccgagagtcctcagtgaaaggattccgcggcactgcctctattattataccgtaaatctttttaaattctggaactaattatatagaggatatgtctcaatttgttctgcattaatgccacagtggggatggaggccaggccgtggccagagcagatacgtaggcccatgaaattgatgaactgagagttgcttccagtcctgagcgcaccatctggaattccagtctgaggttacaattagaactcctgaccccagattcaactttgcaaacaacaggggaaaaaaatggggaaaagaaaaaccacgagagagggnaaaaaaattattctgcacctgtaaa

SEQ ID NO: 286317 - DNA, 4012 bp, Homo sapiens
  misc_feature (1)..(1): n is a, c, g, or t
  misc_feature (4)..(4): n is a, c, g, or t
  misc_feature (7)..(7): n is a, c, g, or t
  misc_feature (472)..(472): n is a, c, g, or t
  misc_feature (1081)..(1081): n is a, c, g, or t
  misc_feature (3987)..(3987): n is a, c, g, or t
natncgngggagctatccacggacacgacgctgttccagaaagccatttagttactggaggtgcatgtgctcattctagttctctacgatacttaatgtgcacctaagtgtgtgccaacaccgtattataagggctggaggtgctcctggacattttagcgctgcggaggcagcacagcacaggcgctcacccccgcgctggtcccactccgaatccagagtccagacgtctgaaaagcgctacgcttggtgacaatttggcgtttccttaattaacaaaactctccccaaggcagagccagacactgcgccggtctcctggttccactcccgtggggactagcagtcccggaatctctcggactctaaggggccccagacgccctcccggctcttgcgaacagtcaggctcctagctctgcctggctttggaggatgtcgggggccagtgcctgcgtgcactcccactctncggcctcctccccagccgccgcttccgctatcctcacggcccttgggaagcagctgggtaagagctgcggtcaaaaggggtaggagaggggggtgtcctagagcggagagtccctggcgccactgccccgcgcgtagggggcgctccccggcctacttaccctgattgcgaatagcgggctggctctcgaggcagctgggcaggtagggcgcgttaggaaacatcctggcctggccggatgacgcctggctgggcggaggaggaccgaagggcccgtagcgacaggctccggctgtgccagtgaactggccggaaaagtggacagtgaaggcgctcaggcactgctcctcgtgcggctccgcgccgccccagctcggctcctgtttgatgaaggagtgaggcggcggcggcgggggtggcggcggagccggtggcggcgcggggccgcccaacgacccgtaagccgaagcgcccgggggcgcaaagtccagcaccggcgcccactgcgccgcgccgctcacaggcagggcacagccgccgccgccacccagggaggggacggcgggcagcagcgcgttcaggtcccgcacgtcggagcccatttgctgnggctcagacccggacgccccgcggctcctccggccctggagacgttcagcgctggcctcggcggcgcctaacttggcccagatgccgcccgggtcccggactccctgctgctctggctgctgtaggcacccaggcccggagcggagcgtgtgctgagacgccggctccgggacacacgtggaagccgggtcctgcagcaagaggaagtccaggatcgcggcgaggagacggcggggcccgggcgcctgggctgccgtcccggctctgggtgggtgggtgggtgaatgagtaggtgggagggagggcgggaagtgggggagcggacaggcggtcgggttgcggagagcccccgggtgtgggcgctgccttgaactccttaccccagctgcctggctgccctcagcttcccaaagctcaaataagaggggccggcggcgcggggaggaggaggagccaggaggctcggccgctccattcactcagcagcccaagcccggccaggcagcgcgcgctgctccttgggggcgccctcgcagctggggtgagggcgggtccgagggagcgtccctctcggagacaccctcctcttcaacccaacacgcgctctcagctggccggtgtggcacaaccctccccccacctccccttcttggccttcgccagtgtgggagcctcgtctcactggagagtccgttcagaatccttgtgggggcggggaggggaagagcaccggtgcgaaccccggggtgccccctcgcccgacttggacttctccgactaaagaggtgggaggagttccctgcagcctgcggggccaagaagaaagtgctaagctgaggagccgcagtcggaggaccccagggacccgacaggaagtctccgtacgaccccaacggatccacatgcccggaagcccaggcgacactaagccagcgctggggaactgacgtactcctgcagtcgcagggcgctccatgcctctctgtcctcttctttgttgtgggtaacgttctctgcgggagacctgaggttttccaagggggacatgccagctacactggccttggcgccctgagctaagcaccaggactcacagcctagcacgaaggcaggtagcaccttcacccgccgcggacgataggcgctctcctgtacctcctttagctcgcgaggcccgcccttcgcgaggtcccagagaaaagcaggctgtggaaaactgggcgcccccttctttcacccaccttcttacccctgtcagcgccgagatctgtagcagaggttcctggtctgaaccaccgattggcaaagaaagctgcagattaaacttctcgttttacagagaaggaaactgaggcccagacagccgaaggagaggcagtctatggagcgcagcggtaaagagcaaggggttggtggccccagaatggaacctcagctctgccaggtaaccaacagctgtgtgaccctagacgagttccgcagtctctctgagcctcagtttccttactggtcaaacgggataatgggatactagcgcccacctcatagagttgttctgaggattagataggagagcagtgtgggcctttgactcaatcaactttacagtttttgttactactactgtttaaggacaggaaacaagttagtggcaacgccgagctgaaacccgggtctctcaacgtccagttggaggttttacccaccacccctctacctcttcagagctaatgggatgcagaggcgaggacagcccctggaaaaccatgtggcgttgatacactggcaaagcgcaggcatcccggcctcgaaggtgcataattattgcaatatgaaaaaatcgaggctgggtaggagcagggcagtgaggatttctcaacccttactttcaccccggcgctgtccactgcatctgacagagcgcggagctgggctgctacagccgcaaccccagggaccagtgcgcacgcctgggccgccctccgggagtcacccagcggccgcggacaactgaataaacaccccaaagcgctgcggtcggtcaagggcggggacagccacactgcgcgcggggcccgcaggccgtaataaagagtggctcgacctcgctgctgcctgtcgcgggagaggaacaagctttcgactagcgcctctccccggggcccgcgccccgagccccacgcgcaagacagcccaacagctgttcctcccctccccgccgactccaactcttcggaatctgcccactcggggctgcagggcaagtgtttaggatggttcccagccccgcgctggcggtgaaaatttcaacgtcattccttcaattaaaaaaaggggggggggcaagggaggggctttgtgataactactcccagcttcttctgatcatttcaaaattaagtcgattttttttaaccagtccccacttactgtcctaactctcctcgctgaccctatctgggagcccggaaccgttaggtactgccgaatgcggtgcaaaatttccccctctcccccagttcgcagtgcctggagccgctggggttactcgtctgttctgatgccaccgcgagatggtccccgagctccccgagagtcctcagtgaaaggattccgcggcactgcctctattattataccgtaaatctttttaaattctggaactaattatatagaggatatgtctcaatttgttctgcattaatgccacagtggggatggaggccaggccgtggccagagcagatacgtaggcccatgaaattgatgaactgagagttgcttccagtcctgagcgcaccatctggaattccagtctgaggttacaattagaactcctgaccccagattcaactttgcaaacaacaggggaaaaaaatggggaaaagaaaaaccacgagagagggnaaaaaaattattctgcacctgtaaa

SEQ ID NO: 286318 - DNA, 3731 bp, Homo sapiens
  misc_feature (1)..(1): n is a, c, g, or t
  misc_feature (4)..(4): n is a, c, g, or t
  misc_feature (7)..(7): n is a, c, g, or t
  misc_feature (472)..(472): n is a, c, g, or t
  misc_feature (1081)..(1081): n is a, c, g, or t
  misc_feature (3706)..(3706): n is a, c, g, or t
natncgngggagctatccacggacacgacgctgttccagaaagccatttagttactggaggtgcatgtgctcattctagttctctacgatacttaatgtgcacctaagtgtgtgccaacaccgtattataagggctggaggtgctcctggacattttagcgctgcggaggcagcacagcacaggcgctcacccccgcgctggtcccactccgaatccagagtccagacgtctgaaaagcgctacgcttggtgacaatttggcgtttccttaattaacaaaactctccccaaggcagagccagacactgcgccggtctcctggttccactcccgtggggactagcagtcccggaatctctcggactctaaggggccccagacgccctcccggctcttgcgaacagtcaggctcctagctctgcctggctttggaggatgtcgggggccagtgcctgcgtgcactcccactctncggcctcctccccagccgccgcttccgctatcctcacggcccttgggaagcagctgggtaagagctgcggtcaaaaggggtaggagaggggggtgtcctagagcggagagtccctggcgccactgccccgcgcgtagggggcgctccccggcctacttaccctgattgcgaatagcgggctggctctcgaggcagctgggcaggtagggcgcgttaggaaacatcctggcctggccggatgacgcctggctgggcggaggaggaccgaagggcccgtagcgacaggctccggctgtgccagtgaactggccggaaaagtggacagtgaaggcgctcaggcactgctcctcgtgcggctccgcgccgccccagctcggctcctgtttgatgaaggagtgaggcggcggcggcgggggtggcggcggagccggtggcggcgcggggccgcccaacgacccgtaagccgaagcgcccgggggcgcaaagtccagcaccggcgcccactgcgccgcgccgctcacaggcagggcacagccgccgccgccacccagggaggggacggcgggcagcagcgcgttcaggtcccgcacgtcggagcccatttgctgnggctcagacccggacgccccgcggctcctccggccctggagacgttcagcgctggcctcggcggcgcctaacttggcccagatgccgcccgggtcccggactccctgctgctctggctgctgtaggcacccaggcccggagcggagcgtgtgctgagacgccggctccgggacacacgtggaagccgggtcctgcagcaagaggaagtccaggatcgcggcgaggagacggcggggcccgggcgcctgggctgccgtcccggctctgggtgggtgggtgggtgaatgagtaggtgggagggagggcgggaagtgggggagcggacaggcggtcgggttgcggagagcccccgggtgtgggcgctgccttgaactccttaccccagctgcctggctgccctcagcttcccaaagctcaaataagaggggccggcggcgcggggaggaggaggagccaggaggctcggccgctccattcactcagcagcccaagcccggccaggcagcgcgcgctgctccttgggggcgccctcgcagctggggtgagggcgggtccgagggagcgtccctctcggagacaccctcctcttcaacccaacacgcgctctcagctggccggtgtggcacaaccctccccccacctccccttcttggccttcgccagtgtgggagcctcgtctcactggagagtccgttcagaatccttgtgggggcggggaggggaagagcaccggtgcgaaccccggggtgccccctcgcccgacttggacttctccgactaaagaggtgggaggagttccctgcagcctgcggggccaagaagaaagtgctaagctgaggagccgcagtcggaggaccccagggacccgacaggaagtctccgtacgaccccaacggatccacatgcccggaagcccaggcgacactaagccagcgctggggaactgacgtactcctgcagtcgcagggcgctccatgcctctctgtcctcttctttgttgtgggtaacgttctctgcgggagacctgaggttttccaagggggacatgccagctacactggccttggcgccctgagctaagcaccaggactcacagcctagcacgaaggcaggtagcaccttcacccgccgcggacgataggcgctctcctgtacctcctttagctcgcgaggcccgcccttcgcgaggtcccagagaaaagcaggctgtggaaaactgggcgcccccttctttcacccaccttcttacccctgtcagcgccgagatctgtagcagaggttcctggtctgaaccaccgattggcaaagaaagctgcagattaaacttctcgttttacagagaaggaaactgaggcccagacagccgaaggagaggcagtctatggagcgcagcggtaaagagcaaggggttggtggccccagaatggaacctcagctctgccagagctaatgggatgcagaggcgaggacagcccctggaaaaccatgtggcgttgatacactggcaaagcgcaggcatcccggcctcgaaggtgcataattattgcaatatgaaaaaatcgaggctgggtaggagcagggcagtgaggatttctcaacccttactttcaccccggcgctgtccactgcatctgacagagcgcggagctgggctgctacagccgcaaccccagggaccagtgcgcacgcctgggccgccctccgggagtcacccagcggccgcggacaactgaataaacaccccaaagcgctgcggtcggtcaagggcggggacagccacactgcgcgcggggcccgcaggccgtaataaagagtggctcgacctcgctgctgcctgtcgcgggagaggaacaagctttcgactagcgcctctccccggggcccgcgccccgagccccacgcgcaagacagcccaacagctgttcctcccctccccgccgactccaactcttcggaatctgcccactcggggctgcagggcaagtgtttaggatggttcccagccccgcgctggcggtgaaaatttcaacgtcattccttcaattaaaaaaaggggggggggcaagggaggggctttgtgataactactcccagcttcttctgatcatttcaaaattaagtcgattttttttaaccagtccccacttactgtcctaactctcctcgctgaccctatctgggagcccggaaccgttaggtactgccgaatgcggtgcaaaatttccccctctcccccagttcgcagtgcctggagccgctggggttactcgtctgttctgatgccaccgcgagatggtccccgagctccccgagagtcctcagtgaaaggattccgcggcactgcctctattattataccgtaaatctttttaaattctggaactaattatatagaggatatgtctcaatttgttctgcattaatgccacagtggggatggaggccaggccgtggccagagcagatacgtaggcccatgaaattgatgaactgagagttgcttccagtcctgagcgcaccatctggaattccagtctgaggttacaattagaactcctgaccccagattcaactttgcaaacaacaggggaaaaaaatggggaaaagaaaaaccacgagagagggnaaaaaaattattctgcacctgtaaa

SEQ ID NO: 286319 - DNA, 5062 bp, Homo sapiens
  misc_feature (1)..(1): n is a, c, g, or t
  misc_feature (4)..(4): n is a, c, g, or t
  misc_feature (7)..(7): n is a, c, g, or t
  misc_feature (472)..(472): n is a, c, g, or t
  misc_feature (1081)..(1081): n is a, c, g, or t
  misc_feature (2246)..(2246): n is a, c, g, or t
  misc_feature (2372)..(2373): n is a, c, g, or t
  misc_feature (2388)..(2388): n is a, c, g, or t
  misc_feature (2390)..(2390): n is a, c, g, or t
  misc_feature (2504)..(2504): n is a, c, g, or t
  misc_feature (2521)..(2521): n is a, c, g, or t
  misc_feature (2667)..(2667): n is a, c, g, or t
  misc_feature (5037)..(5037): n is a, c, g, or t
natncgngggagctatccacggacacgacgctgttccagaaagccatttagttactggaggtgcatgtgctcattctagttctctacgatacttaatgtgcacctaagtgtgtgccaacaccgtattataagggctggaggtgctcctggacattttagcgctgcggaggcagcacagcacaggcgctcacccccgcgctggtcccactccgaatccagagtccagacgtctgaaaagcgctacgcttggtgacaatttggcgtttccttaattaacaaaactctccccaaggcagagccagacactgcgccggtctcctggttccactcccgtggggactagcagtcccggaatctctcggactctaaggggccccagacgccctcccggctcttgcgaacagtcaggctcctagctctgcctggctttggaggatgtcgggggccagtgcctgcgtgcactcccactctncggcctcctccccagccgccgcttccgctatcctcacggcccttgggaagcagctgggtaagagctgcggtcaaaaggggtaggagaggggggtgtcctagagcggagagtccctggcgccactgccccgcgcgtagggggcgctccccggcctacttaccctgattgcgaatagcgggctggctctcgaggcagctgggcaggtagggcgcgttaggaaacatcctggcctggccggatgacgcctggctgggcggaggaggaccgaagggcccgtagcgacaggctccggctgtgccagtgaactggccggaaaagtggacagtgaaggcgctcaggcactgctcctcgtgcggctccgcgccgccccagctcggctcctgtttgatgaaggagtgaggcggcggcggcgggggtggcggcggagccggtggcggcgcggggccgcccaacgacccgtaagccgaagcgcccgggggcgcaaagtccagcaccggcgcccactgcgccgcgccgctcacaggcagggcacagccgccgccgccacccagggaggggacggcgggcagcagcgcgttcaggtcccgcacgtcggagcccatttgctgnggctcagacccggacgccccgcggctcctccggccctggagacgttcagcgctggcctcggcggcgcctaacttggcccagatgccgcccgggtcccggactccctgctgctctggctgctgtaggcacccaggcccggagcggagcgtgtgctgagacgccggctccgggacacacgtggaagccgggtcctgcagcaagaggaagtccaggatcgcggcgaggagacggcggggcccgggcgcctgggctgccgtcccggctctgggtgggtgggtgggtgaatgagtaggtgggagggagggcgggaagtgggggagcggacaggcggtcgggttgcggagagcccccgggtgtgggcgctgccttgaactccttaccccagctgcctggctgccctcagcttcccaaagctcaaataagaggggccggcggcgcggggaggaggaggagccaggaggctcggccgctccattcactcagcagcccaagcccggccaggcagcgcgcgctgctccttgggggcgccctcgcagctggggtgagggcgggtccgagggagcgtccctctcggagacaccctcctcttcaacccaacacgcgctctcagctggccggtgtggcacaaccctccccccacctccccttcttggccttcgccagtgtgggagcctcgtctcactggagagtccgttcaggcaaggagaagaaccgggggccggagcggagcgtgtttcagaggtgcgtataaaatcccaggggcgccaggaggcagcagcgacggcgcagcgtgggacggccaggcgcgacgggagggaagcaaccggttgcagtccggcctcctgtacctggctggcccgggctagggctgcaagctttccagccaaacttatgtgaagcaaagtagttgcagtttgacaaagaatggcgtttcaataaatgacatagtaattttttacgctttggtttttagcttgcattgcataaacgttgtcgccattaaattctggctgcggacccgaagtgtgtgcgggcccaggacttactcgaagggcgcacttcttgggaatgcgcatcccgtaggcgcaggagaccctgagggtaaagatgcggcacttgagccctccgcttgcctcccaggccacctttgctgcttgactttgcntcgtctccactcagaagcttttaaaattattattaagaaaagaaagattctacaagacactgcccccacgctctctgctcagtcctctcccacacgatctatccctaaacctttcgcggggctcgnncgtttggttttttgngnggagaaaggactctcgagacaaaattcactgccagttgccctaagaaccccccagatccctgtatctcccttccttctccccgcctattatttctacttggaagtcgtttttcntaactaggactcaactntgaggggcgaggagccctttatgaaaagccggggactttcatttccaaacgaaaagattgagattgtttcttcttttaccatccttggcacttttagcggggggagaggaggttatctgaagggaggctggcttgaatgtgagtcnttgtgtttgtgaaacccaggtaaggcaaagacacgtaaatctctgccaacatttttcaaaaataagtttttgccccggggtgagggatgtaggggtggataggaggaaaggagagccaagcaaatgtagaactcctctctcctctgccatttattttctcagaatccttgtgggggcggggaggggaagagcaccggtgcgaaccccggggtgccccctcgcccgacttggacttctccgactaaagaggtgggaggagttccctgcagcctgcggggccaagaagaaagtgctaagctgaggagccgcagtcggaggaccccagggacccgacaggaagtctccgtacgaccccaacggatccacatgcccggaagcccaggcgacactaagccagcgctggggaactgacgtactcctgcagtcgcagggcgctccatgcctctctgtcctcttctttgttgtgggtaacgttctctgcgggagacctgaggttttccaagggggacatgccagctacactggccttggcgccctgagctaagcaccaggactcacagcctagcacgaaggcaggtagcaccttcacccgccgcggacgataggcgctctcctgtacctcctttagctcgcgaggcccgcccttcgcgaggtcccagagaaaagcaggctgtggaaaactgggcgcccccttctttcacccaccttcttacccctgtcagcgccgagatctgtagcagaggttcctggtctgaaccaccgattggcaaagaaagctgcagattaaacttctcgttttacagagaaggaaactgaggcccagacagccgaaggagaggcagtctatggagcgcagcggtaaagagcaaggggttggtggccccagaatggaacctcagctctgccaggtaaccaacagctgtgtgaccctagacgagttccgcagtctctctgagcctcagtttccttactggtcaaacgggataatgggatactagcgcccacctcatagagttgttctgaggattagataggagagcagtgtgggcctttgactcaatcaactttacagtttttgttactactactgtttaaggacaggaaacaagttagtggcaacgccgagctgaaacccgggtctctcaacgtccagttggaggttttacccaccacccctctacctcttcagagctaatgggatgcagaggcgaggacagcccctggaaaaccatgtggcgttgatacactggcaaagcgcaggcatcccggcctcgaaggtgcataattattgcaatatgaaaaaatcgaggctgggtaggagcagggcagtgaggatttctcaacccttactttcaccccggcgctgtccactgcatctgacagagcgcggagctgggctgctacagccgcaaccccagggaccagtgcgcacgcctgggccgccctccgggagtcacccagcggccgcggacaactgaataaacaccccaaagcgctgcggtcggtcaagggcggggacagccacactgcgcgcggggcccgcaggccgtaataaagagtggctcgacctcgctgctgcctgtcgcgggagaggaacaagctttcgactagcgcctctccccggggcccgcgccccgagccccacgcgcaagacagcccaacagctgttcctcccctccccgccgactccaactcttcggaatctgcccactcggggctgcagggcaagtgtttaggatggttcccagccccgcgctggcggtgaaaatttcaacgtcattccttcaattaaaaaaaggggggggggcaagggaggggctttgtgataactactcccagcttcttctgatcatttcaaaattaagtcgattttttttaaccagtccccacttactgtcctaactctcctcgctgaccctatctgggagcccggaaccgttaggtactgccgaatgcggtgcaaaatttccccctctcccccagttcgcagtgcctggagccgctggggttactcgtctgttctgatgccaccgcgagatggtccccgagctccccgagagtcctcagtgaaaggattccgcggcactgcctctattattataccgtaaatctttttaaattctggaactaattatatagaggatatgtctcaatttgttctgcattaatgccacagtggggatggaggccaggccgtggccagagcagatacgtaggcccatgaaattgatgaactgagagttgcttccagtcctgagcgcaccatctggaattccagtctgaggttacaattagaactcctgaccccagattcaactttgcaaacaacaggggaaaaaaatggggaaaagaaaaaccacgagagagggnaaaaaaattattctgcacctgtaaa

SEQ ID NO: 286320 - DNA, 565 bp, Homo sapiens
aggcttactgtagcctcaatctcccaggcttaagtgatccttccacctcagcctccgaagtagctgggaccacaggtgtcagaatacacatcaggacaatctggactaaggaaacctgaaatttaattctgaaattaattaagtaaccatgcctaagctgtaggtatgcatcatagcttctgtgatctcagaaccgtttctctgaccagcaaaagaagagatgaaaatgctcctcttgacctctatctgcactacaccagaaacgtcattgagccagtttcttctaaggagataacagaaactttctatgcaaggctgtggggggctggtaatataaggctaggaggataaagctccttactaataaacaagctgacattgaataacatggaaaaaaggcctcgttgggctctgggggggctctctgggggcgctctcctgtcgcgagggttaattgaggatccttgcttgatgcctcgttactgactggctgtgctctgccgttagggtgatgagatcactctcaggtgactctacggcggtcctccggatctgggcataacgc

SEQ ID NO: 286321 - DNA, 2064 bp, Homo sapiens
ctttactttctcttgtttacaaaatacaaatttatagctggatttgatgctgaaaatttaatacagttacctcatgtcacagataaagaacagaaatgacttgaccaagttcacattgttgtttaacggcaggaaaagcactaaagatggatagtcctgccttcctaatttgaatgctcttattctctacaggttagggtcaagttattcagtaaaacaggctatcaggaggttaagcccaaacagtgaggaaacaaattttatgatgcttgtttgactaaatgcatgcagtttacctcaagattaagggatttaaaaaaggttagaaaacagtgtaaccctatctcctggatatatctacagacttgtatttaggaattatgccaggctgttatttctaacagagctgatgatcatagatgtggcctttaaggcaggactgggtatttggttcttaaaaatgattctgtgcctgccaatcttaggaataaataatgctttcaatgatctacattctctgtctacctaaaaagtacaaagaaaaagaatatatttaatcaaagagagatgtgtcccaggtagatggtaagcaacgggaataaagtcatgatatgcccagaataaccaatgatgaatgttattagccaggtagccaccattctagtcttagtaaaataagcatcccataaatgtttatataattttaggtgtcagaatacacatcaggacaatctggactaaggaaacctgaaatttaattctgaaattaattaagtaaccatgcctaaggtgagcttgttttcttaactgtaaaatggaagtgcaacctttaactttcctcagtggctcagatgaaatactgtgaaggtacagagtaatgctatatggcacaaagcaaaaagtgctgtgcaaaagaagacagtgtgctaaatattaggaaatttctgagttccagaaaatttggatttttaagaaactatgtcatgtcaagatgtgctttggagtaacaattttcccaatattatattaagtatatactaagtatatattagaagggattatataaaaggtgttcaaaaaacaaatatcaggaaaacactaatttaagcagaatttaacaattgtttttaacttcagaatttctcagagctttgaatattatataccatgaatctccaggaaaggacaagtgagcttatgttccccaaacttatatgaccacctaatcctttttacatggaccttctcagtggagcagtgttccatagaacacacattcttactctctatttttccaaaattcctactgtttgcttcaatacaaaatcataagacactgtggctagaaattttttttcatataaacataaacgtgtactgacacatgttggtaagcattttataggttgtctattctagctttcaaataacatgactctaaatctgtaaagaccagatcactaacatagcctctttccagaaggccataatgagtacctcctcatcagatagagaatgtaccctttaagttttgtaggagtcaagtacccctttgtcttggggacagatttctgttaagacagacagaaactcttcccttgctggtccagcagcagttttcttgttccctggaccagccagaataaaaagatgacttctgccacgcatcattttgttgtttgtctaacactgaatcccaaataaaatttcattcctgattaatagatctgaccttttaaactagacaagcagcagcaacctgagatggaattgttaagagaaaaatatggtaacattcttagctaaaatactgagagaaacggagagtttaagtctactactgtctacagtacttatgtgaatgttataaaagatctgttagaaactggtggtgatggcaacaagtcctacaccagttcttaaatcctctcttatagctagtagaaaggattacaaagtttggcaaacatcttgcatgtatcaagactgttcacaggtgtctgagcaatgaataatatgtctatagattagatttaaaagctccggacgcgtggcggacgcgtg

SEQ ID NO: 286322 - DNA, 735 bp, Homo sapiens
cgataggcggctttggggtcgccccaggagtccagctgcgagagaccaatgggatttgaaaatggccttgatgattcagacggccgtgacgtcagcggggtcaagttgtcggcaggcggagcgcgcagagtggagtaacagcgccatctagcagctgcctcgggggaatattccgggaaagaaagagggaacctgcggagcctcggtcagtttggaggagtcacgtatcacacgggaaaccagcacacaagacgcaacaaaacccgacccagagaagcgtcctttacagagcgcacgggctgggagcatgtttgaaagaagacagaccagtctatttttgtggttgtttttaaataaaaggaagaaataaggggaaccgtatgtttcaaacagttatttccgtttctccatcgccttcttccaaagcgaactaaactctccaccccttcctcaggaaacggaatctggagaacaacttgtctttcctgtcgccccacatttttccttggacagagcctagggttcagactttccgaagggctggagtttggcggggaaaggactggagcccagcgccctggagtggaggagtgaggaggctagaccgtttctaaggaggcccaagcccgctgcggctagaagaccgcagaaagaaatccgccgaatttccccatccaggggtggagagagaagacgcaggggttcctgaacctccggaaaactggaaggaaatgt

SEQ ID NO: 286323 - DNA, 749 bp, Homo sapiens
agaccagaggcacccgatccccgacccgagagctgtggcctgggcctggcagggtgggcggctcctgggtcaccatctcaggggcccacaaggctttggccttggagccggttctgctgctttacttcaggccctggcggtcctcgctttccgcttgaccttgcccccgctaaaacagggaatattccgggaaagaaagagggaacctgcggagcctcggtcagtttggaggagtcacgtatcacacgggaaaccagcacacaagacgcaacaaaacccgacccagagaagcgtcctttacagagcgcacgggctgggagcatgtttgaaagaagacagaccagtctatttttgtggttgtttttaaataaaaggaagaaataaggggaaccgtatgtttcaaacagttatttccgtttctccatcgccttcttccaaagcgaactaaactctccaccccttcctcaggaaacggaatctggagaacaacttgtctttcctgtcgccccacatttttccttggacagagcctagggttcagactttccgaagggctggagtttggcggggaaaggactggagcccagcgccctggagtggaggagtgaggaggctagaccgtttctaaggaggcccaagcccgctgcggctagaagaccgcagaaagaaatccgccgaatttccccatccaggggtggagagagaagacgcaggggttcctgaacctccggaaaactggaaggaaatgt

SEQ ID NO: 286324 - DNA, 340 bp, Homo sapiens
gaaatggaggtgttctgacctatgatcagacaaggtaggtcagaaaccagctccagaaaccaggaaaaagttcctgccttggggagagaaagaaataggtgaaaggagggcagaaaaggagccctgcctgttttgctcgttgttgcctcactagcccataccagagtgcagggtgcgctgtaagccgtgaccgcatcacagatcatcagcatgcagagatggcgagtaacccatgggccaggtagcgttctatgccaaccttgaatgccatcaggaagtcactggacagcaaactcttccaagatcataacttggctgttggagcaacctggaaaagaag

SEQ ID NO: 286325 - DNA, 597 bp, Homo sapiens
cagcagcgaacaattaatatgcaacagtctcaagtagaaaaatacaaaactcttttcgaagaagcaaacaaaaagtatgatggattacagcaacagttgtcttcagtagaaagggaattagaaaataaaagaagactgcaaaaacaggctgcaagtagtcaaagtgccacagaggttcgcttgaatagagctctagaagaagcagaaaagtataaactggagttaagtaaattaaggcaaaataacaagatgcatattgaagctgccaagatgctatctttcactgaggaggaatttatgaaagcacttgaatggggaaattcataagtgatctacttcagttagtctctatgacagtatgtgatggatacccattttacttattgtagtggtttgaattatttttattcttcataagtaatatatttgattatgaaagcaaaataatttcaaagaattccctttttagatttaggagattagctattagctctttttgagttgtttttttaagttcttagcgtgacaattaagcacatcagataataaaattcttgactcttttcatttataattctcctcccttacagtagacca

SEQ ID NO: 286326 - DNA, 732 bp, Homo sapiens
cagcagcgaacaattaatatgcaacagtctcaagtagaaaaatacaaaactcttttcgaagaagcaaacaaaaagtatgatggattacagcaacagttgtcttcagtagaaagggaattagaaaataaaagaagactgcaaaaacaggctgcaagtagtcaaagtgccacagaggttcgcttgaatagagctctagaagaagcagaaaagtataaactggagttaagtaaattaaggcaaaataacaaggacatagcaaatgaagaacacaaaaaaattgaagtgttaaaatcagaaaacaagaagctagaaaaacaaaaaggagaattaatgatagggttcaagaaacagttaaaattaattgatgttttaaaaaggcaaaagatgcatattgaagctgccaagatgctatctttcactgaggaggaatttatgaaagcacttgaatggggaaattcataagtgatctacttcagttagtctctatgacagtatgtgatggatacccattttacttattgtagtggtttgaattatttttattcttcataagtaatatatttgattatgaaagcaaaataatttcaaagaattccctttttagatttaggagattagctattagctctttttgagttgtttttttaagttcttagcgtgacaattaagcacatcagataataaaattcttgactcttttcatttataattctcctcccttacagtagacca

SEQ ID NO: 286327 - DNA, 454 bp, Homo sapiens
agagaggtaattggggccctgcggttgtggtggcagcagtgaaagttggctgtcaccgactggagcgcccccagttggtgggcagggatacgggcgcgggtagtggcaggaaagttgcagggcagagagccagaacccagtcctaggtctcacctcgtggcctaaacacgcgtcagagtggtgagaccgctccctgaggagggccaggagctgccatgaagtcgccaggcattccagagggccagatcctggtgcactgagaccccagcaccaacctctggccagcccttggtgtctccacttgttcctgtttgattatgtttcccaagagccccgatgttgtcctgtttcctaaacaggatccctctgttaaatccctggacctgcacaatccccgggaaccttaacgtcctctactacaaataaaattacctatacatttgtcaaaactcat

SEQ ID NO: 286328 - DNA, 656 bp, Homo sapiens
atattcttgcagagcaggtcattgtgacaaaacaccacaggggactccagctgggacagatgctccttcagccaggccagctcccgttccaacacctctaccttagggacatctgcagaaaggctgggcagtggcaaaaaagggggccttggaaaaatggccaatctcttagaccctcacttttatcatctgtaaaatggcactgaggcgtcctgtccttctgactcctctggttatgctaggaagctgataaagacatgggcgtcaaagcatgaggcagagcataaaagtcactgactgagggcatccctgctactttgtgaaaggaacaggagggtaaggaaggagacacagggaaaggacaaggcaggtgagaacgagtgtccagacctggggattccagactaagaacaagggcaacaggagcagtggggagagatgcaaaacagacctgatcttaggatgctgggaaaactccccaggaggcggtgcagctccctaagtcgagctgactcccacaaagatcctccccaggaggaagagtagtgccctggcagggagctggagcaatggagctctcttgaggaggcagaggtatgtcctggtatgcacccccctctcaccccagcagctgaccatgtcacaggtagaaggga

SEQ ID NO: 286329 - DNA, 338 bp, Homo sapiens
atattcttgcagagcaggtcattgtgacaaaacaccacaggggactccagctgggacagatgctccttcagccaggccagctcccgttccaacacctctaccttagggacatctgcagaaaggctgggcagtggcaaaaaaggtagccagtgaaaggagggctgatagacaggtgcttggcctcaagagccctgaatctgagcctcatcactccctctgtcttactgcagggggccttggacgtcaccgttgccctgcatggtggccccagagcagcctctatgaacaacctcgtttccaaaccacagcccacagccggagagtccagaccacatgat

SEQ ID NO: 286330 - DNA, 877 bp, Homo sapiens
aggtcatgacatttcctgttgcggggaaggaggcaaaagaacaaagatgttactctcctttgatttggctgacaattcaaagactcttcattctcataggagaatataagaattcatgaacaagattcccagaattcagaggtcgattctcaagctgaagagtctgtggtttcattgccgcatggaacaggatggagtctcggtctatagcccgggctggagtacaatggcacaatctcagctcactgcaacctctgcctcctgggttcaagtgattctcctgcctcaggctcccgagtagctgggattacaggtcagaaaaaggtgcacagcaggatgtgaagatctctctgctctgagcgcgggctggttctttcgatgtcagggaacttctcaaatgagaagagatggaagaagagatttttgagggaggagagagaaagtcactttacaccagggaagaggaagagaggagactcagaatgcaagcaaacactgctgttcttcttccgcttcgttaatacgaattactgccaacaatctgctgcattcacatcttgctgggtatttaaaaatccatcccaaatttgcctcatttctgtcactcttcttggtgtgcttgtagatgaatggttatagaagtttatttgtaaaaatggtaaatattacttctctattaagatcaaattttttctcgaaagattcaacacaactaattattatgaaaataaatataattatcgtactgttgaaatacttaatataattatatgttgtgtggcgtctcaggctacttgcccctgactgtctcacccaccccttgctaacctggctgcctttttctgtgggacaaattcctccttagcttcctgaatat

SEQ ID NO: 286331 - DNA, 253 bp, Homo sapiens
acctacaagaaagaaaattcgattagtactgaaatatctgacaaggctgaataggactatttaaagaaaaccacggtagcccaagaggcgtacaaagaaatttgtgacacagcacactgaagcttatatacattagtctctgtgagctctgtcactgtgagtctgatccactcatggtctgcctggtgttctaaaggtgacatctgatgtcactgcccaccttttccacaactgcaaccaagtcttgtctcct

SEQ ID NO: 286332 - DNA, 291 bp, Homo sapiens
cctctgcccagtcttcaacccccgcctttggagtccgtggaggaaaagagcagaaacaggagcccagagaccattccagactcaccaggtaaaaaggtaaggatgaagaagacagtggtccaaggtgactcccaatgcctgaatcacatggctgcttcctgctgccacaatccactggcccactgacttgtaggggaagtaaacaggagcccctgagatcatcttaattcagaaatcttcaaatgtttctactaaatgagattaaaaaaaataaaacaagatgctgcgcga

SEQ ID NO: 286333 - DNA, 350 bp, Homo sapiens
cctctgcccagtcttcaacccccgcctttggagtccgtggaggaaaagagcagaaacaggagcccagagaccattccagactcaccagactgggatccccagggacaggacacttagggaagagcagagaggacatggcctggtcaggtaaaaaggtaaggatgaagaagacagtggtccaaggtgactcccaatgcctgaatcacatggctgcttcctgctgccacaatccactggcccactgacttgtaggggaagtaaacaggagcccctgagatcatcttaattcagaaatcttcaaatgtttctactaaatgagattaaaaaaaataaaacaagatgctgcgcga

SEQ ID NO: 286334 - DNA, 446 bp, Homo sapiens
accccatctctactaaaaatacaaaacaatgagcccaggcatggtggcacatgcctgtggtcccagctacctgggaggctgaggcaggagaatggcttgaacccgggaggcggaggttgcagtgagctgagatcacgccactgcactccagcctgggtgacagagcaagactccgtctcaagaaaaaagaaaaaaaaaaaaaggcatacatggatagcattttccaggatgtctcttaactagctatttccctttaggtaaaaaggtaaggatgaagaagacagtggtccaaggtgactcccaatgcctgaatcacatggctgcttcctgctgccacaatccactggcccactgacttgtaggggaagtaaacaggagcccctgagatcatcttaattcagaaatcttcaaatgtttctactaaatgagattaaaaaaaataaaac

SEQ ID NO: 286335 - DNA, 522 bp, Homo sapiens
caggacggaagttccagatgtcttcacagaatttccaaatgctatttcttcatttgcaatttctgttcctgccatccgcccccatgtagcctctgcccagtcttcaacccccgcctttggagtccgtggaggaaaagagcagaaacaggagcccagagaccattccagactcaccaggtatgggcgctgccgacttaatttttacaaaaccaagccaatccgtccctaggtaaatttttgtaagcaaggtgcccactaggtaggaaggctgcatttaatgctaatttactgtaaggtctagggaagtcctttccgcttctctgggcctcagtttcctcatctgccaaatagggaaatggatgagatgattgctaaggtcccttcagttccatgagtctatgaaatgtttattgctattgcttttccttcactatcctcaccttcagagctgccagcacccacctggaatgtggttccttcacttgggccatgaatggcacaggtaaccaagagcttggcctg

SEQ ID NO: 286336 - DNA, 1956 bp, Homo sapiens
aaactttctctgatctcctctctctctgtgtctgctccaaatgtagacagcaattgtctgggtaggaccagcttataaagaagcatggctttgttaaggaagtcgtattcagagcctcagcttaagggtatagttaccaagctatacagccgacaaggctaccacttgcagctgcaggcggatggaaccattgatggcaccaaagatgaggacagcacttacactctgtttaacctcatccctgtgggtctgcgagtggtggctatccaaggagttcaaaccaagctgtacttggcaatgaacagtgagggatacttgtacacctcggaacttttcacacctgagtgcaaattcaaagaatcagtgtttgaaaattattatgtgacatattcatcaatgatataccgtcagcagcagtcaggccgagggtggtatctgggtctgaacaaagaaggagagatcatgaaaggcaaccatgtgaagaagaacaagcctgcagctcattttctgcctaaaccactgaaagtggccatgtacaaggagccatcactgcacgatctcacggagttctcccgatctggaagcgggaccccaaccaagagcagaagtgtctctggcgtgctgaacggaggcaaatccatgagccacaatgaatcaacgtagccagtgagggcaaaagaagggctctgtaacagaaccttacctccaggtgctgttgaattcttctagcagtccttcacccaaaagttcaaatttgtcagtgacatttaccaaacaaacaggcagagttcactattctatctgccattagaccttcttatcatccatactaaagccccattatttagattgagcttgtgcataagaatgccaagcattttagtgaactaaatctgagagaaggactgccaaattttctcatgatctcacctatactttggggatgataatccaaaagtatttcacagcactaatgctgatcaaaatttgctctcccaccaagaaaatgtaaaagaccacaattgttcttcaaaaacaaacaaaacaaaacaaaacaaaattaactgcttaaatgttttgtcggggcaaacaaaattatgtgaattgtgttgttttcttggcttgatgttttctatctacgcttgattcacatgtactcttttctttggcatagtgcaactttatgatttctgaaattcaatggttctattgactttttgcgtcacttaatccaaatcaaccaaattcagggttgaatctgaattggcttctcaggctcaaggtaacagtgttcttgtggtttgaccaattgtttttctttctttttttttttttttagatttggtggtattctggtcaagttattgtgctgtactttgtgcgtagaaattgagttgtattgtcaaccccagtcagtaaagagaacttcaaaaaattatcctcaagtgtagatttctcttaattccatttgtgtatcatgttaaactattgttgtggcttcttgtgtaaagacaggaactgtggaactgtgatgttgtcttttgtgttgttaaaataagaaatgtcttatctgtatatgtatgagtcttcctgtcattgtatttggcacatgaatattgtgtacaaggaattgttaagactggttttccctcaacaacatatattatacttgctactggaaaagtgtttaagacttagctaggtttccatttagatcttcatatctgttgcatggaagaaagttgggttcttggcatagagttgcatgatatgtaagattttgtgcattcataattgttaaaaatctgtgttccaaaagtggacatagcatgtacaggcagttttctgtcctgtgcacaaaaagtttaaaaaagttgtttaatatttgttgttgtatacccaaatacgcaccgaataaactctttatattcattcaaaaaaaaaaaaaaacatgta

SEQ ID NO: 286337 - DNA, 2707 bp, Homo sapiens
attcctgtgctgcgactgtgccgcgcccagagcagcagcaacagcgaagatgcgaggccattacctgtttgatccctgtcggaaacctggcacgggccaacttttcccgattatcacgccaagaagttgcaaggactagtcgaagactcggaggggccagggcgagggcgcgctcccccgcgcgctgcctcctccctcctccctccggccgcccgagctcccggcctctctcccgcccgcgctcactccctccgcccgcctccctcctctggccccctccgcgcggcacagggcggggggtgccgcgaaactccgacccgagccacttggacttgcacagtgtccgccgggcgcaggggccgaccgcacgcagtcgcgcagttctgcctccgcctgccagtctcgcccgcgatcccggcccggggctgtggcgtcgactccgacccaggcagccagcagcccgcgcgggagccggaccgccgccggaggagctcggacggcatgctgagccccctccttggctgaagcccgagtgcggagaagcccgggcaaacgcaggctaaggagaccaaagcggcgaagtcgcgagacagcggacaagcagcggaggagaaggaggaggaggcgaacccagagaggggcagcaaaagaagcggtggtggtgggcgtcgtggccatggcggcggctatcgccagctcgctcatccgtcagaagaggcaagcccgcgagcgcgagaaatccaacgcctgcaagtgtgtcagcagccccagcaaaggcaagaccagctgcgacaaaaacaagttaaatgtcttttcccgggtcaaactcttcggctccaagaagaggcgcagaagaagaccagagcctcagcttaagggtatagttaccaagctatacagccgacaaggctaccacttgcagctgcaggcggatggaaccattgatggcaccaaagatgaggacagcacttacactctgtttaacctcatccctgtgggtctgcgagtggtggctatccaaggagttcaaaccaagctgtacttggcaatgaacagtgagggatacttgtacacctcggaacttttcacacctgagtgcaaattcaaagaatcagtgtttgaaaattattatgtgacatattcatcaatgatataccgtcagcagcagtcaggccgagggtggtatctgggtctgaacaaagaaggagagatcatgaaaggcaaccatgtgaagaagaacaagcctgcagctcattttctgcctaaaccactgaaagtggccatgtacaaggagccatcactgcacgatctcacggagttctcccgatctggaagcgggaccccaaccaagagcagaagtgtctctggcgtgctgaacggaggcaaatccatgagccacaatgaatcaacgtagccagtgagggcaaaagaagggctctgtaacagaaccttacctccaggtgctgttgaattcttctagcagtccttcacccaaaagttcaaatttgtcagtgacatttaccaaacaaacaggcagagttcactattctatctgccattagaccttcttatcatccatactaaagccccattatttagattgagcttgtgcataagaatgccaagcattttagtgaactaaatctgagagaaggactgccaaattttctcatgatctcacctatactttggggatgataatccaaaagtatttcacagcactaatgctgatcaaaatttgctctcccaccaagaaaatgtaaaagaccacaattgttcttcaaaaacaaacaaaacaaaacaaaacaaaattaactgcttaaatgttttgtcggggcaaacaaaattatgtgaattgtgttgttttcttggcttgatgttttctatctacgcttgattcacatgtactcttttctttggcatagtgcaactttatgatttctgaaattcaatggttctattgactttttgcgtcacttaatccaaatcaaccaaattcagggttgaatctgaattggcttctcaggctcaaggtaacagtgttcttgtggtttgaccaattgtttttctttctttttttttttttttagatttggtggtattctggtcaagttattgtgctgtactttgtgcgtagaaattgagttgtattgtcaaccccagtcagtaaagagaacttcaaaaaattatcctcaagtgtagatttctcttaattccatttgtgtatcatgttaaactattgttgtggcttcttgtgtaaagacaggaactgtggaactgtgatgttgtcttttgtgttgttaaaataagaaatgtcttatctgtatatgtatgagtcttcctgtcattgtatttggcacatgaatattgtgtacaaggaattgttaagactggttttccctcaacaacatatattatacttgctactggaaaagtgtttaagacttagctaggtttccatttagatcttcatatctgttgcatggaagaaagttgggttcttggcatagagttgcatgatatgtaagattttgtgcattcataattgttaaaaatctgtgttccaaaagtggacatagcatgtacaggcagttttctgtcctgtgcacaaaaagtttaaaaaagttgtttaatatttgttgttgtatacccaaatacgcaccgaataaactctttatattcattcaaaaaaaaaaaaaaacatgta

SEQ ID NO: 286338 - DNA, 2587 bp, Homo sapiens
actgtttcctcccgaagctcctttcgggaaaaggaggggagaaggatttggacgactggggcagtgcggaagcccctacaggtgttagccgcccgagctcccggcctctctcccgcccgcgctcactccctccgcccgcctccctcctctggccccctccgcgcggcacagggcggggggtgccgcgaaactccgacccgagccacttggacttgcacagtgtccgccgggcgcaggggccgaccgcacgcagtcgcgcagttctgcctccgcctgccagtctcgcccgcgatcccggcccggggctgtggcgtcgactccgacccaggcagccagcagcccgcgcgggagccggaccgccgccggaggagctcggacggcatgctgagccccctccttggctgaagcccgagtgcggagaagcccgggcaaacgcaggctaaggagaccaaagcggcgaagtcgcgagacagcggacaagcagcggaggagaaggaggaggaggcgaacccagagaggggcagcaaaagaagcggtggtggtgggcgtcgtggccatggcggcggctatcgccagctcgctcatccgtcagaagaggcaagcccgcgagcgcgagaaatccaacgcctgcaagtgtgtcagcagccccagcaaaggcaagaccagctgcgacaaaaacaagttaaatgtcttttcccgggtcaaactcttcggctccaagaagaggcgcagaagaagaccagagcctcagcttaagggtatagttaccaagctatacagccgacaaggctaccacttgcagctgcaggcggatggaaccattgatggcaccaaagatgaggacagcacttacactctgtttaacctcatccctgtgggtctgcgagtggtggctatccaaggagttcaaaccaagctgtacttggcaatgaacagtgagggatacttgtacacctcggaacttttcacacctgagtgcaaattcaaagaatcagtgtttgaaaattattatgtgacatattcatcaatgatataccgtcagcagcagtcaggccgagggtggtatctgggtctgaacaaagaaggagagatcatgaaaggcaaccatgtgaagaagaacaagcctgcagctcattttctgcctaaaccactgaaagtggccatgtacaaggagccatcactgcacgatctcacggagttctcccgatctggaagcgggaccccaaccaagagcagaagtgtctctggcgtgctgaacggaggcaaatccatgagccacaatgaatcaacgtagccagtgagggcaaaagaagggctctgtaacagaaccttacctccaggtgctgttgaattcttctagcagtccttcacccaaaagttcaaatttgtcagtgacatttaccaaacaaacaggcagagttcactattctatctgccattagaccttcttatcatccatactaaagccccattatttagattgagcttgtgcataagaatgccaagcattttagtgaactaaatctgagagaaggactgccaaattttctcatgatctcacctatactttggggatgataatccaaaagtatttcacagcactaatgctgatcaaaatttgctctcccaccaagaaaatgtaaaagaccacaattgttcttcaaaaacaaacaaaacaaaacaaaacaaaattaactgcttaaatgttttgtcggggcaaacaaaattatgtgaattgtgttgttttcttggcttgatgttttctatctacgcttgattcacatgtactcttttctttggcatagtgcaactttatgatttctgaaattcaatggttctattgactttttgcgtcacttaatccaaatcaaccaaattcagggttgaatctgaattggcttctcaggctcaaggtaacagtgttcttgtggtttgaccaattgtttttctttctttttttttttttttagatttggtggtattctggtcaagttattgtgctgtactttgtgcgtagaaattgagttgtattgtcaaccccagtcagtaaagagaacttcaaaaaattatcctcaagtgtagatttctcttaattccatttgtgtatcatgttaaactattgttgtggcttcttgtgtaaagacaggaactgtggaactgtgatgttgtcttttgtgttgttaaaataagaaatgtcttatctgtatatgtatgagtcttcctgtcattgtatttggcacatgaatattgtgtacaaggaattgttaagactggttttccctcaacaacatatattatacttgctactggaaaagtgtttaagacttagctaggtttccatttagatcttcatatctgttgcatggaagaaagttgggttcttggcatagagttgcatgatatgtaagattttgtgcattcataattgttaaaaatctgtgttccaaaagtggacatagcatgtacaggcagttttctgtcctgtgcacaaaaagtttaaaaaagttgtttaatatttgttgttgtatacccaaatacgcaccgaataaactctttatattcattcaaaaaaaaaaaaaaacatgta

SEQ ID NO: 286339 - DNA, 2378 bp, Homo sapiens
cgcgtgcccacaccttgccgtttatatagaatgcgccgcggtgttgattcgtggctctctaggaccggagagttctttggaaggagagcgcgagcgagggagcgggcgagctccgagggggtgtgggtgtagggagagagagaaagagagcaggcagcggcggcggcggcagcggtggggaaaagcggattccgccccgaaccacaccgaggggagctcgtggtcgagacttgccgccctaagcactctcccaagtccgacccgctcggcgaggacttccgtcttctgagcgaaccttgtcaagcaagctgggatctatgagtggaaaggtgaccaagcccaaagaggagaaagatgcttctaaggttctggatgacgccccccctggcacacaggaatacattatgttacgacaagattccatccaatctgcggaattaaagaaaaaagagtccccctttcgtgctaagtgtcacgaaatcttctgctgcccgctgaagcaagtacaccacaaagagaacacagagccggaagagcctcagcttaagggtatagttaccaagctatacagccgacaaggctaccacttgcagctgcaggcggatggaaccattgatggcaccaaagatgaggacagcacttacactctgtttaacctcatccctgtgggtctgcgagtggtggctatccaaggagttcaaaccaagctgtacttggcaatgaacagtgagggatacttgtacacctcggaacttttcacacctgagtgcaaattcaaagaatcagtgtttgaaaattattatgtgacatattcatcaatgatataccgtcagcagcagtcaggccgagggtggtatctgggtctgaacaaagaaggagagatcatgaaaggcaaccatgtgaagaagaacaagcctgcagctcattttctgcctaaaccactgaaagtggccatgtacaaggagccatcactgcacgatctcacggagttctcccgatctggaagcgggaccccaaccaagagcagaagtgtctctggcgtgctgaacggaggcaaatccatgagccacaatgaatcaacgtagccagtgagggcaaaagaagggctctgtaacagaaccttacctccaggtgctgttgaattcttctagcagtccttcacccaaaagttcaaatttgtcagtgacatttaccaaacaaacaggcagagttcactattctatctgccattagaccttcttatcatccatactaaagccccattatttagattgagcttgtgcataagaatgccaagcattttagtgaactaaatctgagagaaggactgccaaattttctcatgatctcacctatactttggggatgataatccaaaagtatttcacagcactaatgctgatcaaaatttgctctcccaccaagaaaatgtaaaagaccacaattgttcttcaaaaacaaacaaaacaaaacaaaacaaaattaactgcttaaatgttttgtcggggcaaacaaaattatgtgaattgtgttgttttcttggcttgatgttttctatctacgcttgattcacatgtactcttttctttggcatagtgcaactttatgatttctgaaattcaatggttctattgactttttgcgtcacttaatccaaatcaaccaaattcagggttgaatctgaattggcttctcaggctcaaggtaacagtgttcttgtggtttgaccaattgtttttctttctttttttttttttttagatttggtggtattctggtcaagttattgtgctgtactttgtgcgtagaaattgagttgtattgtcaaccccagtcagtaaagagaacttcaaaaaattatcctcaagtgtagatttctcttaattccatttgtgtatcatgttaaactattgttgtggcttcttgtgtaaagacaggaactgtggaactgtgatgttgtcttttgtgttgttaaaataagaaatgtcttatctgtatatgtatgagtcttcctgtcattgtatttggcacatgaatattgtgtacaaggaattgttaagactggttttccctcaacaacatatattatacttgctactggaaaagtgtttaagacttagctaggtttccatttagatcttcatatctgttgcatggaagaaagttgggttcttggcatagagttgcatgatatgtaagattttgtgcattcataattgttaaaaatctgtgttccaaaagtggacatagcatgtacaggcagttttctgtcctgtgcacaaaaagtttaaaaaagttgtttaatatttgttgttgtatacccaaatacgcaccgaataaactctttatattcattcaaaaaaaaaaaaaaacatgta

SEQ ID NO: 286340 - DNA, 2488 bp, Homo sapiens
cgcgtgcccacaccttgccgtttatatagaatgcgccgcggtgttgattcgtggctctctaggaccggagagttctttggaaggagagcgcgagcgagggagcgggcgagctccgagggggtgtgggtgtagggagagagagaaagagagcaggcagcggcggcggcggcagcggtggggaaaagcggattccgccccgaaccacaccgaggggagctcgtggtcgagacttgccgccctaagcactctcccaagtccgacccgctcggcgaggacttccgtcttctgagcgaaccttgtcaagcaagctgggatctatgagtggaaaggtgaccaagcccaaagaggagaaagatgcttctaagggagtttctctgcacaagctctctgtttgcctgctgtcgtccacataagatgtgacttgctcctgcttgccttcctccatgattgtgaggcctccccagccacgtggaactttctggatgacgccccccctggcacacaggaatacattatgttacgacaagattccatccaatctgcggaattaaagaaaaaagagtccccctttcgtgctaagtgtcacgaaatcttctgctgcccgctgaagcaagtacaccacaaagagaacacagagccggaagagcctcagcttaagggtatagttaccaagctatacagccgacaaggctaccacttgcagctgcaggcggatggaaccattgatggcaccaaagatgaggacagcacttacactctgtttaacctcatccctgtgggtctgcgagtggtggctatccaaggagttcaaaccaagctgtacttggcaatgaacagtgagggatacttgtacacctcggaacttttcacacctgagtgcaaattcaaagaatcagtgtttgaaaattattatgtgacatattcatcaatgatataccgtcagcagcagtcaggccgagggtggtatctgggtctgaacaaagaaggagagatcatgaaaggcaaccatgtgaagaagaacaagcctgcagctcattttctgcctaaaccactgaaagtggccatgtacaaggagccatcactgcacgatctcacggagttctcccgatctggaagcgggaccccaaccaagagcagaagtgtctctggcgtgctgaacggaggcaaatccatgagccacaatgaatcaacgtagccagtgagggcaaaagaagggctctgtaacagaaccttacctccaggtgctgttgaattcttctagcagtccttcacccaaaagttcaaatttgtcagtgacatttaccaaacaaacaggcagagttcactattctatctgccattagaccttcttatcatccatactaaagccccattatttagattgagcttgtgcataagaatgccaagcattttagtgaactaaatctgagagaaggactgccaaattttctcatgatctcacctatactttggggatgataatccaaaagtatttcacagcactaatgctgatcaaaatttgctctcccaccaagaaaatgtaaaagaccacaattgttcttcaaaaacaaacaaaacaaaacaaaacaaaattaactgcttaaatgttttgtcggggcaaacaaaattatgtgaattgtgttgttttcttggcttgatgttttctatctacgcttgattcacatgtactcttttctttggcatagtgcaactttatgatttctgaaattcaatggttctattgactttttgcgtcacttaatccaaatcaaccaaattcagggttgaatctgaattggcttctcaggctcaaggtaacagtgttcttgtggtttgaccaattgtttttctttctttttttttttttttagatttggtggtattctggtcaagttattgtgctgtactttgtgcgtagaaattgagttgtattgtcaaccccagtcagtaaagagaacttcaaaaaattatcctcaagtgtagatttctcttaattccatttgtgtatcatgttaaactattgttgtggcttcttgtgtaaagacaggaactgtggaactgtgatgttgtcttttgtgttgttaaaataagaaatgtcttatctgtatatgtatgagtcttcctgtcattgtatttggcacatgaatattgtgtacaaggaattgttaagactggttttccctcaacaacatatattatacttgctactggaaaagtgtttaagacttagctaggtttccatttagatcttcatatctgttgcatggaagaaagttgggttcttggcatagagttgcatgatatgtaagattttgtgcattcataattgttaaaaatctgtgttccaaaagtggacatagcatgtacaggcagttttctgtcctgtgcacaaaaagtttaaaaaagttgtttaatatttgttgttgtatacccaaatacgcaccgaataaactctttatattcattcaaaaaaaaaaaaaaacatgta

SEQ ID NO: 286341 - DNA, 2562 bp, Homo sapiens
cgcgtgcccacaccttgccgtttatatagaatgcgccgcggtgttgattcgtggctctctaggaccggagagttctttggaaggagagcgcgagcgagggagcgggcgagctccgagggggtgtgggtgtagggagagagagaaagagagcaggcagcggcggcggcggcagcggtggggaaaagcggattccgccccgaaccacaccgaggggagctcgtggtcgagacttgccgccctaagcactctcccaagtccgacccgctcggcgaggacttccgtcttctgagcgaaccttgtcaagcaagctgggatctatgagtggaaaggtgaccaagcccaaagaggagaaagatgcttctaagggagtttctctgcacaagctctctgtttgcctgctgtcgtccacataagatgtgacttgctcctgcttgccttcctccatgattgtgaggcctccccagccacgtggaactaggtgtcatgaggacaagcatgaaaaaagtagggatgcatcatttgagttcttcaggaggaagctactacctaattctggatgacgccccccctggcacacaggaatacattatgttacgacaagattccatccaatctgcggaattaaagaaaaaagagtccccctttcgtgctaagtgtcacgaaatcttctgctgcccgctgaagcaagtacaccacaaagagaacacagagccggaagagcctcagcttaagggtatagttaccaagctatacagccgacaaggctaccacttgcagctgcaggcggatggaaccattgatggcaccaaagatgaggacagcacttacactctgtttaacctcatccctgtgggtctgcgagtggtggctatccaaggagttcaaaccaagctgtacttggcaatgaacagtgagggatacttgtacacctcggaacttttcacacctgagtgcaaattcaaagaatcagtgtttgaaaattattatgtgacatattcatcaatgatataccgtcagcagcagtcaggccgagggtggtatctgggtctgaacaaagaaggagagatcatgaaaggcaaccatgtgaagaagaacaagcctgcagctcattttctgcctaaaccactgaaagtggccatgtacaaggagccatcactgcacgatctcacggagttctcccgatctggaagcgggaccccaaccaagagcagaagtgtctctggcgtgctgaacggaggcaaatccatgagccacaatgaatcaacgtagccagtgagggcaaaagaagggctctgtaacagaaccttacctccaggtgctgttgaattcttctagcagtccttcacccaaaagttcaaatttgtcagtgacatttaccaaacaaacaggcagagttcactattctatctgccattagaccttcttatcatccatactaaagccccattatttagattgagcttgtgcataagaatgccaagcattttagtgaactaaatctgagagaaggactgccaaattttctcatgatctcacctatactttggggatgataatccaaaagtatttcacagcactaatgctgatcaaaatttgctctcccaccaagaaaatgtaaaagaccacaattgttcttcaaaaacaaacaaaacaaaacaaaacaaaattaactgcttaaatgttttgtcggggcaaacaaaattatgtgaattgtgttgttttcttggcttgatgttttctatctacgcttgattcacatgtactcttttctttggcatagtgcaactttatgatttctgaaattcaatggttctattgactttttgcgtcacttaatccaaatcaaccaaattcagggttgaatctgaattggcttctcaggctcaaggtaacagtgttcttgtggtttgaccaattgtttttctttctttttttttttttttagatttggtggtattctggtcaagttattgtgctgtactttgtgcgtagaaattgagttgtattgtcaaccccagtcagtaaagagaacttcaaaaaattatcctcaagtgtagatttctcttaattccatttgtgtatcatgttaaactattgttgtggcttcttgtgtaaagacaggaactgtggaactgtgatgttgtcttttgtgttgttaaaataagaaatgtcttatctgtatatgtatgagtcttcctgtcattgtatttggcacatgaatattgtgtacaaggaattgttaagactggttttccctcaacaacatatattatacttgctactggaaaagtgtttaagacttagctaggtttccatttagatcttcatatctgttgcatggaagaaagttgggttcttggcatagagttgcatgatatgtaagattttgtgcattcataattgttaaaaatctgtgttccaaaagtggacatagcatgtacaggcagttttctgtcctgtgcacaaaaagtttaaaaaagttgtttaatatttgttgttgtatacccaaatacgcaccgaataaactctttatattcattcaaaaaaaaaaaaaaacatgta

SEQ ID NO: 286342 - DNA, 2515 bp, Homo sapiens
cgcgtgcccacaccttgccgtttatatagaatgcgccgcggtgttgattcgtggctctctaggaccggagagttctttggaaggagagcgcgagcgagggagcgggcgagctccgagggggtgtgggtgtagggagagagagaaagagagcaggcagcggcggcggcggcagcggtggggaaaagcggattccgccccgaaccacaccgaggggagctcgtggtcgagacttgccgccctaagcactctcccaagtccgacccgctcggcgaggacttccgtcttctgagcgaaccttgtcaagcaagctgggatctatgagtggaaaggtgaccaagcccaaagaggagaaagatgcttctaagggagtttctctgcacaagctctctgtttgcctgctgtcgtccacataagatgtgacttgctcctgcttgccttcctccatgattgtgaggcctccccagccacgtggaactgtgagtcctattaaacctctttcttttttctggatgacgccccccctggcacacaggaatacattatgttacgacaagattccatccaatctgcggaattaaagaaaaaagagtccccctttcgtgctaagtgtcacgaaatcttctgctgcccgctgaagcaagtacaccacaaagagaacacagagccggaagagcctcagcttaagggtatagttaccaagctatacagccgacaaggctaccacttgcagctgcaggcggatggaaccattgatggcaccaaagatgaggacagcacttacactctgtttaacctcatccctgtgggtctgcgagtggtggctatccaaggagttcaaaccaagctgtacttggcaatgaacagtgagggatacttgtacacctcggaacttttcacacctgagtgcaaattcaaagaatcagtgtttgaaaattattatgtgacatattcatcaatgatataccgtcagcagcagtcaggccgagggtggtatctgggtctgaacaaagaaggagagatcatgaaaggcaaccatgtgaagaagaacaagcctgcagctcattttctgcctaaaccactgaaagtggccatgtacaaggagccatcactgcacgatctcacggagttctcccgatctggaagcgggaccccaaccaagagcagaagtgtctctggcgtgctgaacggaggcaaatccatgagccacaatgaatcaacgtagccagtgagggcaaaagaagggctctgtaacagaaccttacctccaggtgctgttgaattcttctagcagtccttcacccaaaagttcaaatttgtcagtgacatttaccaaacaaacaggcagagttcactattctatctgccattagaccttcttatcatccatactaaagccccattatttagattgagcttgtgcataagaatgccaagcattttagtgaactaaatctgagagaaggactgccaaattttctcatgatctcacctatactttggggatgataatccaaaagtatttcacagcactaatgctgatcaaaatttgctctcccaccaagaaaatgtaaaagaccacaattgttcttcaaaaacaaacaaaacaaaacaaaacaaaattaactgcttaaatgttttgtcggggcaaacaaaattatgtgaattgtgttgttttcttggcttgatgttttctatctacgcttgattcacatgtactcttttctttggcatagtgcaactttatgatttctgaaattcaatggttctattgactttttgcgtcacttaatccaaatcaaccaaattcagggttgaatctgaattggcttctcaggctcaaggtaacagtgttcttgtggtttgaccaattgtttttctttctttttttttttttttagatttggtggtattctggtcaagttattgtgctgtactttgtgcgtagaaattgagttgtattgtcaaccccagtcagtaaagagaacttcaaaaaattatcctcaagtgtagatttctcttaattccatttgtgtatcatgttaaactattgttgtggcttcttgtgtaaagacaggaactgtggaactgtgatgttgtcttttgtgttgttaaaataagaaatgtcttatctgtatatgtatgagtcttcctgtcattgtatttggcacatgaatattgtgtacaaggaattgttaagactggttttccctcaacaacatatattatacttgctactggaaaagtgtttaagacttagctaggtttccatttagatcttcatatctgttgcatggaagaaagttgggttcttggcatagagttgcatgatatgtaagattttgtgcattcataattgttaaaaatctgtgttccaaaagtggacatagcatgtacaggcagttttctgtcctgtgcacaaaaagtttaaaaaagttgtttaatatttgttgttgtatacccaaatacgcaccgaataaactctttatattcattcaaaaaaaaaaaaaaacatgta

SEQ ID NO: 286343 - DNA, 2198 bp, Homo sapiens
  misc_feature (2)..(2): n is a, c, g, or t
anacctccttccccccccccgccacccgacacctcctaatcctaaactccttatccaccccaaccctccgggaaggcaggagtttgcacccttcgacacgccgcgtgcaaagcagggggatctatcctccctggccacatgggcctttggctgatggaaaggctgggctttgaggaagctgcatagttctggatgacgccccccctggcacacaggaatacattatgttacgacaagattccatccaatctgcggaattaaagaaaaaagagtccccctttcgtgctaagtgtcacgaaatcttctgctgcccgctgaagcaagtacaccacaaagagaacacagagccggaagagcctcagcttaagggtatagttaccaagctatacagccgacaaggctaccacttgcagctgcaggcggatggaaccattgatggcaccaaagatgaggacagcacttacactctgtttaacctcatccctgtgggtctgcgagtggtggctatccaaggagttcaaaccaagctgtacttggcaatgaacagtgagggatacttgtacacctcggaacttttcacacctgagtgcaaattcaaagaatcagtgtttgaaaattattatgtgacatattcatcaatgatataccgtcagcagcagtcaggccgagggtggtatctgggtctgaacaaagaaggagagatcatgaaaggcaaccatgtgaagaagaacaagcctgcagctcattttctgcctaaaccactgaaagtggccatgtacaaggagccatcactgcacgatctcacggagttctcccgatctggaagcgggaccccaaccaagagcagaagtgtctctggcgtgctgaacggaggcaaatccatgagccacaatgaatcaacgtagccagtgagggcaaaagaagggctctgtaacagaaccttacctccaggtgctgttgaattcttctagcagtccttcacccaaaagttcaaatttgtcagtgacatttaccaaacaaacaggcagagttcactattctatctgccattagaccttcttatcatccatactaaagccccattatttagattgagcttgtgcataagaatgccaagcattttagtgaactaaatctgagagaaggactgccaaattttctcatgatctcacctatactttggggatgataatccaaaagtatttcacagcactaatgctgatcaaaatttgctctcccaccaagaaaatgtaaaagaccacaattgttcttcaaaaacaaacaaaacaaaacaaaacaaaattaactgcttaaatgttttgtcggggcaaacaaaattatgtgaattgtgttgttttcttggcttgatgttttctatctacgcttgattcacatgtactcttttctttggcatagtgcaactttatgatttctgaaattcaatggttctattgactttttgcgtcacttaatccaaatcaaccaaattcagggttgaatctgaattggcttctcaggctcaaggtaacagtgttcttgtggtttgaccaattgtttttctttctttttttttttttttagatttggtggtattctggtcaagttattgtgctgtactttgtgcgtagaaattgagttgtattgtcaaccccagtcagtaaagagaacttcaaaaaattatcctcaagtgtagatttctcttaattccatttgtgtatcatgttaaactattgttgtggcttcttgtgtaaagacaggaactgtggaactgtgatgttgtcttttgtgttgttaaaataagaaatgtcttatctgtatatgtatgagtcttcctgtcattgtatttggcacatgaatattgtgtacaaggaattgttaagactggttttccctcaacaacatatattatacttgctactggaaaagtgtttaagacttagctaggtttccatttagatcttcatatctgttgcatggaagaaagttgggttcttggcatagagttgcatgatatgtaagattttgtgcattcataattgttaaaaatctgtgttccaaaagtggacatagcatgtacaggcagttttctgtcctgtgcacaaaaagtttaaaaaagttgtttaatatttgttgttgtatacccaaatacgcaccgaataaactctttatattcattcaaaaaaaaaaaaaaacatgta

SEQ ID NO: 286344 - DNA, 1491 bp, Homo sapiens
ttaactggatggcactacacttcacacgtgggggagcaggtcgaactcaaaccatgcgaagtggccatgtacaaggagccatcactgcacgatctcacggagttctcccgatctggaagcgggaccccaaccaagagcagaagtgtctctggcgtgctgaacggaggcaaatccatgagccacaatgaatcaacgtagccagtgagggcaaaagaagggctctgtaacagaaccttacctccaggtgctgttgaattcttctagcagtccttcacccaaaagttcaaatttgtcagtgacatttaccaaacaaacaggcagagttcactattctatctgccattagaccttcttatcatccatactaaagccccattatttagattgagcttgtgcataagaatgccaagcattttagtgaactaaatctgagagaaggactgccaaattttctcatgatctcacctatactttggggatgataatccaaaagtatttcacagcactaatgctgatcaaaatttgctctcccaccaagaaaatgtaaaagaccacaattgttcttcaaaaacaaacaaaacaaaacaaaacaaaattaactgcttaaatgttttgtcggggcaaacaaaattatgtgaattgtgttgttttcttggcttgatgttttctatctacgcttgattcacatgtactcttttctttggcatagtgcaactttatgatttctgaaattcaatggttctattgactttttgcgtcacttaatccaaatcaaccaaattcagggttgaatctgaattggcttctcaggctcaaggtaacagtgttcttgtggtttgaccaattgtttttctttctttttttttttttttagatttggtggtattctggtcaagttattgtgctgtactttgtgcgtagaaattgagttgtattgtcaaccccagtcagtaaagagaacttcaaaaaattatcctcaagtgtagatttctcttaattccatttgtgtatcatgttaaactattgttgtggcttcttgtgtaaagacaggaactgtggaactgtgatgttgtcttttgtgttgttaaaataagaaatgtcttatctgtatatgtatgagtcttcctgtcattgtatttggcacatgaatattgtgtacaaggaattgttaagactggttttccctcaacaacatatattatacttgctactggaaaagtgtttaagacttagctaggtttccatttagatcttcatatctgttgcatggaagaaagttgggttcttggcatagagttgcatgatatgtaagattttgtgcattcataattgttaaaaatctgtgttccaaaagtggacatagcatgtacaggcagttttctgtcctgtgcacaaaaagtttaaaaaagttgtttaatatttgttgttgtatacccaaatacgcaccgaataaactctttatattcattcaaaaaaaaaaaaaaacatgta

SEQ ID NO: 286345 - DNA, 1016 bp, Homo sapiens
  misc_feature (489)..(490): n is a, c, g, or t
  misc_feature (506)..(506): n is a, c, g, or t
  misc_feature (509)..(509): n is a, c, g, or t
cgcgtgcccacaccttgccgtttatatagaatgcgccgcggtgttgattcgtggctctctaggaccggagagttctttggaaggagagcgcgagcgagggagcgggcgagctccgagggggtgtgggtgtagggagagagagaaagagagcaggcagcggcggcggcggcagcggtggggaaaagcggattccgccccgaaccacaccgaggggagctcgtggtcgagacttgccgccctaagcactctcccaagtccgacccgctcggcgaggacttccgtcttctgagcgaaccttgtcaagcaagctgggatctatgagtggaaaggtgaccaagcccaaagaggagaaagatgcttctaaggagcctcagcttaagggtatagttaccaagctatacagccgacaaggctaccacttgcagctgcaggcggatggaaccattgatggcaccaaagatgaggacagcacttacactctgtttaacnnctcatccctgtggcgntcntgccaggaaagatccggggtttgggggacctttaatttccacctaaaacggggacaacggcttttccccgaaaagaaccacccgagaaaacggcccttggtttaaaccttttctgggggggaccccaaaaaaggttggggccaaaaaacccagaaaggtttgcggacaacggcgcggacaaatttcaccgcttgtgtgggttaaaccaagaaccccaattccaggggccaaaaaccctttttagtcttccgaagccgaaccccccgttgggagaacgagttgggcccgaagagcagttcttccgaagactaaggccaacaattcccaaggttgtgtttatactgggcgaaagaaattttgccattttaacataggtttggaaaccaatttcaattttcccaattcctgaaaatggacaatcatttaccccggttcccaagcctaagcccaaggtccacaaggggccccggaaggggggtcgggggtatattccttgcggggtcctgg

SEQ ID NO: 286346 - DNA, 826 bp, Homo sapiens
tgccagtgcgcgggcagcccacccaggcaactcccagcgagcggcccgcgcggagcccagggaggccggcagtgaagccggggagtcccggccgctcctctcggccgccccgggggttgcgagcgtggctctccgcaggcgggcagaagctgagggcgcggggcgcggaggaagcgccgcgccgctttgtctcttcacttcttgagcgcggcgagcggctcctcccgcggccggccgctcgggatcgcggcggcggcggcggcgacggcggctcctccttcacccctttcctttcctccccactctctcgtaggcagcggcggcggcggcagcggtggggaaaagcggattccgccccgaaccacaccgaggggagctcgtggtcgagacttgccgccctaagcactctcccaagtccgacccgctcggcgaggacttccgtcttctgagcgaaccttgtcaagcaagctgggatctatgagtggaaaggtgaccaagcccaaagaggagaaagatgcttctaagggtaagcccgcccgccgagtccgcctgctttcctttccttcgtttccctcgccccctcgcgtgcgcgccgccctccggcggctccttgcctccttcccggagcctaagctgcccatgacctctgcgaccccgggagaaaagggggggcagaggtcgctagggggtggatctaggtttgcaccactttccctccttcctcgcggaattgtcgaccctcgagtgcctccagcctcctccacttcccctctggacgcacggtggtggcgctgcgggcagacgaagctgctgcagcctggagcgc

SEQ ID NO: 286347 - DNA, 2729 bp, Homo sapiens
aggcgggcgtcgcccccaccccgcgctccaggtaccggcggcctcagctgccggcggtggctggctgagctccccagcggcccgcgggccggggcgggggcgggccgggggcgttcccgcgggccaccgcccgtgatgtcacaatcgcggcgggccgcggcgctccggggtcggcggtgggcggcgggccgcgagccggcgatcgaagcgggcagctcgcgcctgagtcatggacttcccctggcccctcctctaccactcccactccctcgccggacccccccgccggggctagcgtctgccgcggctccgagggggtggggctgctgggaatggctgtgcccccttcggcccctcagccgcgcgcgtcctttcacctgaggaggcacacgccttgcccgcagtgctcatggggcatggaggagaaggcggcggccagcgccagctgccgggagccgccgggccccccgagggccgccgccgtcgcgtacttcggcatttccgtggacccggacgacatccttcccggggccctgcgcctcatccaggagctgcggccgcattggaaacccgagcaagttcggaccaagcgcttcacggatggcatcaccaacaagctggtggcctgctatgtggaggaggacatgcaggactgcgtgctggtccgggtgtatggggagcggacggagctgctggtggaccgggagaatgaggtcagaaacttccagctgctgcgagcacacagctgtgcccccaaactctactgcaccttccagaatgggctgtgctatgagtacatgcagggtgtggccctggagcctgagcacatccgtgagccccggcttttcaggttaatcgccttagaaatggcaaagattcatactatccacgccaacggcagcctgcccaagcccatcctctggcacaagatgcacaattatttcacgcttgtgaagaacgagatcaaccccagcctttctgcagatgtccctaaggtagaggtgttggaacgggagctggcctggctgaaggagcatctgtcccagctggagtcccctgtggtgttttgtcacaatgacctgctctgcaagaatatcatctatgacagcatcaaaggtcacgtgcggttcattgactatgaatatgctggctacaactaccaagcttttgacattggcaaccatttcaatgagtttgcaggcgtgaatgaggtggattactgcctgtacccggcgcgggagacccagctgcagtggctgcactactacctgcaggcacaaaaggggatggccgtgacccccagggaggtgcaaaggctctacgtgcaagtcaacaagtttgccctgggtcctagctgtgtgtcttccacaatgactgcatccctccagtgctgtagagtcggaaacaggcatggggagattgccaggctgaccctctctggtctgtttccaggcgtctcacttcttctgggctctctgggccctcatccagaaccagtactccaccatcgactttgatttcctcaggtacgcagtgatccgattcaaccagtacttcaaggtgaagcctcaagcgtcagccttggagatgccaaagtgaccagccaccccatccctcccctacccatctgtctggccagacctgttctccagagctcaattctgcactctgggatccacacccttggacagggtgggagaggggacacatgggtgtccagggagaaggctctgtccctgccgccagaccccagtggttgccactgaagacctcattctcctgtctggaggggctgataggacccccttccgggggtccccttcaccccaccaggcttgggaggaagtgcctgcagccaggtcctgaaccataaccacccctgggaaacacatcattcccagcctcaggccctgctggaattggggctgccttatatgtgtgtttaccccttcctggcctggggaaggaggcggggagggctcctttctacctccagtgccctgagcctccagtccgtctccccctgcatgccccatgtgggaggtgctgagctccaaaccagcatcacaccaactctgacacatggatgtacctatcttggtgatgggtgggggccaagaattgagcatgacatcttccccagcagccacctcctctgagatccctcaccttctccaaaccagatccaatcaaacctcagcccgaggaaacatgctccccaacgtgctctcctgtgcttctgttttgtccccctgctggggggacaggagagggagtggtgaggccctgggcctccagagcctggctctgctttgtgctgtggcttagccggaggggacgtggccaagggtgaggtggccaaaaccagaaccagcagtctcctgccttgttccctccctggccctcaggccctccttccagggatgtctctccagctctactttatgtcctgaagctgacccgaggtcttcctatctggaatgactagagggagccaagaggatggggtgggggccagggccccccagggcctatcgtgggagagcctgggcaggatcccatcagaaaggtgctgactaaactggttgcccggacactcaacagcctccacctccctttctaccctcacagctcctggggccttcctggctctggcccagaaagtgattcatttgtaaattatcatggttttctttctgcattaaaatgctcatttccggaaaaaaaag

SEQ ID NO: 286348 - DNA, 2623 bp, Homo sapiens
aggcgggcgtcgcccccaccccgcgctccaggtaccggcggcctcagctgccggcggtggctggctgagctccccagcggcccgcgggccggggcgggggcgggccgggggcgttcccgcgggccaccgcccgtgatgtcacaatcgcggcgggccgcggcgctccggggtcggcggtgggcggcgggccgcgagccggcgatcgaagcgggcagctcgcgcctgagtcatggacttcccctggcccctcctctaccactcccactccctcgccggacccccccgccggggctagcgtctgccgcggctccgagggggtggggctgctgggaatggctgtgcccccttcggcccctcagccgcgcgcgtcctttcacctgaggaggcacacgccttgcccgcagtgctcatggggcatggaggagaaggcggcggccagcgccagctgccgggagccgccgggccccccgagggccgccgccgtcgcgtacttcggcatttccgtggacccggacgacatccttcccggggccctgcgcctcatccaggagctgcggccgcattggaaacccgagcaagttcggaccaagcgcttcacggatggcatcaccaacaagctggtggcctgctatgtggaggaggacatgcaggactgcgtgctggtccgggtgtatggggagcggacggagctgctggtggaccgggagaatgaggtcagaaacttccagctgctgcgagcacacagctgtgcccccaaactctactgcaccttccagaatgggctgtgctatgagtacatgcagggtgtggccctggagcctgagcacatccgtgagccccggcttttcaggttaatcgccttagaaatggcaaagattcatactatccacgccaacggcagcctgcccaagcccatcctctggcacaagatgcacaattatttcacgcttgtgaagaacgagatcaaccccagcctttctgcagatgtccctaaggtagaggtgttggaacgggagctggcctggctgaaggagcatctgtcccagctggagtcccctgtggtgttttgtcacaatgacctgctctgcaagaatatcatctatgacagcatcaaaggtcacgtgcggttcattgactatgaatatgctggctacaactaccaagcttttgacattggcaaccatttcaatgagtttgcaggcgtgaatgaggtggattactgcctgtacccggcgcgggagacccagctgcagtggctgcactactacctgcaggcacaaaaggggatggccgtgacccccagggaggtgcaaaggctctacgtgcaagtcaacaagtttgccctggcgtctcacttcttctgggctctctgggccctcatccagaaccagtactccaccatcgactttgatttcctcaggtacgcagtgatccgattcaaccagtacttcaaggtgaagcctcaagcgtcagccttggagatgccaaagtgaccagccaccccatccctcccctacccatctgtctggccagacctgttctccagagctcaattctgcactctgggatccacacccttggacagggtgggagaggggacacatgggtgtccagggagaaggctctgtccctgccgccagaccccagtggttgccactgaagacctcattctcctgtctggaggggctgataggacccccttccgggggtccccttcaccccaccaggcttgggaggaagtgcctgcagccaggtcctgaaccataaccacccctgggaaacacatcattcccagcctcaggccctgctggaattggggctgccttatatgtgtgtttaccccttcctggcctggggaaggaggcggggagggctcctttctacctccagtgccctgagcctccagtccgtctccccctgcatgccccatgtgggaggtgctgagctccaaaccagcatcacaccaactctgacacatggatgtacctatcttggtgatgggtgggggccaagaattgagcatgacatcttccccagcagccacctcctctgagatccctcaccttctccaaaccagatccaatcaaacctcagcccgaggaaacatgctccccaacgtgctctcctgtgcttctgttttgtccccctgctggggggacaggagagggagtggtgaggccctgggcctccagagcctggctctgctttgtgctgtggcttagccggaggggacgtggccaagggtgaggtggccaaaaccagaaccagcagtctcctgccttgttccctccctggccctcaggccctccttccagggatgtctctccagctctactttatgtcctgaagctgacccgaggtcttcctatctggaatgactagagggagccaagaggatggggtgggggccagggccccccagggcctatcgtgggagagcctgggcaggatcccatcagaaaggtgctgactaaactggttgcccggacactcaacagcctccacctccctttctaccctcacagctcctggggccttcctggctctggcccagaaagtgattcatttgtaaattatcatggttttctttctgcattaaaatgctcatttccggaaaaaaaag

SEQ ID NO: 286349 - DNA, 2500 bp, Homo sapiens
aggcgggcgtcgcccccaccccgcgctccaggtaccggcggcctcagctgccggcggtggctggctgagctccccagcggcccgcgggccggggcgggggcgggccgggggcgttcccgcgggccaccgcccgtgatgtcacaatcgcggcgggccgcggcgctccggggtcggcggtgggcggcgggccgcgagccggcgatcgaagcgggcagctcgcgcctgagtcatggacttcccctggcccctcctctaccactcccactccctcgccggacccccccgccggggctagcgtctgccgcggctccgagggggtggggctgctgggaatggctgtgcccccttcggcccctcagccgcgcgcgtcctttcacctgaggaggcacacgccttgcccgcagtgctcatggggcatggaggagaaggcggcggccagcgccagctgccgggagccgccgggccccccgagggccgccgccgtcgcgtacttcggcatttccgtggacccggacgacatccttcccggggccctgcgcctcatccaggagctgcggccgcattggaaacccgagcaagttcggaccaagcgcttcacggatggcatcaccaacaagctggtggcctgctatgtggaggaggacatgcaggactgcgtgctggtccgggtgtatggggagcggacggagctgctggtggaccgggagaatgaggtcagaaacttccagctgctgcgagcacacagctgtgcccccaaactctactgcaccttccagaatgggctgtgctatgagtacatgcagggtgtggccctggagcctgagcacatccgtgagccccggcttttcagcctttctgcagatgtccctaaggtagaggtgttggaacgggagctggcctggctgaaggagcatctgtcccagctggagtcccctgtggtgttttgtcacaatgacctgctctgcaagaatatcatctatgacagcatcaaaggtcacgtgcggttcattgactatgaatatgctggctacaactaccaagcttttgacattggcaaccatttcaatgagtttgcaggcgtgaatgaggtggattactgcctgtacccggcgcgggagacccagctgcagtggctgcactactacctgcaggcacaaaaggggatggccgtgacccccagggaggtgcaaaggctctacgtgcaagtcaacaagtttgccctggcgtctcacttcttctgggctctctgggccctcatccagaaccagtactccaccatcgactttgatttcctcaggtacgcagtgatccgattcaaccagtacttcaaggtgaagcctcaagcgtcagccttggagatgccaaagtgaccagccaccccatccctcccctacccatctgtctggccagacctgttctccagagctcaattctgcactctgggatccacacccttggacagggtgggagaggggacacatgggtgtccagggagaaggctctgtccctgccgccagaccccagtggttgccactgaagacctcattctcctgtctggaggggctgataggacccccttccgggggtccccttcaccccaccaggcttgggaggaagtgcctgcagccaggtcctgaaccataaccacccctgggaaacacatcattcccagcctcaggccctgctggaattggggctgccttatatgtgtgtttaccccttcctggcctggggaaggaggcggggagggctcctttctacctccagtgccctgagcctccagtccgtctccccctgcatgccccatgtgggaggtgctgagctccaaaccagcatcacaccaactctgacacatggatgtacctatcttggtgatgggtgggggccaagaattgagcatgacatcttccccagcagccacctcctctgagatccctcaccttctccaaaccagatccaatcaaacctcagcccgaggaaacatgctccccaacgtgctctcctgtgcttctgttttgtccccctgctggggggacaggagagggagtggtgaggccctgggcctccagagcctggctctgctttgtgctgtggcttagccggaggggacgtggccaagggtgaggtggccaaaaccagaaccagcagtctcctgccttgttccctccctggccctcaggccctccttccagggatgtctctccagctctactttatgtcctgaagctgacccgaggtcttcctatctggaatgactagagggagccaagaggatggggtgggggccagggccccccagggcctatcgtgggagagcctgggcaggatcccatcagaaaggtgctgactaaactggttgcccggacactcaacagcctccacctccctttctaccctcacagctcctggggccttcctggctctggcccagaaagtgattcatttgtaaattatcatggttttctttctgcattaaaatgctcatttccggaaaaaaaag

SEQ ID NO: 286350 - DNA, 2339 bp, Homo sapiens
  misc_feature (2174)..(2174): n is a, c, g, or t
  misc_feature (2176)..(2176): n is a, c, g, or t
aggcgggcgtcgcccccaccccgcgctccaggtaccggcggcctcagctgccggcggtggctggctgagctccccagcggcccgcgggccggggcgggggcgggccgggggcgttcccgcgggccaccgcccgtgatgtcacaatcgcggcgggccgcggcgctccggggtcggcggtgggcggcgggccgcgagccggcgatcgaagcgggcagctcgcgcctgagtcatggacttcccctggcccctcctctaccactcccactccctcgccggacccccccgccggggctagcgtctgccgcggctccgagggggtggggctgctgggaatggctgtgcccccttcggcccctcagccgcgcgcgtcctttcacctgaggaggcacacgccttgcccgcagtgctcatggggcatggaggagaaggcggcggccagcgccagctgccgggagccgccgggccccccgagggccgccgccgtcgcgtacttcggcatttccgtggacccggacgacatccttcccggggccctgcgcctcatccaggagctgcggccgcattggaaacccgagcaagttcggaccaagcgcttcacggatggcatcaccaacaagctggtggcctgctatgtggaggaggacatgcaggactgcgtgctggtccgggtgtatggggagcggacggagctgctggtggaccgggagaatgaggtcagaaacttccagctgctgcgagcacacagctgtgcccccaaactctactgcaccttccagaatgggctgtgctatgagtacatgcagggtgtggccctggagcctgagcacatccgtgagccccggcttttcaggttaatcgccttagaaatggcaaagattcatactatccacgccaacggcagcctgcccaagcccatcctctggcacaagatgcacaattatttcacgcttgtgaagaacgagatcaaccccagcctttctgcagatgtccctaaggtagaggtgttggaacgggagctggcctggctgaaggagcatctgtcccagctggagtcccctgtggtgttttgtcacaatgacctgctctgcaagaatatcatctatgacagcatcaaaggtcacgtgcggttcattgactatgaatatgctggctacaactaccaagcttttgacattggcaaccatttcaatgagtttgcaggcgtgaatgaggtggattactgcctgtacccggcgcgggagacccagctgcagtggctgcactactacctgcaggcacaaaaggggatggccgtgacccccagggaggtgcaaaggctctacgtgcaagtcaacaagtttgccctggcgtctcacttcttctgggctctctgggccctcatccagaaccagtactccaccatcgactttgatttcctcaggtacgcagtgatccgattcaaccagtacttcaaggtgaagcctcaagcgtcagccttggagatgccaaagtgaccagccaccccatccctcccctacccatctgtctggccagacctgttctccagagctcaattctgcactctgggatccacacccttggacagggtgggagaggggacacatgggtgtccagggagaaggctctgtccctgccgccagaccccagtggttgccactgaagacctcattctcctgtctggaggggctgataggacccccttccgggggtccccttcaccccaccaggcttgggaggaagtgcctgcagccaggtcctgaaccataaccacccctgggaaacacatcattcccagcctcaggccctgctggaattggggctgccttatatgtgtgtttaccccttcctggcctggggaaggaggcggggagggctcctttctacctccagtgccctgagcctccagtccgtctccccctgcatgccccatgtgggaggtgctgagctccaaaccagcatcacaccaactctgacacatggatgtacctatcttggtgatgggtgggggccaagaattgagcatgacatcttccccagcagccacctcctctgagatccctcaccttctccaaaccagatccaatcaaacctcagcccgaggaaacatgctccccaacgtgctctcctgtgcttctgttttgtccccctgctggggggacaggagagggagtggncntattcctgtgccccggccctgtcctcactatcagtcagttcagtatttgcttttcacgtgagtggcgggcttttttgtagcaatcagaacttttaaaacaaggcatggagtttgccttgggagatttcccaggaaggaaggaagatttaaaagcggagcctgg

SEQ ID NO: 286351 - DNA, 2311 bp, Homo sapiens
aggcgggcgtcgcccccaccccgcgctccaggtaccggcggcctcagctgccggcggtggctggctgagctccccagcggcccgcgggccggggcgggggcgggccgggggcgttcccgcgggccaccgcccgtgatgtcacaatcgcggcgggccgcggcgctccggggtcggcggtgggcggcgggccgcgagccggcgatcgaagcgggcagctcgcgcctgagtcatggacttcccctggcccctcctctaccactcccactccctcgccggacccccccgccggggctagcgtctgccgcggctccgagggggtggggctgctgggaatggctgtgcccccttcggcccctcagccgcgcgcgtcctttcacctgaggaggcacacgccttgcccgcagtgctcatggggcatggaggagaaggcggcggccagcgccagctgccgggagccgccgggccccccgagggccgccgccgtcgcgtacttcggcatttccgtggacccggacgacatccttcccggggccctgcgcctcatccaggagctgcggccgcattggaaacccgagcaagttcggaccaagcgcttcacggatggcatcaccaacaagctggtggcctgctatgtggaggaggacatgcaggactgcgtgctggtccgggtgtatggggagcggacggagctgctggtggaccgggagaatgaggtcagaaacttccagctgctgcgagcacacagctgtgcccccaaactctactgcaccttccagaatgggctgtgctatgagtacatgcagggtgtggccctggagcctgagcacatccgtgagccccggcttttcaggttaatcgccttagaaatggcaaagattcatactatccacgccaacggcagcctgcccaagcccatcctctggcacaagatgcacaattatttcacgcttgtgaagaacgagatcaaccccagcctttctgcagatgtccctaaggtagaggtgttggaacgggagctggcctggctgaaggagcatctgtcccagctggagtcccctgtggtgttttgtcacaatgacctgctctgcaagaatatcatctatgacagcatcaaaggtcacgtgcggttcattgactatgaatatgctggctacaactaccaagcttttgacattggcaaccatttcaatgagtttgcaggcgtgaatgaggtggattactgcctgtacccggcgcgggagacccagctgcagtggctgcactactacctgcaggcacaaaaggggatggccgtgacccccagggaggtgcaaaggctctacgtgcaagtcaacaagtttgccctggcgtctcacttcttctgggctctctgggccctcatccagaaccagtactccaccatcgactttgatttcctcaggtacgcagtgatccgattcaaccagtacttcaaggtgaagcctcaagcgtcagccttggagatgccaaagtgaccagccaccccatccctcccctacccatctgtctggccagacctgttctccagagctcaattctgcactctgggatccacacccttggacagggtgggagaggggacacatgggtgtccagggagaaggctctgtccctgccgccagaccccagtggttgccactgaagacctcattctcctgtctggaggggctgataggacccccttccgggggtccccttcaccccaccaggcttgggaggaagtgcctgcagccaggtcctgaaccataaccacccctgggaaacacatcattcccagcctcaggccctgctggaattggggctgccttatatgtgtgtttaccccttcctggcctggggaaggaggcggggagggctcctttctacctccagtgccctgagcctccagtccgtctccccctgcatgccccatgtgggaggtgctgagctccaaaccagcatcacaccaactctgacacatggatgtacctatcttggtgatgggtgggggccaagaattgagcatgacatcttccccagcagccacctcctctgagatccctcaccttctccaaaccagatccaatcaaacctcagcccgaggaaacatgctccccaacgtgctctcctgtgcttctgttttgtccccctgctggggggacaggagagggagtggaggctcttctcttggcaatggaggttccgaacttgtgaggattcacccctttgattcctctgacccgcatcgaatggccactttttctttaatcttaaggaccccctttgaaagtgcgcccccgcggggcccgggaga

SEQ ID NO: 286352 - DNA, 1999 bp, Homo sapiens
ctggaaagggagcagccaggctaaggtcttaattcattctcctctcttctgctgagaccttccttctgcaggacctgtgctcctaagggacttgcaatcatcccatccttggccctctggcaagtgccctggtgggcctggagggtccctatctggccaggaggaaatgagtggggaaggcaatgtcccagcactgatgctctactcttcctgttccctgctgtaggttaatcgccttagaaatggcaaagattcatactatccacgccaacggcagcctgcccaagcccatcctctggcacaagatgcacaattatttcacgcttgtgaagaacgagatcaaccccagcctttctgcagatgtccctaaggtagaggtgttggaacgggagctggcctggctgaaggagcatctgtcccagctggagtcccctgtggtgttttgtcacaatgacctgctctgcaagaatatcatctatgacagcatcaaaggtcacgtgcggttcattgactatgaatatgctggctacaactaccaagcttttgacattggcaaccatttcaatgagtttgcaggcgtgaatgaggtggattactgcctgtacccggcgcgggagacccagctgcagtggctgcactactacctgcaggcacaaaaggggatggccgtgacccccagggaggtgcaaaggctctacgtgcaagtcaacaagtttgccctggcgtctcacttcttctgggctctctgggccctcatccagaaccagtactccaccatcgactttgatttcctcaggtacgcagtgatccgattcaaccagtacttcaaggtgaagcctcaagcgtcagccttggagatgccaaagtgaccagccaccccatccctcccctacccatctgtctggccagacctgttctccagagctcaattctgcactctgggatccacacccttggacagggtgggagaggggacacatgggtgtccagggagaaggctctgtccctgccgccagaccccagtggttgccactgaagacctcattctcctgtctggaggggctgataggacccccttccgggggtccccttcaccccaccaggcttgggaggaagtgcctgcagccaggtcctgaaccataaccacccctgggaaacacatcattcccagcctcaggccctgctggaattggggctgccttatatgtgtgtttaccccttcctggcctggggaaggaggcggggagggctcctttctacctccagtgccctgagcctccagtccgtctccccctgcatgccccatgtgggaggtgctgagctccaaaccagcatcacaccaactctgacacatggatgtacctatcttggtgatgggtgggggccaagaattgagcatgacatcttccccagcagccacctcctctgagatccctcaccttctccaaaccagatccaatcaaacctcagcccgaggaaacatgctccccaacgtgctctcctgtgcttctgttttgtccccctgctggggggacaggagagggagtggtgaggccctgggcctccagagcctggctctgctttgtgctgtggcttagccggaggggacgtggccaagggtgaggtggccaaaaccagaaccagcagtctcctgccttgttccctccctggccctcaggccctccttccagggatgtctctccagctctactttatgtcctgaagctgacccgaggtcttcctatctggaatgactagagggagccaagaggatggggtgggggccagggccccccagggcctatcgtgggagagcctgggcaggatcccatcagaaaggtgctgactaaactggttgcccggacactcaacagcctccacctccctttctaccctcacagctcctggggccttcctggctctggcccagaaagtgattcatttgtaaattatcatggttttctttctgcattaaaatgctcatttccggaaaaaaaag

SEQ ID NO: 286353 - DNA, 1892 bp, Homo sapiens
agcagacggttggggggtgggacagcggaagggaagactggaagaggactgggagggcccagctgggacacagggcctcgggcgatggggtctttatcaaggccctccttctctgaccggttaatcgccttagaaatggcaaagattcatactatccacgccaacggcagcctgcccaagcccatcctctggcacaagatgcacaattatttcacgcttgtgaagaacgagatcaaccccagcctttctgcagatgtccctaaggtagaggtgttggaacgggagctggcctggctgaaggagcatctgtcccagctggagtcccctgtggtgttttgtcacaatgacctgctctgcaagaatatcatctatgacagcatcaaaggtcacgtgcggttcattgactatgaatatgctggctacaactaccaagcttttgacattggcaaccatttcaatgagtttgcaggcgtgaatgaggtggattactgcctgtacccggcgcgggagacccagctgcagtggctgcactactacctgcaggcacaaaaggggatggccgtgacccccagggaggtgcaaaggctctacgtgcaagtcaacaagtttgccctggcgtctcacttcttctgggctctctgggccctcatccagaaccagtactccaccatcgactttgatttcctcaggtacgcagtgatccgattcaaccagtacttcaaggtgaagcctcaagcgtcagccttggagatgccaaagtgaccagccaccccatccctcccctacccatctgtctggccagacctgttctccagagctcaattctgcactctgggatccacacccttggacagggtgggagaggggacacatgggtgtccagggagaaggctctgtccctgccgccagaccccagtggttgccactgaagacctcattctcctgtctggaggggctgataggacccccttccgggggtccccttcaccccaccaggcttgggaggaagtgcctgcagccaggtcctgaaccataaccacccctgggaaacacatcattcccagcctcaggccctgctggaattggggctgccttatatgtgtgtttaccccttcctggcctggggaaggaggcggggagggctcctttctacctccagtgccctgagcctccagtccgtctccccctgcatgccccatgtgggaggtgctgagctccaaaccagcatcacaccaactctgacacatggatgtacctatcttggtgatgggtgggggccaagaattgagcatgacatcttccccagcagccacctcctctgagatccctcaccttctccaaaccagatccaatcaaacctcagcccgaggaaacatgctccccaacgtgctctcctgtgcttctgttttgtccccctgctggggggacaggagagggagtggtgaggccctgggcctccagagcctggctctgctttgtgctgtggcttagccggaggggacgtggccaagggtgaggtggccaaaaccagaaccagcagtctcctgccttgttccctccctggccctcaggccctccttccagggatgtctctccagctctactttatgtcctgaagctgacccgaggtcttcctatctggaatgactagagggagccaagaggatggggtgggggccagggccccccagggcctatcgtgggagagcctgggcaggatcccatcagaaaggtgctgactaaactggttgcccggacactcaacagcctccacctccctttctaccctcacagctcctggggccttcctggctctggcccagaaagtgattcatttgtaaattatcatggttttctttctgcattaaaatgctcatttccggaaaaaaaag

SEQ ID NO: 286354 - DNA, 1770 bp, Homo sapiens
agcagggttttggttggttggttagctggcttcacggagctgttcttccggctggcacttggacaagcaaaagttagaccttgatttaggtcttaagttaatttgtaggagggaagggggaaaggaaataaaaaattcccactttgaaaagtctgtgccaagggccagtctcagtggctcatgcctataatcccagcagtttgggaggccaaggcatgtggattgcttaagcccaggaattcaagaccagcccaggcaatgtggtcacgtgcggttcattgactatgaatatgctggctacaactaccaagcttttgacattggcaaccatttcaatgagtttgcaggcgtgaatgaggtggattactgcctgtacccggcgcgggagacccagctgcagtggctgcactactacctgcaggcacaaaaggggatggccgtgacccccagggaggtgcaaaggctctacgtgcaagtcaacaagtttgccctggcgtctcacttcttctgggctctctgggccctcatccagaaccagtactccaccatcgactttgatttcctcaggtacgcagtgatccgattcaaccagtacttcaaggtgaagcctcaagcgtcagccttggagatgccaaagtgaccagccaccccatccctcccctacccatctgtctggccagacctgttctccagagctcaattctgcactctgggatccacacccttggacagggtgggagaggggacacatgggtgtccagggagaaggctctgtccctgccgccagaccccagtggttgccactgaagacctcattctcctgtctggaggggctgataggacccccttccgggggtccccttcaccccaccaggcttgggaggaagtgcctgcagccaggtcctgaaccataaccacccctgggaaacacatcattcccagcctcaggccctgctggaattggggctgccttatatgtgtgtttaccccttcctggcctggggaaggaggcggggagggctcctttctacctccagtgccctgagcctccagtccgtctccccctgcatgccccatgtgggaggtgctgagctccaaaccagcatcacaccaactctgacacatggatgtacctatcttggtgatgggtgggggccaagaattgagcatgacatcttccccagcagccacctcctctgagatccctcaccttctccaaaccagatccaatcaaacctcagcccgaggaaacatgctccccaacgtgctctcctgtgcttctgttttgtccccctgctggggggacaggagagggagtggtgaggccctgggcctccagagcctggctctgctttgtgctgtggcttagccggaggggacgtggccaagggtgaggtggccaaaaccagaaccagcagtctcctgccttgttccctccctggccctcaggccctccttccagggatgtctctccagctctactttatgtcctgaagctgacccgaggtcttcctatctggaatgactagagggagccaagaggatggggtgggggccagggccccccagggcctatcgtgggagagcctgggcaggatcccatcagaaaggtgctgactaaactggttgcccggacactcaacagcctccacctccctttctaccctcacagctcctggggccttcctggctctggcccagaaagtgattcatttgtaaattatcatggttttctttctgcattaaaatgctcatttccggaaaaaaaag

SEQ ID NO: 286355 - DNA, 1579 bp, Homo sapiens
agcagggttttggttggttggttagctggcttcacggagctgttcttccggctggcacttggacaagcaaaagtcacgtgcggttcattgactatgaatatgctggctacaactaccaagcttttgacattggcaaccatttcaatgagtttgcaggcgtgaatgaggtggattactgcctgtacccggcgcgggagacccagctgcagtggctgcactactacctgcaggcacaaaaggggatggccgtgacccccagggaggtgcaaaggctctacgtgcaagtcaacaagtttgccctggcgtctcacttcttctgggctctctgggccctcatccagaaccagtactccaccatcgactttgatttcctcaggtacgcagtgatccgattcaaccagtacttcaaggtgaagcctcaagcgtcagccttggagatgccaaagtgaccagccaccccatccctcccctacccatctgtctggccagacctgttctccagagctcaattctgcactctgggatccacacccttggacagggtgggagaggggacacatgggtgtccagggagaaggctctgtccctgccgccagaccccagtggttgccactgaagacctcattctcctgtctggaggggctgataggacccccttccgggggtccccttcaccccaccaggcttgggaggaagtgcctgcagccaggtcctgaaccataaccacccctgggaaacacatcattcccagcctcaggccctgctggaattggggctgccttatatgtgtgtttaccccttcctggcctggggaaggaggcggggagggctcctttctacctccagtgccctgagcctccagtccgtctccccctgcatgccccatgtgggaggtgctgagctccaaaccagcatcacaccaactctgacacatggatgtacctatcttggtgatgggtgggggccaagaattgagcatgacatcttccccagcagccacctcctctgagatccctcaccttctccaaaccagatccaatcaaacctcagcccgaggaaacatgctccccaacgtgctctcctgtgcttctgttttgtccccctgctggggggacaggagagggagtggtgaggccctgggcctccagagcctggctctgctttgtgctgtggcttagccggaggggacgtggccaagggtgaggtggccaaaaccagaaccagcagtctcctgccttgttccctccctggccctcaggccctccttccagggatgtctctccagctctactttatgtcctgaagctgacccgaggtcttcctatctggaatgactagagggagccaagaggatggggtgggggccagggccccccagggcctatcgtgggagagcctgggcaggatcccatcagaaaggtgctgactaaactggttgcccggacactcaacagcctccacctccctttctaccctcacagctcctggggccttcctggctctggcccagaaagtgattcatttgtaaattatcatggttttctttctgcattaaaatgctcatttccggaaaaaaaag

SEQ ID NO: 286356 - DNA, 1552 bp, Homo sapiens
aggcgggcgtcgcccccaccccgcgctccaggtaccggcggcctcagctgccggcggtggctggctgagctccccagcggcccgcgggccggggcgggggcgggccgggggcgttcccgcgggccaccgcccgtgatgtcacaatcgcggcgggccgcggcgctccggggtcggcggtgggcggcgggccgcgagccggcgatcgaagcgggcagctcgcgcctgagtcatggacttcccctggcccctcctctaccactcccactccctcgccggacccccccgccggggctagcgtctgccgcggctccgagggggtggggctgctgggaatggctgtgcccccttcggcccctcagccgcgcgcgtcctttcacctgaggaggcacacgccttgcccgcagtgctcatggggcatggaggagaaggcggcggccagcgccagctgccgggagccgccgggccccccgagggccgccgccgtcgcgtacttcggcatttccgtggacccggacgacatccttcccggggccctgcgcctcatccaggagctgcggccgcattggaaacccgagcaagttcggaccaagcgcttcacggatggcatcaccaacaagctggtggcctgctatgtggaggaggacatgcaggactgcgtgctggtccgggtgtatggggagcggacggagctgctggtggaccgggagaatgaggtcagaaacttccagctgctgcgagcacacagctgtgcccccaaactctactgcaccttccagaatgggctgtgctatgagtacatgcagggtgtggccctggagcctgagcacatccgtgagccccggcttttcaggttaatcgccttagaaatggcaaagattcatactatccacgccaacggcagcctgcccaagcccatcctctggcacaagatgcacaattatttcacgcttgtgaagaacgagatcaaccccagcctttctgcagatgtccctaaggtagaggtgttggaacgggagctggcctggctgaaggagcatctgtcccagctggagtcccctgtggtgttttgtcacaatgacctgctctgcaagaatatcatctatgacagcatcaaaggtcacgtgcggttcattgactatgaatatgctggctacaactaccaagcttttgacattggcaaccatttcaatgagtttgcaggcgtgaatgaggtggattactgcctgtacccggcgcgggagacccagctgcagtggctgcactactacctgcaggcacaaaaggggatggccgtgacccccagggaggtgcaaaggctctacgtgcaagtcaacaagtttgccctggcgtctcacttcttctgggctctctgggccctcatccagaaccagtactccaccatcgactttgatttcctcaggtacgcagtgatccgattcaaccagtacttcaagctcctggggccttcctggctctggcccagaaagtgattcatttgtaaattatcatggttttctttctgcattaaaatgctcatttccggaaaaaaaag

SEQ ID NO: 286357 - DNA, 1830 bp, Homo sapiens
ggtgattcctaggggtaggcaggtgttctataaaggcatagtatgcacaatggaaccatttgtgtagaggaggcaaggcaggtttttccagcttgagggcttaattagatggaaccgaggaggcaactcacatggacggagctggacactggggctggagagctgtccccagactagcacagtaaagtgttcacatgatggggccaggccctgtggctcaggatagagaggcatgcccaggccaactggacagccattctccagccccatcaggccaattgtgttccttctggaaccccaggcgtgaatgaggtggattactgcctgtacccggcgcgggagacccagctgcagtggctgcactactacctgcaggcacaaaaggggatggccgtgacccccagggaggtgcaaaggctctacgtgcaagtcaacaagtttgccctgggtcctagctgtgtgtcttccacaatgactgcatccctccagtgctgtagagtcggaaacaggcatggggagattgccaggctgaccctctctggtctgtttccaggcgtctcacttcttctgggctctctgggccctcatccagaaccagtactccaccatcgactttgatttcctcaggtacgcagtgatccgattcaaccagtacttcaaggtgaagcctcaagcgtcagccttggagatgccaaagtgaccagccaccccatccctcccctacccatctgtctggccagacctgttctccagagctcaattctgcactctgggatccacacccttggacagggtgggagaggggacacatgggtgtccagggagaaggctctgtccctgccgccagaccccagtggttgccactgaagacctcattctcctgtctggaggggctgataggacccccttccgggggtccccttcaccccaccaggcttgggaggaagtgcctgcagccaggtcctgaaccataaccacccctgggaaacacatcattcccagcctcaggccctgctggaattggggctgccttatatgtgtgtttaccccttcctggcctggggaaggaggcggggagggctcctttctacctccagtgccctgagcctccagtccgtctccccctgcatgccccatgtgggaggtgctgagctccaaaccagcatcacaccaactctgacacatggatgtacctatcttggtgatgggtgggggccaagaattgagcatgacatcttccccagcagccacctcctctgagatccctcaccttctccaaaccagatccaatcaaacctcagcccgaggaaacatgctccccaacgtgctctcctgtgcttctgttttgtccccctgctggggggacaggagagggagtggtgaggccctgggcctccagagcctggctctgctttgtgctgtggcttagccggaggggacgtggccaagggtgaggtggccaaaaccagaaccagcagtctcctgccttgttccctccctggccctcaggccctccttccagggatgtctctccagctctactttatgtcctgaagctgacccgaggtcttcctatctggaatgactagagggagccaagaggatggggtgggggccagggccccccagggcctatcgtgggagagcctgggcaggatcccatcagaaaggtgctgactaaactggttgcccggacactcaacagcctccacctccctttctaccctcacagctcctggggccttcctggctctggcccagaaagtgattcatttgtaaattatcatggttttctttctgcattaaaatgctcatttccggaaaaaaaag

SEQ ID NO: 286358 - DNA, 838 bp, Homo sapiens
caccgccagggctccccatgcatggggtgaactccctgcccggcgccaggccatgcagcctcccctgagactcaggtcccaggaccaacccggtcaggaaggccctggggacaccgaggccagccagacagagcctggcagctcggctgtgactctgcagtgagcagccctccctgtcccagaatgagtcggatgtcttcagctgggtgatccgccgcgagttccaggagctgcgccacccggtggacgaggagaaggcccgctgcctggaggggatagggggtcacacccgtggcctggtggcctccctggacatgcagctggagcaggcccagggaacccgggagcggctggcccaagccgagtgtgtgctggaacagttcggaaatgaggaccaccatgagttcatctggaagttccactccatggcctccaggtaataaccttggagagagctcagccagggtctggtggctgcgggcacgggcatctcagctccactggttcctccattcagcttaaccagcgcctcccaagcagctgcctatagctggctctataactgagcctggggaagatagaggaaagtcacgtccctgccttcaagggtctcgcagacaggtggggaggcagatggtgaactgtgggtacctagaacagcagaagttcactcaagctacagaaatactagaggagggtagctcatgcctgcaatcccagtactttgggaggccaaggcaggagtattgctggaggccgggagttcgagaccagcctggccaatgtagtaacacccccgtctctacaaaaaatacaaaaataaaaaaattagttggga

SEQ ID NO: 286359 - DNA, 1729 bp, Homo sapiens
cgcgcgggaacatggggctgtacgctgcggtggcaggcgtgctggccggcgtggagagccgccagggctctatcaaggggctggtgtactccagcaacttccagaacgtgaagcagctgtacgcgctggtgtgcgaaacgcagcgctactccgccgtgctggatgccgtgatctccagcgccggcctcctcagtgcgaagaagctgcagccgcacctggccaagggtgctagtgtatgagttgttgggaaagggctttcgagggggtgggggccaatggaaggctctgttgggacggcaccaggcgaggtgttgagttggctcggctcaaggttcttcggggtgtgagctggcatgaggacctgttggaagtgggatccaggcctggtccagcctcccagctgcctcgatttgtgcgtgtgaacactctcaagacctgctccgtttatgtagttatttcaagagacaaggtttctcctatcagggtcgggcttccaggctggatggagtgccctggcgcgatctcggctcaccgcaacctctgcctcctgggttcaagcgattctcctgcttcagccttctgagtagctgggattatgaaggggtggcctgcccctccacatctgtgggatatctcatcagcctcgatgacttacgagccctcaaggggaagcattttctcctggaccccttgatgccggagctgctggtgtttcccgcccagacagatctgcatgaacacccactgtaccgggccggacacctcattctgcaggacagggccagctgtctcccagccatgctgctggacccccgccaggctcccatgtcatggatgcctgtgccaccccaggcaataaagaccagtcacttggctgctcttctgaagaaccaagggaagatctttgcctttgacctggatgccaggcggctggcatccatggccacgctgctggcctgggctggcgtctcctgctgtgagctggctgaggaggacttcctggcggtctcccccttagatccgcgctatcgtgaggtccactatgtcctgctggatccttcctgcagtggctcggggtatgccgagcagacagctggaggagcccggggcagggacacctagcccggtgcgtctgcatgccctggcagggttccagcagcgagccctgtgccacgcgctcactttcccttccctgcagcggctcgtctactccatgtgctccctctgccaggaggagaatgaagacatggtacaagatgcgctgcagcagaacccgggcgccttcaggctagctcccgccctgcctgcccggccccaccgaggcctgagcacgttcccgggtgccgagcactgcctccgggcttcccccaagaccacgcttagcggtggcttcttcgttgctgtaattgaacgggtcgagatgccgacctcagcctcacaggccaaagcatcagcaccagaacgcacacccagcccagccccaaagagaaagaagagagcaaaaagctgcagccggtgcttgcacaccgccttgcacatagcagaggctccgggctcactccttcctggtgggaaaggaagatgcctgtcctctccgtggaggaccctgggccctcaccgcaggcagcagtttgcgttttgaaaggttattgggtcccttcctcgggctgtgttcttgctggtgagcaaaagtgttgcctgcagaaataaaatgcagaacgtactctac

SEQ ID NO: 286360 - DNA, 1837 bp, Homo sapiens
cgcgcgggaacatggggctgtacgctgcggtggcaggcgtgctggccggcgtggagagccgccagggctctatcaaggggctggtgtactccagcaacttccagaacgtgaagcagctgtacgcgctggtgtgcgaaacgcagcgctactccgccgtgctggatgccgtgatctccagcgccggcctcctcagtgcgaagaagctgcagccgcacctggccaagggtaggggcggggcggggaagtgaaccccgacggtcagcgctttgtcatctggtttcagccccgctgccgtgcacggcgggactggagcaagtcgctcacctgaaatgagtgctagtgtatgagttgttgggaaagggctttcgagggggtgggggccaatggaaggctctgttgggacggcaccaggcgaggtgttgagttggctcggctcaaggttcttcggggtgtgagctggcatgaggacctgttggaagtgggatccaggcctggtccagcctcccagctgcctcgatttgtgcgtgtgaacactctcaagacctgctccgtttatgtagttatttcaagagacaaggtttctcctatcagggtcgggcttccaggctggatggagtgccctggcgcgatctcggctcaccgcaacctctgcctcctgggttcaagcgattctcctgcttcagccttctgagtagctgggattatgaaggggtggcctgcccctccacatctgtgggatatctcatcagcctcgatgacttacgagccctcaaggggaagcattttctcctggaccccttgatgccggagctgctggtgtttcccgcccagacagatctgcatgaacacccactgtaccgggccggacacctcattctgcaggacagggccagctgtctcccagccatgctgctggacccccgccaggctcccatgtcatggatgcctgtgccaccccaggcaataaagaccagtcacttggctgctcttctgaagaaccaagggaagatctttgcctttgacctggatgccaggcggctggcatccatggccacgctgctggcctgggctggcgtctcctgctgtgagctggctgaggaggacttcctggcggtctcccccttagatccgcgctatcgtgaggtccactatgtcctgctggatccttcctgcagtggctcggggtatgccgagcagacagctggaggagcccggggcagggacacctagcccggtgcgtctgcatgccctggcagggttccagcagcgagccctgtgccacgcgctcactttcccttccctgcagcggctcgtctactccatgtgctccctctgccaggaggagaatgaagacatggtacaagatgcgctgcagcagaacccgggcgccttcaggctagctcccgccctgcctgcccggccccaccgaggcctgagcacgttcccgggtgccgagcactgcctccgggcttcccccaagaccacgcttagcggtggcttcttcgttgctgtaattgaacgggtcgagatgccgacctcagcctcacaggccaaagcatcagcaccagaacgcacacccagcccagccccaaagagaaagaagagagcaaaaagctgcagccggtgcttgcacaccgccttgcacatagcagaggctccgggctcactccttcctggtgggaaaggaagatgcctgtcctctccgtggaggaccctgggccctcaccgcaggcagcagtttgcgttttgaaaggttattgggtcccttcctcgggctgtgttcttgctggtgagcaaaagtgttgcctgcagaaataaaatgcagaacgtactctac

SEQ ID NO: 286361 - DNA, 901 bp, Homo sapiens
cgcgcgggaacatggggctgtacgctgcggtggcaggcgtgctggccggcgtggagagccgccagggctctatcaaggggctggtgtactccagcaacttccagaacgtgaagcagctgtacgcgctggtgtgcgaaacgcagcgctactccgccgtgctggatgccgtgatctccagcgccggcctcctcagtgcgaagaagctgcagccgcacctggccaagggtaggggcggggcggggaagtgaaccccgacggtcagcgctttgtcatctggtttcagccccgctgccgtgcacggcgggactggagcaagtcgctcacctgaaatgagtatgagcagaccttccctgggttacgaattgagatgggatgaaaatgctttaacttcgagtgttttgaaggattaaataaccgaagtacaaagtagtagtagcggagacagtaaggaagtcgggcgtggcggcgcgcacctgtggtcccagctactcggaaggctgaggggggaggatcacttgagcccaggagttcgaagctgcagtgagctgtgatgtggccactgcacttcagcctgggcgacagatctagaccccattctaaaaaaaaacaaaaaccccaaacccacacccacgaaagggtaatgttggcaagaagttgggtgcagaggtctactggtgaacatctgtggggaaagggtctaaggctgggaagcgagacgccaggttccgatcctgttgtgtagttaatttctggtgtggtcttgagtaaggtaccccacctttatctgtaaccatctagtcaggtgatctctttagccattccagtgcccgggctctattagagttagttctaaggcattcatacttcttgcttagggcgtttctgtctttgatccctcatc

SEQ ID NO: 286362 - DNA, 2457 bp, Homo sapiens
cgcgcgggaacatggggctgtacgctgcggtggcaggcgtgctggccggcgtggagagccgccagggctctatcaaggggctggtgtactccagcaacttccagaacgtgaagcagctgtacgcgctggtgtgcgaaacgcagcgctactccgccgtgctggatgccgtgatctccagcgccggcctcctcagtgcgaagaagctgcagccgcacctggccaagggtgctagtgtatgagttgttgggaaagggctttcgagggggtgggggccaatggaaggctctgttgggacggcaccaggcgaggtgttgagttggctcggctcaaggttcttcggggtgtgagctggcatgaggacctgttggaagtgggatccaggcctggtccagcctcccagctgcctcgatttgtgcgtgtgaacactctcaagacctgctccgtttatgtagttatttcaagagacaaggtttctcctatcagggtcgggcttccaggctggatggagtgccctggcgcgatctcggctcaccgcaacctctgcctcctgggttcaagcgattctcctgcttcagccttctgagtagctgggattatgaaggggtggcctgcccctccacatctgtgggatatctcatcagcctcgatgacttacgagccctcaaggggaagcattttctcctggaccccttgatgccggagctgctggtgtttcccgcccagacagatctgcatgaacacccactgtaccgggccggacacctcattctgcaggacagggtaggcaagaggaatagaaaagggaagaatgtgtaggcacgggaagggcctagcctggggtctctgtttacccggcccctgtgttctgcctgccaggccagctgtctcccagccatgctgctggacccccgccaggctcccatgtcatggatgcctgtgccaccccaggcaataaagaccagtcacttggctgctcttctgaagaaccaagggtgagtgccacaggaggaggaggaggacatggggtttgattttgtgcctttcagtgggtaatgaaggctgaaaggatgactttcgcttaactctttcctgctgcaccaaagtagttcacggtatttgccccaagctaagctttccccactgcaggtgtgagatgtggatcccttagcccttggggcagagaccccaggccagttacctctgaccctgggccctttaaatataggctgtttcaatattgtgtgtcctggcttaacctgcatgttctggttgtctgtgtcagctgtgacaggcccttagctgctccatgcatgctcagctcacccctgctctgccctctgccctaggaagatctttgcctttgacctggatgccaggcggctggcatccatggccacgctgctggcctgggctggcgtctcctgctgtgagctggctgaggaggacttcctggcggtctcccccttagatccgcgctatcgtgaggtccactatgtcctgctggatccttcctgcagtggctcggggagatggtgagaaggcgtggctgagggactcagaggtccacagcagcttagacctggagtcatctgttttggtcttagttctgacactttaatgggcttgggaccctggagcaaaagttctcctctgtgaagcgaggatttcaggagcgaggatttcaggactgaggcagcctgtgaagctgtgtaaccgagacacgcttttccttaggtatgccgagcagacagctggaggagcccggggcagggacacctagcccggtgcgtctgcatgccctggcagggttccagcagcgagccctgtgccacgcgctcactttcccttccctgcagcggctcgtctactccatgtgctccctctgccaggaggagaatgaagacatggtacaagatgcgctgcagcagaacccgggcgccttcaggctagctcccgccctgcctgcccggccccaccgaggcctgagcacgttcccgggtgccgagcactgcctccgggcttcccccaagaccacgcttagcggtggcttcttcgttgctgtaattgaacgggtcgagatgccgacgtgagtgagtgggggcatgcttgggaggcgcaggatggtactggcacatctaacatctacatttctctagctcagcctcacaggccaaagcatcagcaccagaacgcacacccagcccagccccaaagagaaagaagagagcaaaaagctgcagccggtgcttgcacaccgccttgcacatagcagaggctccgggctcactccttcctggtgggaaaggaagatgcctgtcctctccgtggaggaccctgggccctcaccgcaggcagcagtttgcgttttgaaaggttattgggtcccttcctcgggctgtgttcttgctggtgagcaaaagtgttgcctgcagaaataaaatgcagaacgtactctac

SEQ ID NO: 286363 - DNA, 1192 bp, Homo sapiens
cgcgcgggaacatggggctgtacgctgcggtggcaggcgtgctggccggcgtggagagccgccagggctctatcaaggggctggtgtactccagcaacttccagcctcgatgacttacgagccctcaaggggaagcattttctcctggaccccttgatgccggagctgctggtgtttcccgcccagacagatctgcatgaacacccactgtaccgggccggacacctcattctgcaggacagggccagctgtctcccagccatgctgctggacccccgccaggctcccatgtcatggatgcctgtgccaccccaggcaataaagaccagtcacttggctgctcttctgaagaaccaagggaagatctttgcctttgacctggatgccaggcggctggcatccatggccacgctgctggcctgggctggcgtctcctgctgtgagctggctgaggaggacttcctggcggtctcccccttagatccgcgctatcgtgaggtccactatgtcctgctggatccttcctgcagtggctcggggtatgccgagcagacagctggaggagcccggggcagggacacctagcccggtgcgtctgcatgccctggcagggttccagcagcgagccctgtgccacgcgctcactttcccttccctgcagcggctcgtctactccatgtgctccctctgccaggaggagaatgaagacatggtacaagatgcgctgcagcagaacccgggcgccttcaggctagctcccgccctgcctgcccggccccaccgaggcctgagcacgttcccgggtgccgagcactgcctccgggcttcccccaagaccacgcttagcggtggcttcttcgttgctgtaattgaacgggtcgagatgccgacctcagcctcacaggccaaagcatcagcaccagaacgcacacccagcccagccccaaagagaaagaagagagcaaaaagctgcagccggtgcttgcacaccgccttgcacatagcagaggctccgggctcactccttcctggtgggaaaggaagatgcctgtcctctccgtggaggaccctgggccctcaccgcaggcagcagtttgcgttttgaaaggttattgggtcccttcctcgggctgtgttcttgctggtgagcaaaagtgttgcctgcagaaataaaatgcagaacgtactctac

SEQ ID NO: 286364 - DNA, 1864 bp, Homo sapiens
aggcgtccagctgcacttcccacttctgactctgtgcctgctgttccctgctgggaagaagaaaagccagtgatgctggcttgaggccatagtgggaggcccagtggatcctgagaagctagcccgggcagtgagtgtggatggcttggcaggtgagcctgctggagctggaggactggcttcagtgtcccatctgcctggaggtcttcaaggagtccctaatgctacagtgcggccactcctactgcaagggctgcctggtttccctgtcctaccacctggacaccaaggtgcgctgccccatgtgctggcaggtggtggacggcagcagctccttgcccaacgtctccctggcctgggtgatcgaagccctgaggctccctggggacccggagcccaaggtctgcgtgcaccaccggaacccgctcagccttttctgcgagaaggaccaggagctcatctgtggcctctgcggtctgctgggctcccaccaacaccacccggtcacgcccgtctccaccgtctgcagccgcatgaaggaggagctcgcagccctcttctctgagctgaagcaggagcagaagaaggtggatgagctcatcgccaaactggtgaaaaaccggacccgaatcgtcaatgagtcggatgtcttcagctgggtgatccgccgcgagttccaggagctgcgccacccggtggacgaggagaaggcccgctgcctggaggggatagggggtcacacccgtggcctggtggcctccctggacatgcagctggagcaggcccagggaacccgggagcggctggcccaagccgagtgtgtgctggaacagttcggaaatgaggaccaccatgagttcatctggaagttccactccatggcctccagcttaaccagcgcctcccaagcagctgcctatagctggctctataactgagcctggggaagatctttgcctttgacctggatgccaggcggctggcatccatggccacgctgctggcctgggctggcgtctcctgctgtgagctggctgaggaggacttcctggcggtctcccccttagatccgcgctatcgtgaggtccactatgtcctgctggatccttcctgcagtggctcggggagatggtgagaaggcgtggctgagggactcagaggtccacagcagcttagacctggagtcatctgttttggtcttagttctgacactttaatgggcttgggaccctggagcaaaagttctcctctgtgaagcgaggatttcaggagcgaggatttcaggactgaggcagcctgtgaagctgtgtaaccgagacacgcttttccttagcggctcgtctactccatgtgctccctctgccaggaggagaatgaagacatggtacaagatgcgctgcagcagaacccgggcgccttcaggctagctcccgccctgcctgcccggccccaccgaggcctgagcacgttcccgggtgccgagcactgcctccgggcttcccccaagaccacgcttagcggtggcttcttcgttgctgtaattgaacgggtcgagatgccgacctcagcctcacaggccaaagcatcagcaccagaacgcacacccagcccagccccaaagagaaagaagagagcaaaaagctgcagccggtgcttgcacaccgccttgcacatagcagaggctccgggctcactccttcctggtgggaaaggaagatgcctgtcctctccgtggaggaccctgggccctcaccgcaggcagcagtttgcgttttgaaaggttattgggtcccttcctcgggctgtgttcttgctggtgagcaaaagtgttgcctgcagaaataaaatgcagaacgtactctac

SEQ ID NO: 286365 - DNA, 1762 bp, Homo sapiens
tttattaaattgtggcacgtaagtatcttggatatattggctcattgaatcctcacacctactattttacagagatgccagtggggcttgagattgaatcacttgcccaggctcccactgctggtaaacagtagagggggctcctgacccataagtctggcttgacaacccattccctcaactgcggatcccggattcccttatcaccctgttgatttctccatagctgtggtaacatttgttgcatgaatggaccgttgaaatagggcctggcagggagaaattcaggaaatgatgaatgaatggttcttccctggcagcctcgatgacttacgagccctcaaggggaagcattttctcctggaccccttgatgccggagctgctggtgtttcccgcccagacagatctgcatgaacacccactgtaccgggccggacacctcattctgcaggacagggccagctgtctcccagccatgctgctggacccccgccaggctcccatgtcatggatgcctgtgccaccccaggcaataaagaccagtcacttggctgctcttctgaagaaccaagggtgagtgccacaggaggaggaggaggacatggggtttgattttgtgcctttcagtgggtaatgaaggctgaaaggatgactttcgcttaactctttcctgctgcaccaaagtagttcacggtatttgccccaagctaagctttccccactgcaggtgtgagatgtggatcccttagcccttggggcagagaccccaggccagttacctctgaccctgggccctttaaatataggctgtttcaatattgtgtgtcctggcttaacctgcatgttctggttgtctgtgtcagctgtgacaggcccttagctgctccatgcatgctcagctcacccctgctctgccctctgccctaggaagatctttgcctttgacctggatgccaggcggctggcatccatggccacgctgctggcctgggctggcgtctcctgctgtgagctggctgaggaggacttcctggcggtctcccccttagatccgcgctatcgtgaggtccactatgtcctgctggatccttcctgcagtggctcggggtatgccgagcagacagctggaggagcccggggcagggacacctagcccggtgcgtctgcatgccctggcagggttccagcagcgagccctgtgccacgcgctcactttcccttccctgcagcggctcgtctactccatgtgctccctctgccaggaggagaatgaagacatggtacaagatgcgctgcagcagaacccgggcgccttcaggctagctcccgccctgcctgcccggccccaccgaggcctgagcacgttcccgggtgccgagcactgcctccgggcttcccccaagaccacgcttagcggtggcttcttcgttgctgtaattgaacgggtcgagatgccgacctcagcctcacaggccaaagcatcagcaccagaacgcacacccagcccagccccaaagagaaagaagagagcaaaaagctgcagccggtgcttgcacaccgccttgcacatagcagaggctccgggctcactccttcctggtgggaaaggaagatgcctgtcctctccgtggaggaccctgggccctcaccgcaggcagcagtttgcgttttgaaaggttattgggtcccttcctcgggctgtgttcttgctggtgagcaaaagtgttgcctgcagaaataaaatgcagaacgtactctac

SEQ ID NO: 286366 - DNA, 1335 bp, Homo sapiens
cgcgcgggaacatggggctgtacgctgcggtggcaggcgtgctggccggcgtggagagccgccagggctctatcaaggggctggtgtactccagcaacttccagaacgtgaagcagctgtacgcgctggtgtgcgaaacgcagcgctactccgccgtgctggatgccgtgatctccagcgccggcctcctcagtgcgaagaagctgcagccgcacctggccaagggtgctagtgtatgagttgttgggaaagggctttcgagggggtgggggccaatggaaggctctgttgggacggcaccaggcgaggtgttgagttggctcggctcaaggttcttcggggtgtgagctggcatgaggacctgttggaagtgggatccaggcctggtccagcctcccagctgcctcgatttgtgcgtgtgaacactctcaagacctgctccgtttatgtagttatttcaagagacaaggtttctcctatcagggtcgggcttccaggctggatggagtgccctggcgcgatctcggctcaccgcaacctctgcctcctgggttcaagcgattctcctgcttcagccttctgagtagctgggattatgaaggggtggcctgcccctccacatctgtgggatatctcatcagcctcgatgacttacgagccctcaaggggaagcattttctcctggaccccttgatgccggagctgctggtgtttcccgcccagacagatctgcatgaacacccactgtaccgggccggacacctcattctgcaggacagggccagctgtctcccagccatgctgctggacccccgccaggctcccatgtcatggatgcctgtgccaccccaggcaataaagaccagtcacttggctgctcttctgaagaaccaagggaagatctttgcctttgacctggatgccaggcggctggcatccatggccacgctgctggcctgggctggcgtctcctgctgtgagctggctgaggaggacttcctggcggtctcccccttagatccgcgctatcgtgaggtccactatgtcctgctggatccttcctgcagtggctcggggtatgccgagcagacagctggaggagcccggggcagggacacctagcccgcggctcgtctactccatgtgctccctctgccaggaggagaatgaagacatggtacaagatgcgctgcagcagaacccgggcgccttcaggcttaagtcccgccctggctgccgggcccaccgaaggcctgagacgtcccgggtgcgagcactggtccggggttcccccagaccagctagggggctattcgggccgactgacgggccaga

SEQ ID NO: 286367 - DNA, 1457 bp, Homo sapiens
cgcgcgggaacatggggctgtacgctgcggtggcaggcgtgctggccggcgtggagagccgccagggctctatcaaggggctggtgtactccagcaacttccagaacgtgaagcagctgtacgcgctggtgtgcgaaacgcagcgctactccgccgtgctggatgccgtgatctccagcgccggcctcctcagtgcgaagaagctgcagccgcacctggccaagggctggatggagtgccctggcgcgatctcggctcaccgcaacctctgcctcctgggttcaagcgattctcctgcttcagccttctgagtagctgggattatgaaggggtggcctgcccctccacatctgtgggatatctcatcagcctcgatgacttacgagccctcaaggggaagcattttctcctggaccccttgatgccggagctgctggtgtttcccgcccagacagatctgcatgaacacccactgtaccgggccggacacctcattctgcaggacagggccagctgtctcccagccatgctgctggacccccgccaggctcccatgtcatggatgcctgtgccaccccaggcaataaagaccagtcacttggctgctcttctgaagaaccaagggaagatctttgcctttgacctggatgccaggcggctggcatccatggccacgctgctggcctgggctggcgtctcctgctgtgagctggctgaggaggacttcctggcggtctcccccttagatccgcgctatcgtgaggtccactatgtcctgctggatccttcctgcagtggctcggggtatgccgagcagacagctggaggagcccggggcagggacacctagcccggtgcgtctgcatgccctggcagggttccagcagcgagccctgtgccacgcgctcactttcccttccctgcagcggctcgtctactccatgtgctccctctgccaggaggagaatgaagacatggtacaagatgcgctgcagcagaacccgggcgccttcaggctagctcccgccctgcctgcccggccccaccgaggcctgagcacgttcccgggtgccgagcactgcctccgggcttcccccaagaccacgcttagcggtggcttcttcgttgctgtaattgaacgggtcgagatgccgacctcagcctcacaggccaaagcatcagcaccagaacgcacacccagcccagccccaaagagaaagaagagagcaaaaagctgcagccggtgcttgcacaccgccttgcacatagcagaggctccgggctcactccttcctggtgggaaaggaagatgcctgtcctctccgtggaggaccctgggccctcaccgcaggcagcagtttgcgttttgaaaggttattgggtcccttcctcgggctgtgttcttgctggtgagcaaaagtgttgcctgcagaaataaaatgcagaacgtactctac

SEQ ID NO: 286368 - DNA, 1885 bp, Homo sapiens
cgcgcgggaacatggggctgtacgctgcggtggcaggcgtgctggccggcgtggagagccgccagggctctatcaaggggctggtgtactccagcaacttccagaacgtgaagcagctgtacgcgctggtgtgcgaaacgcagcgctactccgccgtgctggatgccgtgatctccagcgccggcctcctcagtgcgaagaagctgcagccgcacctggccaagggtgctagtgtatgagttgttgggaaagggctttcgagggggtgggggccaatggaaggctctgttgggacggcaccaggcgaggtgttgagttggctcggctcaaggttcttcggggtgtgagctggcatgaggacctgttggaagtgggatccaggcctggtccagcctcccagctgcctcgatttgtgcgtgtgaacactctcaagacctgctccgtttatgtagttatttcaagagacaaggtttctcctatcagggtcgggcttccaggctggatggagtgccctggcgcgatctcggctcaccgcaacctctgcctcctgggttcaagcgattctcctgcttcagccttctgagtagctgggattatgaaggggtggcctgcccctccacatctgtgggatatctcatcagcctcgatgacttacgagccctcaaggggaagcattttctcctggaccccttgatgccggagctgctggtgtttcccgcccagacagatctgcatgaacacccactgtaccgggccggacacctcattctgcaggacagggccagctgtctcccagccatgctgctggacccccgccaggctcccatgtcatggatgcctgtgccaccccaggcaataaagaccagtcacttggctgctcttctgaagaaccaagggaagatctttgcctttgacctggatgccaggcggctggcatccatggccacgctgctggcctgggctggcgtctcctgctgtgagctggctgaggaggacttcctggcggtctcccccttagatccgcgctatcgtgaggtccactatgtcctgctggatccttcctgcagtggctcggggagatggtgagaaggcgtggctgagggactcagaggtccacagcagcttagacctggagtcatctgttttggtcttagttctgacactttaatgggcttgggaccctggagcaaaagttctcctctgtgaagcgaggatttcaggagcgaggatttcaggactgaggcagcctgtgaagctgtgtaaccgagacacgcttttccttagcggctcgtctactccatgtgctccctctgccaggaggagaatgaagacatggtacaagatgcgctgcagcagaacccgggcgccttcaggctagctcccgccctgcctgcccggccccaccgaggcctgagcacgttcccgggtgccgagcactgcctccgggcttcccccaagaccacgcttagcggtggcttcttcgttgctgtaattgaacgggtcgagatgccgacgtgagtgagtgggggcatgcttgggaggcgcaggatggtactggcacatctaacatctacatttctctagctcagcctcacaggccaaagcatcagcaccagaacgcacacccagcccagccccaaagagaaagaagagagcaaaaagctgcagccggtgcttgcacaccgccttgcacatagcagaggctccgggctcactccttcctggtgggaaaggaagatgcctgtcctctccgtggaggaccctgggccctcaccgcaggcagcagtttgcgttttgaaaggttattgggtcccttcctcgggctgtgttcttgctggtgagcaaaagtgttgcctgcagaaataaaatgcagaacgtactctac

SEQ ID NO: 286369 - DNA, 1521 bp, Homo sapiens
cgcgcgggaacatggggctgtacgctgcggtggcaggcgtgctggccggcgtggagagccgccagggctctatcaaggggctggtgtactccagcaacttccagaacgtgaagcagctgtacgcgctggtgtgcgaaacgcagcgctactccgccgtgctggatgccgtgatctccagcgccggcctcctcagtgcgaagaagctgcagccgcacctggccaaggcctcgatgacttacgagccctcaaggggaagcattttctcctggaccccttgatgccggagctgctggtgtttcccgcccagacagatctgcatgaacacccactgtaccgggccggacacctcattctgcaggacagggccagctgtctcccagccatgctgctggacccccgccaggctcccatgtcatggatgcctgtgccaccccaggcaataaagaccagtcacttggctgctcttctgaagaaccaagggaagatctttgcctttgacctggatgccaggcggctggcatccatggccacgctgctggcctgggctggcgtctcctgctgtgagctggctgaggaggacttcctggcggtctcccccttagatccgcgctatcgtgaggtccactatgtcctgctggatccttcctgcagtggctcggggagatggtgagaaggcgtggctgagggactcagaggtccacagcagcttagacctggagtcatctgttttggtcttagttctgacactttaatgggcttgggaccctggagcaaaagttctcctctgtgaagcgaggatttcaggagcgaggatttcaggactgaggcagcctgtgaagctgtgtaaccgagacacgcttttccttaggtatgccgagcagacagctggaggagcccggggcagggacacctagcccggtgcgtctgcatgccctggcagggttccagcagcgagccctgtgccacgcgctcactttcccttccctgcagcggctcgtctactccatgtgctccctctgccaggaggagaatgaagacatggtacaagatgcgctgcagcagaacccgggcgccttcaggctagctcccgccctgcctgcccggccccaccgaggcctgagcacgttcccgggtgccgagcactgcctccgggcttcccccaagaccacgcttagcggtggcttcttcgttgctgtaattgaacgggtcgagatgccgacctcagcctcacaggccaaagcatcagcaccagaacgcacacccagcccagccccaaagagaaagaagagagcaaaaagctgcagccggtgcttgcacaccgccttgcacatagcagaggctccgggctcactccttcctggtgggaaaggaagatgcctgtcctctccgtggaggaccctgggccctcaccgcaggcagcagtttgcgttttgaaaggttattgggtcccttcctcgggctgtgttcttgctggtgagcaaaagtgttgcctgcagaaataaaatgcagaacgtactctac

SEQ ID NO: 286370 - DNA, 1411 bp, Homo sapiens
caccgccagggctccccatgcatggggtgaactccctgcccggcgccaggccatgcagcctcccctgagactcaggtcccaggaccaacccggtcaggaaggccctggggacaccgaggccagccagacagagcctggcagctcggctgtgactctgcagtgagcagccctccctgtcccagaatgagtcggatgtcttcagctgggtgatccgccgcgagttccaggagctgcgccacccggtggacgaggagaaggcccgctgcctggaggggatagggggtcacacccgtggcctggtggcctccctggacatgcagctggagcaggcccagggaacccgggagcggctggcccaagccgagtgtgtgctggaacagttcggaaatgaggaccaccatgagttcatctggaagttccactccatggcctccagcttaaccagcgcctcccaagcagctgcctatagctggctctataactgagcctggggaagatctttgcctttgacctggatgccaggcggctggcatccatggccacgctgctggcctgggctggcgtctcctgctgtgagctggctgaggaggacttcctggcggtctcccccttagatccgcgctatcgtgaggtccactatgtcctgctggatccttcctgcagtggctcggggagatggtgagaaggcgtggctgagggactcagaggtccacagcagcttagacctggagtcatctgttttggtcttagttctgacactttaatgggcttgggaccctggagcaaaagttctcctctgtgaagcgaggatttcaggagcgaggatttcaggactgaggcagcctgtgaagctgtgtaaccgagacacgcttttccttagcggctcgtctactccatgtgctccctctgccaggaggagaatgaagacatggtacaagatgcgctgcagcagaacccgggcgccttcaggctagctcccgccctgcctgcccggccccaccgaggcctgagcacgttcccgggtgccgagcactgcctccgggcttcccccaagaccacgcttagcggtggcttcttcgttgctgtaattgaacgggtcgagatgccgacctcagcctcacaggccaaagcatcagcaccagaacgcacacccagcccagccccaaagagaaagaagagagcaaaaagctgcagccggtgcttgcacaccgccttgcacatagcagaggctccgggctcactccttcctggtgggaaaggaagatgcctgtcctctccgtggaggaccctgggccctcaccgcaggcagcagtttgcgttttgaaaggttattgggtcccttcctcgggctgtgttcttgctggtgagcaaaagtgttgcctgcagaaataaaatgcagaacgtactctac

SEQ ID NO: 286371 - DNA, 1291 bp, Homo sapiens
aggcgtccagctgcacttcccacttctgactctgtgcctgctgttccctgctgggaagaagaaaagccagtgatgctggcttgaggccatagtgggaggcccagtggatcctgagaagctagcccgggcagtgagtgtggatggcttggcaggtgagcctgctggagctggaggactggcttcagtgtcccatctgcctggaggtcttcaaggagtccctaatgctacagtgcggccactcctactgcaagggctgcctggtttccctgtcctaccacctggacaccaaggtgcgctgccccatgtgctggcaggtggtggacggcagcagctccttgcccaacgtctccctggcctgggtgatcgaagccctgaggctccctggggacccggagcccaaggtctgcgtgcaccaccggaacccgctcagccttttctgcgagaaggaccaggagctcatctgtggcctctgcggtctgctgggctcccaccaacaccacccggtcacgcccgtctccaccgtctgcagccgcatgaaggaggagctcgcagccctcttctctgagctgaagcaggagcagaagaaggtggatgagctcatcgccaaactggtgaaaaaccggacccgaatcgtcaatgagtcggatgtcttcagctgggtgatccgccgcgagttccaggagctgcgccacccggtggacgaggagaaggcccgctgcctggaggggatagggggtcacacccgtggcctggtggcctccctggacatgcagctggagcaggcccagggaacccgggagcggctggcccaagccgagtgtgtgctggaacagttcggaaatgaggaccaccatgagttcatctggaagttccactccatggcctccaggtaataaccttggagagagctcagccagggtctggtggctgcgggcacgggcatctcagctccactggttcctccattcagcttaaccagcgcctcccaagcagctgcctatagctggctctataactgagcctggggaagatagaggaaagtcacgtccctgccttcaagggtctcgcagacaggtggggaggcagatggtgaactgtgggtacctagaacagcagaagttcactcaagctacagaaatactagaggagggtagctcatgcctgcaatcccagtactttgggaggccaaggcaggagtattgctggaggccgggagttcgagaccagcctggccaatgtagtaacacccccgtctctacaaaaaatacaaaaataaaaaaattagttggga

SEQ ID NO: 286372 - DNA, 1012 bp, Homo sapiens
cgcgcgggaacatggggctgtacgctgcggtggcaggcgtgctggccggcgtggagagccgccagggctctatcaaggggctggtgtactccagcaacttccagcctcgatgacttacgagccctcaaggggaagcattttctcctggaccccttgatgccggagctgctggtgtttcccgcccagacagatctgcatgaacacccactgtaccgggccggacacctcattctgcaggacagggccagctgtctcccagccatgctgctggacccccgccaggctcccatgtcatggatgcctgtgccaccccaggcaataaagaccagtcacttggctgctcttctgaagaaccaagggtatgccgagcagacagctggaggagcccggggcagggacacctagcccggtgcgtctgcatgccctggcagggttccagcagcgagccctgtgccacgcgctcactttcccttccctgcagcggctcgtctactccatgtgctccctctgccaggaggagaatgaagacatggtacaagatgcgctgcagcagaacccgggcgccttcaggctagctcccgccctgcctgcccggccccaccgaggcctgagcacgttcccgggtgccgagcactgcctccgggcttcccccaagaccacgcttagcggtggcttcttcgttgctgtaattgaacgggtcgagatgccgacctcagcctcacaggccaaagcatcagcaccagaacgcacacccagcccagccccaaagagaaagaagagagcaaaaagctgcagccggtgcttgcacaccgccttgcacatagcagaggctccgggctcactccttcctggtgggaaaggaagatgcctgtcctctccgtggaggaccctgggccctcaccgcaggcagcagtttgcgttttgaaaggttattgggtcccttcctcgggctgtgttcttgctggtgagcaaaagtgttgcctgcagaaataaaatgcagaacgtactctac

SEQ ID NO: 286373 - DNA, 150 bp, Homo sapiens
gcgcgcgggaacatggggctgtacgctgcggtggcaggcgtgctggccggcgtggagagccgccagggctctatcaaggggctggtgtactccagcaacttccaggtagcgggcccgcgcgccacaagtaggggtggggggtgaggaacc

SEQ ID NO: 286374 - DNA, 3560 bp, Homo sapiens
ggcggaggttgtgagcaggcctaagcgcggccgccgtggctcctgcgtctcccatcgtgccgtgcgtcccgcgccgcgttcgagttctcggaggggagggggcgttagccccgcgcagccgccggcgtcgccgccatggacctaggacccttgaacatctgtgaagaaatgactattctgcatggaggcttcttgctggccgagcagctgttccaccctaaggcactggcagaattaacaaagtctgactgggaacgtgttggacggcccatcgtggaggccttaagggagatctcctcggctgcagcacactcccagccctttgcctggaagaagaaagccctgatcatcatctgggccaaggttctgcagccgcaccccgtgaccccgtccgacacagagacacggtggcaggaagacctgttcttctcggtgggcaacatgatccccaccatcaaccacaccatcctcttcgagctgctcaaatccctggaagcttctggactctttatccagctcctgatggccctgcccaccaccatctgccatgcagaactagagcgctttctggaacatgtgaccgttgacacttctgccgaagacgtggccttcttcctggacgtctggtgggaggtgatgaagcacaagggtcacccgcaggaccccctgctctcccagtttagtgcaatggcccataagtacctgcctgccttagatgagttcccccatcctccaaagaggcttaggtcagacccagacgcgtgccccaccatgcccctgttggccatgctgctccgcgggctgacacagatccagagtcggatcctgggcccggggaggaagtgctgtgcgctggccaacctggctgacatgctgactgtgtttgcgctgacagaggacgacccccaggaggtgtctgcaaccgtgtatctggacaaactggccacggtgatctctgtgtggaactcggacacccagaatccctaccaccagcaggcgctggcagagaaggtgaaggaggcagaacgggatgtcagcctgacctcgctggccaaactccccagtgagaccattttcgtgggctgcgagttcctgcaccacctgctgcgggagtggggggaggagttgcaggccgtgctccgcagcagccaggggacaagttacgacagctaccggctgtgcgacagtctgacttccttcagccagaacgcgacgctctacctgaaccgcaccagcctgtccaaggaggacaggcaggtggtctctgagctggcggagtgtgtcagggacttcctgaggaaaacgagcacggtgctgaagaacagggccttggaggatatcacagcttccattgccatggccgtcatccagcagaagatggaccgccatatggaagtgtgctacatttttgcctctgagaagaagtgggccttctcggacgagtgggtagcctgcctggggagtaacagggccctcttccgagagccagacttggtgttgaggctgctggaaacagtgatagacgtcagcacagctgacagagccatccctgagtctcagatccggcaggtgatccacctgatcctggaatgttacgcagacctctccctgccaggtaaaaataaagtccttgcaggtatcctgcgttcctgggggcgaaagggcctctctgaaaagttgctggcttatgtggagggttttcaggaagacctcaatacaacttttaaccagctcactcagagtgcctccgaacagggcttggcaaaagctgtggcctccgtggcccgcctggtcatagtgcacccggaagtcacggtgaagaaaatgtgcagcctggctgtggtcaatctcggcacccacaagttcctgggccagattctcactgccttccctgcccttaggtttgtggaagagcagggtcccaattcatctgccactttcatggtgtcatgcctcaaagaaaccgtctggatgaagttctctacacccaaggaagaaaagcaatttttagagctcctgaactgcctgatgagtcccgtgaaaccccaagggattccagtggctgctcttcttgagccagacgaggtgctgaaggaatttgtcctgcctttcttgaggttagatgttgaagaggtagacctcagtctgaggatcttcatccagactctagaggcaaacgcgtgccgagaggaatactggctccagacctgctccccgtttccactcctcttcagcttgtgccagctcttggaccgcttcagcaaatactggcagcttcccaaggagaagcggtgcctctctttggataggaaggatctagcgatccatatcctggagctcctgtgtgagattgtatcagccaatgctgagaccttctccccggatgtctggatcaagtccctgtcctggctccaccgcaagttagaacagctagactggactgtgggcctgaggctgaagagcttcttcgaggggcacttcaagtgtgaagtgccagccacactttttgagatctgtaagctttcagaagacgagtggacctcccaggcccacccagggtacggggctggcacggggctcctggcctggatggagtgctgctgcgtctccagcggcatctcggagaggatgctgtctctcttggtggtggacgtgggcaatcctgaggaggtcagactgttcagcaaaggctttctggtggccctggtgcaagtcatgccttggtgcagccctcaggagtggcagcgccttcaccagctgaccaggagactgctggagaagcagctcctccatgtcccttatagcctggaatatattcagtttgttcccctgctcaacctgaagccctttgcccaggagttgcaactctccgtcctcttcctgaggactttccagtttctctgcagccatagctgtcgtaattggcttcctctggaaggctggaaccacgtggtcaaactcctctgtggcagtctgacccgcctcctggactcagtcagggcgatacaggcagctggcccttgggttcaaggaccagagcaggacctgacccaggaagccctgtttgtttacacccaggtgttctgccatgctctgcacatcatggccatgctccacccggaggtctgtgagccactctacgttttagccttggaaaccctcacctgctatgagactttgagcaagaccaacccttctgtcagctccttgctccagagggcacacgagcagtgcttcttaaagtccattgctgagggcatcggccctgaagaacggcgccaaaccctgttgcagaagatgagcagcttctgacttggcgtggggagctgggccccaacatggcgggtctgcagaagatcagcagcttcttacctgtgcgggagcgaaaaagctgggcttcaacatggcaggtctgtaggggtcagacccgagcagcctggactttacagttatgtgaaactgtccacaaaaagtcatggcaataatggtgtaaagaaaatagtttcttgggtatttgtaacgtacaaactatcataaaaattctcctctttcgcatctca

SEQ ID NO: 286375 - DNA, 5727 bp, Homo sapiens
  misc_feature (1050)..(1050): n is a, c, g, or t
  misc_feature (1138)..(1138): n is a, c, g, or t
  misc_feature (1321)..(1321): n is a, c, g, or t
  misc_feature (2189)..(2189): n is a, c, g, or t
atggtccttagtctcctggagtcagtgttttctctgctggtgtctggcctgtgaaaatggggaatatgagctcttgggggcatgacagactgaggaaggagtagcatctctcactcctgggaaaggggagatgactcaggaatgaggaatagggagcagtgtttgcaccctcgttttagtttctgggccaaaggaaacatacctgataaagacctacatcctttgatgtttctgagctgggggaggcaaagaatagtgacaagattctggtcttgccaaccatgaaaaggtttggggaaaccaacatttactgagcacctaattagactctgtaactggattcttactgtagctctatctcatttatccatcatagcgtcccggggagatggggtcaggagatagcagtgccaacccactagcaagggcttgactggtatatatcacatgatccccaaaggcataacatgaagtctgtattatccccacatatgcagaaggaaggcttggagaagcaatctgaccaagatcacatccctttttttttttcggagatggagggggagtctcactgtgttaccccagctagtcttgaactcctggcctcagggatccacctgcctcagccccccaagtagctgggattacaagtgctagccactgaacctggccagaatcacatcatttttaaatggctgaactaggatttaaacccatgtctgattaaacatcccaagatgttttccatggtaagtctgtgtcaatcgttagttccctgaaggaaggcttaatctagcacagtattttctgtatctactccctggtttctcccacagagctagggccatgagtaccttgtttttgactggaaggagctgtggggtggaccgtttccctgaaagctagaagaatgtttgaagcctgttcccaaggcaagtttataaagagtgaaggcagggcttgtctgattccttctgtgcccattgctctgtggctatgtgattgctctgtgcccattaccctgtggctgtgtgactgctgctgtgcccnttaccctgtggctgcgtgattgctgctgtgcccattaccctgtggctgtgtgattgctctgtgcccattatcctgtggccgtgtgatngctctgtgcccattaccctgtagccgtgtgattgctgctgtgcccattaccttgtggctgtgtgattgctgctgtgcccattatcctgtggccgtgtgattgctctgtgcccattatcctgtggccgtgtgattgctctgtgcccattatcctgtggccgtgtgattgctctgtgcccattancctgtggccgtgtgattgctgctgtgcccattaccctgtggccgtgtgattgctctgtgcccattatcctgtggccgtgtgattgctctgtgcccattatcctgtggctgtgtgattgctctgtgcccattatcctgtagccgtgtgattgcttctgtgcccattaccctgtggctgtgtgattgctgctgtgcccattatcctgtggctgtgtgattgctgctgtgcccattaccctgtggctgtgtgattgctctgtgcccattaccctgtggctgtgtgattgctctgtgcccattatcctgtggccgtgtgattgctgctgtgcctgttaccctgtggctgtgtgattgctctgtgcccattaccctgtggctatgctcccttcatctgtcatgagaagctcagctgtcatgtcctgtggtacatgctcagtggcccctgtagtttgtactgtcctcctatttctaaacccctctccccacatcctctgctggcccagcctttgctggagggtctcgcctcagcagcccagctttttcttttcacacacttttcctgaaggatctcattcaccgtcttggttccggtgatcccctctgggcagatacctctcagaatcacatttcccagcttacttccctcctgaacttccacctggcatttccgttgctggaggacatctgtaccttgatggccaaagctgaactcatctttcctcacacctgctctgattctcctccattccctgtatgtgatgtcacctggtggcctcccagttcccaggctggagagctcggaagccattctggattcctcggccaagtccttctgactccagctgtgcagtggctcttgtagtcatccnttctccccgtccgctgatgtcctttaaaacccttgtcatctcaaaccatgacagcctactaacagcagtggccatctggaaacattttcactatactgtcttatttggcttgtctgtgtgcaggacccttgaacatctgtgaagaaatgactattctgcatggaggcttcttgctggccgagcagctgttccaccctaaggcactggcagaattaacaaagtctgactgggaacgtgttggacggcccatcgtggaggccttaagggagatctcctcggctgcagcacactcccagccctttgcctggaagaagaaagccctgatcatcatctgggccaaggttctgcagccgcaccccgtgaccccgtccgacacagagacacggtggcaggaagacctgttcttctcggtgggcaacatgatccccaccatcaaccacaccatcctcttcgagctgctcaaatccctggaagcttctggactctttatccagctcctgatggccctgcccaccaccatctgccatgcagaactagagcgctttctggaacatgtgaccgttgacacttctgccgaagacgtggccttcttcctggacgtctggtgggaggtgatgaagcacaagggtcacccgcaggaccccctgctctcccagtttagtgcaatggcccataagtacctgcctgccttagatgagttcccccatcctccaaagaggcttaggtcagacccagacgcgtgccccaccatgcccctgttggccatgctgctccgcgggctgacacagatccagagtcggatcctgggcccggggaggaagtgctgtgcgctggccaacctggctgacatgctgactgtgtttgcgctgacagaggacgacccccaggaggtgtctgcaaccgtgtatctggacaaactggccacggtgatctctgtgtggaactcggacacccagaatccctaccaccagcaggcgctggcagagaaggtgaaggaggcagaacgggatgtcagcctgacctcgctggccaaactccccagtgagaccattttcgtgggctgcgagttcctgcaccacctgctgcgggagtggggggaggagttgcaggccgtgctccgcagcagccaggggacaagttacgacagctaccggctgtgcgacagtctgacttccttcagccagaacgcgacgctctacctgaaccgcaccagcctgtccaaggaggacaggcaggtggtctctgagctggcggagtgtgtcagggacttcctgaggaaaacgagcacggtgctgaagaacagggccttggaggatatcacagcttccattgccatggccgtcatccagcagaagatggaccgccatatggaagtgtgctacatttttgcctctgagaagaagtgggccttctcggacgagtgggtagcctgcctggggagtaacagggccctcttccgagagccagacttggtgttgaggctgctggaaacagtgatagacgtcagcacagctgacagagccatccctgagtctcagatccggcaggtgatccacctgatcctggaatgttacgcagacctctccctgccaggtaaaaataaagtccttgcaggtatcctgcgttcctgggggcgaaagggcctctctgaaaagttgctggcttatgtggagggttttcaggaagacctcaatacaacttttaaccagctcactcagagtgcctccgaacagggcttggcaaaagctgtggcctccgtggcccgcctggtcatagtgcacccggaagtcacggtgaagaaaatgtgcagcctggctgtggtcaatctcggcacccacaagttcctgggccagattctcactgccttccctgcccttaggtttgtggaagagcagggtcccaattcatctgccactttcatggtgtcatgcctcaaagaaaccgtctggatgaagttctctacacccaaggaagaaaagcaatttttagagctcctgaactgcctgatgagtcccgtgaaaccccaagggattccagtggctgctcttcttgagccagacgaggtgctgaaggaatttgtcctgcctttcttgaggttagatgttgaagaggtagacctcagtctgaggatcttcatccagactctagaggcaaacgcgtgccgagaggaatactggctccagacctgctccccgtttccactcctcttcagcttgtgccagctcttggaccgcttcagcaaatactggcagcttcccaaggagaagcggtgcctctctttggataggaaggatctagcgatccatatcctggagctcctgtgtgagattgtatcagccaatgctgagaccttctccccggatgtctggatcaagtccctgtcctggctccaccgcaagttagaacagctagactggactgtgggcctgaggctgaagagcttcttcgaggggcacttcaagtgtgaagtgccagccacactttttgagatctgtaagctttcagaagacgagtggacctcccaggcccacccagggtacggggctggcacggggctcctggcctggatggagtgctgctgcgtctccagcggcatctcggagaggatgctgtctctcttggtggtggacgtgggcaatcctgaggaggtcagactgttcagcaaaggctttctggtggccctggtgcaagtcatgccttggtgcagccctcaggagtggcagcgccttcaccagctgaccaggagactgctggagaagcagctcctccatgtcccttatagcctggaatatattcagtttgttcccctgctcaacctgaagccctttgcccaggagttgcaactctccgtcctcttcctgaggactttccagtttctctgcagccatagctgtcgtaattggcttcctctggaaggctggaaccacgtggtcaaactcctctgtggcagtctgacccgcctcctggactcagtcagggcgatacaggcagctggcccttgggttcaaggaccagagcaggacctgacccaggaagccctgtttgtttacacccaggtgttctgccatgctctgcacatcatggccatgctccacccggaggtctgtgagccactctacgttttagccttggaaaccctcacctgctatgagactttgagcaagaccaacccttctgtcagctccttgctccagagggcacacgagcagtgcttcttaaagtccattgctgagggcatcggccctgaagaacggcgccaaaccctgttgcagaagatgagcagcttctgacttggcgtggggagctgggccccaacatggcgggtctgcagaagatcagcagcttcttacctgtgcgggagcgaaaaagctgggcttcaacatggcaggtctgtaggggtcagacccgagcagcctggactttacagttatgtgaaactgtccacaaaaagtcatggcaataatggtgtaaagaaaatagtttcttgggtatttgtaacgtacaaactatcataaaaattctcctctttcgcatctca

SEQ ID NO: 286376 - DNA, 5518 bp, Homo sapiens
  misc_feature (841)..(841): n is a, c, g, or t
  misc_feature (929)..(929): n is a, c, g, or t
  misc_feature (1112)..(1112): n is a, c, g, or t
  misc_feature (1980)..(1980): n is a, c, g, or t
ggcggaggttgtgagcaggcctaagcgcggccgccgtggctcctgcgtctcccatcgtgccgtgcgtcccgcgccgcgttcgagttctcggaggggagggggcgttagccccgcgcagccgccggcgtcgccgccatggacctaggtgggtgccgcggctccccggccccgggctgcgtccagcaatgcgccaccagagcggtgctgccccgtcgcgtctcctcctgtcgcgcacgctcgcgcgggcccggaccgaaacgtcccccgcgtcggggcgggtctaggggtcccggggtggccttggcggggggtggtccgggtcccgccgcgcgttgggccgcgtcttgccgcctccggccccctgcgcttgaaaacacggagcagacgtgaagttagagcccttggaagcgcccggggctcgcgcacgtgctttgggaaacgggctccctccgagcacccctgggcgccccgacggcctcatttcctgaacggcagctgcgttcttgagcaagtgtcttaacgctccaagtgtcttacgctcatgacgtttcctcatcgacagagcggggagaatggaagtgtgtctccccactgagttttgggcgactttgcattgagatcgccgagagctagggccatgagtaccttgtttttgactggaaggagctgtggggtggaccgtttccctgaaagctagaagaatgtttgaagcctgttcccaaggcaagtttataaagagtgaaggcagggcttgtctgattccttctgtgcccattgctctgtggctatgtgattgctctgtgcccattaccctgtggctgtgtgactgctgctgtgcccnttaccctgtggctgcgtgattgctgctgtgcccattaccctgtggctgtgtgattgctctgtgcccattatcctgtggccgtgtgatngctctgtgcccattaccctgtagccgtgtgattgctgctgtgcccattaccttgtggctgtgtgattgctgctgtgcccattatcctgtggccgtgtgattgctctgtgcccattatcctgtggccgtgtgattgctctgtgcccattatcctgtggccgtgtgattgctctgtgcccattancctgtggccgtgtgattgctgctgtgcccattaccctgtggccgtgtgattgctctgtgcccattatcctgtggccgtgtgattgctctgtgcccattatcctgtggctgtgtgattgctctgtgcccattatcctgtagccgtgtgattgcttctgtgcccattaccctgtggctgtgtgattgctgctgtgcccattatcctgtggctgtgtgattgctgctgtgcccattaccctgtggctgtgtgattgctctgtgcccattaccctgtggctgtgtgattgctctgtgcccattatcctgtggccgtgtgattgctgctgtgcctgttaccctgtggctgtgtgattgctctgtgcccattaccctgtggctatgctcccttcatctgtcatgagaagctcagctgtcatgtcctgtggtacatgctcagtggcccctgtagtttgtactgtcctcctatttctaaacccctctccccacatcctctgctggcccagcctttgctggagggtctcgcctcagcagcccagctttttcttttcacacacttttcctgaaggatctcattcaccgtcttggttccggtgatcccctctgggcagatacctctcagaatcacatttcccagcttacttccctcctgaacttccacctggcatttccgttgctggaggacatctgtaccttgatggccaaagctgaactcatctttcctcacacctgctctgattctcctccattccctgtatgtgatgtcacctggtggcctcccagttcccaggctggagagctcggaagccattctggattcctcggccaagtccttctgactccagctgtgcagtggctcttgtagtcatccnttctccccgtccgctgatgtcctttaaaacccttgtcatctcaaaccatgacagcctactaacagcagtggccatctggaaacattttcactatactgtcttatttggcttgtctgtgtgcaggacccttgaacatctgtgaagaaatgactattctgcatggaggcttcttgctggccgagcagctgttccaccctaaggcactggcagaattaacaaagtctgactgggaacgtgttggacggcccatcgtggaggccttaagggagatctcctcggctgcagcacactcccagccctttgcctggaagaagaaagccctgatcatcatctgggccaaggttctgcagccgcaccccgtgaccccgtccgacacagagacacggtggcaggaagacctgttcttctcggtgggcaacatgatccccaccatcaaccacaccatcctcttcgagctgctcaaatccctggaagcttctggactctttatccagctcctgatggccctgcccaccaccatctgccatgcagaactagagcgctttctggaacatgtgaccgttgacacttctgccgaagacgtggccttcttcctggacgtctggtgggaggtgatgaagcacaagggtcacccgcaggaccccctgctctcccagtttagtgcaatggcccataagtacctgcctgccttagatgagttcccccatcctccaaagaggcttaggtcagacccagacgcgtgccccaccatgcccctgttggccatgctgctccgcgggctgacacagatccagagtcggatcctgggcccggggaggaagtgctgtgcgctggccaacctggctgacatgctgactgtgtttgcgctgacagaggacgacccccaggaggtgtctgcaaccgtgtatctggacaaactggccacggtgatctctgtgtggaactcggacacccagaatccctaccaccagcaggcgctggcagagaaggtgaaggaggcagaacgggatgtcagcctgacctcgctggccaaactccccagtgagaccattttcgtgggctgcgagttcctgcaccacctgctgcgggagtggggggaggagttgcaggccgtgctccgcagcagccaggggacaagttacgacagctaccggctgtgcgacagtctgacttccttcagccagaacgcgacgctctacctgaaccgcaccagcctgtccaaggaggacaggcaggtggtctctgagctggcggagtgtgtcagggacttcctgaggaaaacgagcacggtgctgaagaacagggccttggaggatatcacagcttccattgccatggccgtcatccagcagaagatggaccgccatatggaagtgtgctacatttttgcctctgagaagaagtgggccttctcggacgagtgggtagcctgcctggggagtaacagggccctcttccgagagccagacttggtgttgaggctgctggaaacagtgatagacgtcagcacagctgacagagccatccctgagtctcagatccggcaggtgatccacctgatcctggaatgttacgcagacctctccctgccaggtaaaaataaagtccttgcaggtatcctgcgttcctgggggcgaaagggcctctctgaaaagttgctggcttatgtggagggttttcaggaagacctcaatacaacttttaaccagctcactcagagtgcctccgaacagggcttggcaaaagctgtggcctccgtggcccgcctggtcatagtgcacccggaagtcacggtgaagaaaatgtgcagcctggctgtggtcaatctcggcacccacaagttcctgggccagattctcactgccttccctgcccttaggtttgtggaagagcagggtcccaattcatctgccactttcatggtgtcatgcctcaaagaaaccgtctggatgaagttctctacacccaaggaagaaaagcaatttttagagctcctgaactgcctgatgagtcccgtgaaaccccaagggattccagtggctgctcttcttgagccagacgaggtgctgaaggaatttgtcctgcctttcttgaggttagatgttgaagaggtagacctcagtctgaggatcttcatccagactctagaggcaaacgcgtgccgagaggaatactggctccagacctgctccccgtttccactcctcttcagcttgtgccagctcttggaccgcttcagcaaatactggcagcttcccaaggagaagcggtgcctctctttggataggaaggatctagcgatccatatcctggagctcctgtgtgagattgtatcagccaatgctgagaccttctccccggatgtctggatcaagtccctgtcctggctccaccgcaagttagaacagctagactggactgtgggcctgaggctgaagagcttcttcgaggggcacttcaagtgtgaagtgccagccacactttttgagatctgtaagctttcagaagacgagtggacctcccaggcccacccagggtacggggctggcacggggctcctggcctggatggagtgctgctgcgtctccagcggcatctcggagaggatgctgtctctcttggtggtggacgtgggcaatcctgaggaggtcagactgttcagcaaaggctttctggtggccctggtgcaagtcatgccttggtgcagccctcaggagtggcagcgccttcaccagctgaccaggagactgctggagaagcagctcctccatgtcccttatagcctggaatatattcagtttgttcccctgctcaacctgaagccctttgcccaggagttgcaactctccgtcctcttcctgaggactttccagtttctctgcagccatagctgtcgtaattggcttcctctggaaggctggaaccacgtggtcaaactcctctgtggcagtctgacccgcctcctggactcagtcagggcgatacaggcagctggcccttgggttcaaggaccagagcaggacctgacccaggaagccctgtttgtttacacccaggtgttctgccatgctctgcacatcatggccatgctccacccggaggtctgtgagccactctacgttttagccttggaaaccctcacctgctatgagactttgagcaagaccaacccttctgtcagctccttgctccagagggcacacgagcagtgcttcttaaagtccattgctgagggcatcggccctgaagaacggcgccaaaccctgttgcagaagatgagcagcttctgacttggcgtggggagctgggccccaacatggcgggtctgcagaagatcagcagcttcttacctgtgcgggagcgaaaaagctgggcttcaacatggcaggtctgtaggggtcagacccgagcagcctggactttacagttatgtgaaactgtccacaaaaagtcatggcaataatggtgtaaagaaaatagtttcttgggtatttgtaacgtacaaactatcataaaaattctcctctttcgcatctca

SEQ ID NO: 286377 - DNA, 3656 bp, Homo sapiens
ggcggaggttgtgagcaggcctaagcgcggccgccgtggctcctgcgtctcccatcgtgccgtgcgtcccgcgccgcgttcgagttctcggaggggagggggcgttagccccgcgcagccgccggcgtcgccgccatggacctagagctagggccatgagtaccttgtttttgactggaaggagctgtggggtggaccgtttccctgaaagctagaagaatgtttgaagcctgttcccaaggacccttgaacatctgtgaagaaatgactattctgcatggaggcttcttgctggccgagcagctgttccaccctaaggcactggcagaattaacaaagtctgactgggaacgtgttggacggcccatcgtggaggccttaagggagatctcctcggctgcagcacactcccagccctttgcctggaagaagaaagccctgatcatcatctgggccaaggttctgcagccgcaccccgtgaccccgtccgacacagagacacggtggcaggaagacctgttcttctcggtgggcaacatgatccccaccatcaaccacaccatcctcttcgagctgctcaaatccctggaagcttctggactctttatccagctcctgatggccctgcccaccaccatctgccatgcagaactagagcgctttctggaacatgtgaccgttgacacttctgccgaagacgtggccttcttcctggacgtctggtgggaggtgatgaagcacaagggtcacccgcaggaccccctgctctcccagtttagtgcaatggcccataagtacctgcctgccttagatgagttcccccatcctccaaagaggcttaggtcagacccagacgcgtgccccaccatgcccctgttggccatgctgctccgcgggctgacacagatccagagtcggatcctgggcccggggaggaagtgctgtgcgctggccaacctggctgacatgctgactgtgtttgcgctgacagaggacgacccccaggaggtgtctgcaaccgtgtatctggacaaactggccacggtgatctctgtgtggaactcggacacccagaatccctaccaccagcaggcgctggcagagaaggtgaaggaggcagaacgggatgtcagcctgacctcgctggccaaactccccagtgagaccattttcgtgggctgcgagttcctgcaccacctgctgcgggagtggggggaggagttgcaggccgtgctccgcagcagccaggggacaagttacgacagctaccggctgtgcgacagtctgacttccttcagccagaacgcgacgctctacctgaaccgcaccagcctgtccaaggaggacaggcaggtggtctctgagctggcggagtgtgtcagggacttcctgaggaaaacgagcacggtgctgaagaacagggccttggaggatatcacagcttccattgccatggccgtcatccagcagaagatggaccgccatatggaagtgtgctacatttttgcctctgagaagaagtgggccttctcggacgagtgggtagcctgcctggggagtaacagggccctcttccgagagccagacttggtgttgaggctgctggaaacagtgatagacgtcagcacagctgacagagccatccctgagtctcagatccggcaggtgatccacctgatcctggaatgttacgcagacctctccctgccaggtaaaaataaagtccttgcaggtatcctgcgttcctgggggcgaaagggcctctctgaaaagttgctggcttatgtggagggttttcaggaagacctcaatacaacttttaaccagctcactcagagtgcctccgaacagggcttggcaaaagctgtggcctccgtggcccgcctggtcatagtgcacccggaagtcacggtgaagaaaatgtgcagcctggctgtggtcaatctcggcacccacaagttcctgggccagattctcactgccttccctgcccttaggtttgtggaagagcagggtcccaattcatctgccactttcatggtgtcatgcctcaaagaaaccgtctggatgaagttctctacacccaaggaagaaaagcaatttttagagctcctgaactgcctgatgagtcccgtgaaaccccaagggattccagtggctgctcttcttgagccagacgaggtgctgaaggaatttgtcctgcctttcttgaggttagatgttgaagaggtagacctcagtctgaggatcttcatccagactctagaggcaaacgcgtgccgagaggaatactggctccagacctgctccccgtttccactcctcttcagcttgtgccagctcttggaccgcttcagcaaatactggcagcttcccaaggagaagcggtgcctctctttggataggaaggatctagcgatccatatcctggagctcctgtgtgagattgtatcagccaatgctgagaccttctccccggatgtctggatcaagtccctgtcctggctccaccgcaagttagaacagctagactggactgtgggcctgaggctgaagagcttcttcgaggggcacttcaagtgtgaagtgccagccacactttttgagatctgtaagctttcagaagacgagtggacctcccaggcccacccagggtacggggctggcacggggctcctggcctggatggagtgctgctgcgtctccagcggcatctcggagaggatgctgtctctcttggtggtggacgtgggcaatcctgaggaggtcagactgttcagcaaaggctttctggtggccctggtgcaagtcatgccttggtgcagccctcaggagtggcagcgccttcaccagctgaccaggagactgctggagaagcagctcctccatgtcccttatagcctggaatatattcagtttgttcccctgctcaacctgaagccctttgcccaggagttgcaactctccgtcctcttcctgaggactttccagtttctctgcagccatagctgtcgtaattggcttcctctggaaggctggaaccacgtggtcaaactcctctgtggcagtctgacccgcctcctggactcagtcagggcgatacaggcagctggcccttgggttcaaggaccagagcaggacctgacccaggaagccctgtttgtttacacccaggtgttctgccatgctctgcacatcatggccatgctccacccggaggtctgtgagccactctacgttttagccttggaaaccctcacctgctatgagactttgagcaagaccaacccttctgtcagctccttgctccagagggcacacgagcagtgcttcttaaagtccattgctgagggcatcggccctgaagaacggcgccaaaccctgttgcagaagatgagcagcttctgacttggcgtggggagctgggccccaacatggcgggtctgcagaagatcagcagcttcttacctgtgcgggagcgaaaaagctgggcttcaacatggcaggtctgtaggggtcagacccgagcagcctggactttacagttatgtgaaactgtccacaaaaagtcatggcaataatggtgtaaagaaaatagtttcttgggtatttgtaacgtacaaactatcataaaaattctcctctttcgcatctca

SEQ ID NO: 286378 - DNA, 4138 bp, Homo sapiens
ggcggaggttgtgagcaggcctaagcgcggccgccgtggctcctgcgtctcccatcgtgccgtgcgtcccgcgccgcgttcgagttctcggaggggagggggcgttagccccgcgcagccgccggcgtcgccgccatggacctaggtgggtgccgcggctccccggccccgggctgcgtccagcaatgcgccaccagagcggtgctgccccgtcgcgtctcctcctgtcgcgcacgctcgcgcgggcccggaccgaaacgtcccccgcgtcggggcgggtctaggggtcccggggtggccttggcggggggtggtccgggtcccgccgcgcgttgggccgcgtcttgccgcctccggccccctgcgcttgaaaacacggagcagacgtgaagttagagcccttggaagcgcccggggctcgcgcacgtgctttgggaaacgggctccctccgagcacccctgggcgccccgacggcctcatttcctgaacggcagctgcgttcttgagcaagtgtcttaacgctccaagtgtcttacgctcatgacgtttcctcatcgacagagcggggagaatggaagtgtgtctccccactgagttttgggcgactttgcattgagatcgccgagagctagggccatgagtaccttgtttttgactggaaggagctgtggggtggaccgtttccctgaaagctagaagaatgtttgaagcctgttcccaaggacccttgaacatctgtgaagaaatgactattctgcatggaggcttcttgctggccgagcagctgttccaccctaaggcactggcagaattaacaaagtctgactgggaacgtgttggacggcccatcgtggaggccttaagggagatctcctcggctgcagcacactcccagccctttgcctggaagaagaaagccctgatcatcatctgggccaaggttctgcagccgcaccccgtgaccccgtccgacacagagacacggtggcaggaagacctgttcttctcggtgggcaacatgatccccaccatcaaccacaccatcctcttcgagctgctcaaatccctggaagcttctggactctttatccagctcctgatggccctgcccaccaccatctgccatgcagaactagagcgctttctggaacatgtgaccgttgacacttctgccgaagacgtggccttcttcctggacgtctggtgggaggtgatgaagcacaagggtcacccgcaggaccccctgctctcccagtttagtgcaatggcccataagtacctgcctgccttagatgagttcccccatcctccaaagaggcttaggtcagacccagacgcgtgccccaccatgcccctgttggccatgctgctccgcgggctgacacagatccagagtcggatcctgggcccggggaggaagtgctgtgcgctggccaacctggctgacatgctgactgtgtttgcgctgacagaggacgacccccaggaggtgtctgcaaccgtgtatctggacaaactggccacggtgatctctgtgtggaactcggacacccagaatccctaccaccagcaggcgctggcagagaaggtgaaggaggcagaacgggatgtcagcctgacctcgctggccaaactccccagtgagaccattttcgtgggctgcgagttcctgcaccacctgctgcgggagtggggggaggagttgcaggccgtgctccgcagcagccaggggacaagttacgacagctaccggctgtgcgacagtctgacttccttcagccagaacgcgacgctctacctgaaccgcaccagcctgtccaaggaggacaggcaggtggtctctgagctggcggagtgtgtcagggacttcctgaggaaaacgagcacggtgctgaagaacagggccttggaggatatcacagcttccattgccatggccgtcatccagcagaagatggaccgccatatggaagtgtgctacatttttgcctctgagaagaagtgggccttctcggacgagtgggtagcctgcctggggagtaacagggccctcttccgagagccagacttggtgttgaggctgctggaaacagtgatagacgtcagcacagctgacagagccatccctgagtctcagatccggcaggtgatccacctgatcctggaatgttacgcagacctctccctgccaggtaaaaataaagtccttgcaggtatcctgcgttcctgggggcgaaagggcctctctgaaaagttgctggcttatgtggagggttttcaggaagacctcaatacaacttttaaccagctcactcagagtgcctccgaacagggcttggcaaaagctgtggcctccgtggcccgcctggtcatagtgcacccggaagtcacggtgaagaaaatgtgcagcctggctgtggtcaatctcggcacccacaagttcctgggccagattctcactgccttccctgcccttaggtttgtggaagagcagggtcccaattcatctgccactttcatggtgtcatgcctcaaagaaaccgtctggatgaagttctctacacccaaggaagaaaagcaatttttagagctcctgaactgcctgatgagtcccgtgaaaccccaagggattccagtggctgctcttcttgagccagacgaggtgctgaaggaatttgtcctgcctttcttgaggttagatgttgaagaggtagacctcagtctgaggatcttcatccagactctagaggcaaacgcgtgccgagaggaatactggctccagacctgctccccgtttccactcctcttcagcttgtgccagctcttggaccgcttcagcaaatactggcagcttcccaaggagaagcggtgcctctctttggataggaaggatctagcgatccatatcctggagctcctgtgtgagattgtatcagccaatgctgagaccttctccccggatgtctggatcaagtccctgtcctggctccaccgcaagttagaacagctagactggactgtgggcctgaggctgaagagcttcttcgaggggcacttcaagtgtgaagtgccagccacactttttgagatctgtaagctttcagaagacgagtggacctcccaggcccacccagggtacggggctggcacggggctcctggcctggatggagtgctgctgcgtctccagcggcatctcggagaggatgctgtctctcttggtggtggacgtgggcaatcctgaggaggtcagactgttcagcaaaggctttctggtggccctggtgcaagtcatgccttggtgcagccctcaggagtggcagcgccttcaccagctgaccaggagactgctggagaagcagctcctccatgtcccttatagcctggaatatattcagtttgttcccctgctcaacctgaagccctttgcccaggagttgcaactctccgtcctcttcctgaggactttccagtttctctgcagccatagctgtcgtaattggcttcctctggaaggctggaaccacgtggtcaaactcctctgtggcagtctgacccgcctcctggactcagtcagggcgatacaggcagctggcccttgggttcaaggaccagagcaggacctgacccaggaagccctgtttgtttacacccaggtgttctgccatgctctgcacatcatggccatgctccacccggaggtctgtgagccactctacgttttagccttggaaaccctcacctgctatgagactttgagcaagaccaacccttctgtcagctccttgctccagagggcacacgagcagtgcttcttaaagtccattgctgagggcatcggccctgaagaacggcgccaaaccctgttgcagaagatgagcagcttctgacttggcgtggggagctgggccccaacatggcgggtctgcagaagatcagcagcttcttacctgtgcgggagcgaaaaagctgggcttcaacatggcaggtctgtaggggtcagacccgagcagcctggactttacagttatgtgaaactgtccacaaaaagtcatggcaataatggtgtaaagaaaatagtttcttgggtatttgtaacgtacaaactatcataaaaattctcctctttcgcatctca

SEQ ID NO: 286379 - DNA, 3298 bp, Homo sapiens
ggcggaggttgtgagcaggcctaagcgcggccgccgtggctcctgcgtctcccatcgtgccgtgcgtcccgcgccgcgttcgagttctcggaggggagggggcgttagccccgcgcagccgccggcgtcgccgccatggacctaggacccttgaacatctgtgaagaaatgactattctgcatggaggcttcttgctggccgagcagctgttccaccctaaggcactggcagaattaacaaagtctgactgggaacgtgttggacggcccatcgtggaggccttaagggagatctcctcggctgcagcacactcccagccctttgcctggaagaagaaagccctgatcatcatctgggccaaggttctgcagccgcaccccgtgaccccgtccgacacagagacacggtggcaggaagacctgttcttctcggtgggcaacatgatccccaccatcaaccacaccatcctcttcgagctgctcaaatccctggaagcttctggactctttatccagctcctgatggccctgcccaccaccatctgccatgcagaactagagcgctttctggaacatgtgaccgttgacacttctgccgaagacgtggccttcttcctggacgtctggtgggagaggacgacccccaggaggtgtctgcaaccgtgtatctggacaaactggccacggtgatctctgtgtggaactcggacacccagaatccctaccaccagcaggcgctggcagagaaggtgaaggaggcagaacgggatgtcagcctgacctcgctggccaaactccccagtgagaccattttcgtgggctgcgagttcctgcaccacctgctgcgggagtggggggaggagttgcaggccgtgctccgcagcagccaggggacaagttacgacagctaccggctgtgcgacagtctgacttccttcagccagaacgcgacgctctacctgaaccgcaccagcctgtccaaggaggacaggcaggtggtctctgagctggcggagtgtgtcagggacttcctgaggaaaacgagcacggtgctgaagaacagggccttggaggatatcacagcttccattgccatggccgtcatccagcagaagatggaccgccatatggaagtgtgctacatttttgcctctgagaagaagtgggccttctcggacgagtgggtagcctgcctggggagtaacagggccctcttccgagagccagacttggtgttgaggctgctggaaacagtgatagacgtcagcacagctgacagagccatccctgagtctcagatccggcaggtgatccacctgatcctggaatgttacgcagacctctccctgccaggtaaaaataaagtccttgcaggtatcctgcgttcctgggggcgaaagggcctctctgaaaagttgctggcttatgtggagggttttcaggaagacctcaatacaacttttaaccagctcactcagagtgcctccgaacagggcttggcaaaagctgtggcctccgtggcccgcctggtcatagtgcacccggaagtcacggtgaagaaaatgtgcagcctggctgtggtcaatctcggcacccacaagttcctgggccagattctcactgccttccctgcccttaggtttgtggaagagcagggtcccaattcatctgccactttcatggtgtcatgcctcaaagaaaccgtctggatgaagttctctacacccaaggaagaaaagcaatttttagagctcctgaactgcctgatgagtcccgtgaaaccccaagggattccagtggctgctcttcttgagccagacgaggtgctgaaggaatttgtcctgcctttcttgaggttagatgttgaagaggtagacctcagtctgaggatcttcatccagactctagaggcaaacgcgtgccgagaggaatactggctccagacctgctccccgtttccactcctcttcagcttgtgccagctcttggaccgcttcagcaaatactggcagcttcccaaggagaagcggtgcctctctttggataggaaggatctagcgatccatatcctggagctcctgtgtgagattgtatcagccaatgctgagaccttctccccggatgtctggatcaagtccctgtcctggctccaccgcaagttagaacagctagactggactgtgggcctgaggctgaagagcttcttcgaggggcacttcaagtgtgaagtgccagccacactttttgagatctgtaagctttcagaagacgagtggacctcccaggcccacccagggtacggggctggcacggggctcctggcctggatggagtgctgctgcgtctccagcggcatctcggagaggatgctgtctctcttggtggtggacgtgggcaatcctgaggaggtcagactgttcagcaaaggctttctggtggccctggtgcaagtcatgccttggtgcagccctcaggagtggcagcgccttcaccagctgaccaggagactgctggagaagcagctcctccatgtcccttatagcctggaatatattcagtttgttcccctgctcaacctgaagccctttgcccaggagttgcaactctccgtcctcttcctgaggactttccagtttctctgcagccatagctgtcgtaattggcttcctctggaaggctggaaccacgtggtcaaactcctctgtggcagtctgacccgcctcctggactcagtcagggcgatacaggcagctggcccttgggttcaaggaccagagcaggacctgacccaggaagccctgtttgtttacacccaggtgttctgccatgctctgcacatcatggccatgctccacccggaggtctgtgagccactctacgttttagccttggaaaccctcacctgctatgagactttgagcaagaccaacccttctgtcagctccttgctccagagggcacacgagcagtgcttcttaaagtccattgctgagggcatcggccctgaagaacggcgccaaaccctgttgcagaagatgagcagcttctgacttggcgtggggagctgggccccaacatggcgggtctgcagaagatcagcagcttcttacctgtgcgggagcgaaaaagctgggcttcaacatggcaggtctgtaggggtcagacccgagcagcctggactttacagttatgtgaaactgtccacaaaaagtcatggcaataatggtgtaaagaaaatagtttcttgggtatttgtaacgtacaaactatcataaaaattctcctctttcgcatctca

SEQ ID NO: 286380 - DNA, 3829 bp, Homo sapiens
ggcggaggttgtgagcaggcctaagcgcggccgccgtggctcctgcgtctcccatcgtgccgtgcgtcccgcgccgcgttcgagttctcggaggggagggggcgttagccccgcgcagccgccggcgtcgccgccatggacctaggacccttgaacatctgtgaagaaatgactattctgcatggaggcttcttgctggccgagcagctgttccaccctaaggcactggcagaattaacaaagtctgactgggaacgtgttggacggcccatcgtggaggccttaagggagatctcctcggctgcagcacactcccagccctttgcctggaagaagaaagccctgatcatcatctgggccaaggttctgcagccgcaccccgtgaccccgtccgacacagagacacggtggcaggaagacctgttcttctcggtgggcaacatgatccccaccatcaaccacaccatcctcttcgagctgctcaaatccctggaagcttctggactctttatccagctcctgatggccctgcccaccaccatctgccatgcagaactagagcgctttctggaacatgtgaccgttgacacttctgccgaagacgtggccttcttcctggacgtctggtgggaggtgatgaagcacaagggtcacccgcaggaccccctgctctcccagtttagtgcaatggcccataagtacctgcctgccttagatgagttcccccatcctccaaagaggcttaggtcagacccagacgcgtgccccaccatgcccctgttggccatgctgctccgcgggctgacacagatccagagtcggatcctgggcccggggaggaagtgctgtgcgctggccaacctggctgacatgctgactgtgtttgcgctgacagaggacgacccccaggaggtgtctgcaaccgtgtatctggacaaactggccacggtgatctctgtgtggaactcggacacccagaatccctaccaccagcaggcgctggcagagaaggtgaaggaggcagaacgggatgtcagcctgacctcgctggccaaactccccagtgagaccattttcgtgggctgcgagttcctgcaccacctgctgcgggagtggggggaggagttgcaggccgtgctccgcagcagccaggggacaagttacgacagctaccggctgtgcgacagtctgacttccttcagccagaacgcgacgctctacctgaaccgcaccagcctgtccaaggaggacaggcaggtggtctctgagctggcggagtgtgtcagggacttcctgaggaaaacgagcacggtgctgaagaacagggccttggaggatatcacagcttccattgccatggccgtcatccagcagaagatggaccgccatatggaagtgtgctacatttttgcctctgagaagaagtgggccttctcggacgagtgggtagcctgcctggggagtaacagggccctcttccgagagccagacttggtgttgaggctgctggaaacagtgatagacgtcagcacagctgacagagccatccctgagtctcagatccggcaggtgatccacctgatcctggaatgttacgcagacctctccctgccaggtaaaaataaagtccttgcaggtatcctgcgttcctgggggcgaaagggcctctctgaaaagttgctggcttatgtggagggttttcaggaagacctcaatacaacttttaaccagctcactcagagtgcctccgaacagggcttggcaaaagctgtggcctccgtggcccgcctggtcatagtgcacccggaagtcacggtgaagaaaatgtgcagcctggctgtggtcaatctcggcacccacaagttcctgggccagattctcactgccttccctgcccttaggtttgtggaagagcagggtcccaattcatctgccactttcatggtgtcatgcctcaaagaaaccgtctggatgaagttctctacacccaaggaagaaaagcaatttttagagctcctgaactgcctgatgagtcccgtgaaaccccaagggattccagtggctgctcttcttgagccagacgaggtgctgaaggaatttgtcctgcctttcttgaggttagatgttgaagaggtagacctcagtctgaggatcttcatccagactctagaggcaaacgcgtgccgagaggaatactggctccagacctgctccccgtttccactcctcttcagcttgtgccagctcttggaccgcttcagcaaatactggcagcttcccaaggagaagcggtgcctctctttggataggaaggatctagcgatccatatcctggagctcctgtgtgagattgtatcagccaatgctgagaccttctccccggatgtctggatcaagtccctgtcctggctccaccgcaagttagaacagctagactggactgtgggcctgaggctgaagagcttcttcgaggggcacttcaagtgtgaagtgccagccacactttttgagatctgtaagctttcagaagacgagtggacctcccaggcccacccagggtacggggctggcacggggctcctggcctggatggagtgctgctgcgtctccagcggcatctcggagaggatgctgtctctcttggtggtggacgtgggcaatcctgaggaggtcagactgttcagcaaaggctttctggtggccctggtgcaagtcatgccttggtgcagccctcaggagtggcagcgccttcaccagctgaccaggagactgctggagaagcagctcctccatgtcccttatagcctggaatatattcagtttgttcccctgctcaacctgaagccctttgcccaggagttgcaactctccgtcctcttcctgaggactttccagtttctctgcagccatagctgtcgtaattggcttcctctggaaggctggaaccacgtggtcaaactcctctgtggcagtctgacccgcctcctggactcagtcagggcgatacaggcagctggcccttgggttcaaggaccagagcaggacctgacccaggaagccctgtttgtttacacccaggtgttctgccatgctctgcacatcatggccatgctccacccggaggtctgtgagccactctacgttttagccttggaaaccctcacctgctatgagactttgagcaagaccaacccttctgtcagctccttgctccagagggcacacgagcagtgcttcttaaagtccattgctgagggcatcggccctgaagaacggcgccaaaccctgttgcagaagatgagcagcttctgacttggcgtggggagctgggccccaacatggcgggtctgcagaagatcagcagcttcttacctgtgcgggagcgaaaaagctgggcttcaacatggcaggtctgtaggggtcagacccgagcagcctggactttacagttatgtgaaactgtccacaaaaagtcatggcaataatggtgtaaagaaaatagtttcttgggtatttgtaacgtacaaactatcataaaaattctcctctttcgcatctcactttgtctcttctaagtcggcctcagcaatagcccaggattaaatatgctctgaaattgggtttagtgtcttcaagatcaaatccagccgggaggaacatgttcataactggacttttccatcctagattttggcaaataagcccaaagttgaaaccatgtgagtggaaaaagcattacatggtacgtataacccccttcaagagttatttcgtcttttaatgtttttttcttgaggtatcttggaaaggacagcagcttggaaaagaa

SEQ ID NO: 286381 - DNA, 3940 bp, Homo sapiens
ggcggaggttgtgagcaggcctaagcgcggccgccgtggctcctgcgtctcccatcgtgccgtgcgtcccgcgccgcgttcgagttctcggaggggagggggcgttagccccgcgcagccgccggcgtcgccgccatggacctaggacccttgaacatctgtgaagaaatgactattctgcatggaggcttcttgctggccgagcagctgttccaccctaaggcactggcagaattaacaaagtctgactgggaacgtgttggacggcccatcgtggaggccttaagggagatctcctcggctgcagcacactcccagccctttgcctggaagaagaaagccctgatcatcatctgggccaaggttctgcagccgcaccccgtgaccccgtccgacacagagacacggtggcaggaagacctgttcttctcggtgggcaacatgatccccaccatcaaccacaccatcctcttcgagctgctcaaatccctggaagcttctggactctttatccagctcctgatggccctgcccaccaccatctgccatgcagaactagagcgctttctggaacatgtgaccgttgacacttctgccgaagacgtggccttcttcctggacgtctggtgggaggtgatgaagcacaagggtcacccgcaggaccccctgctctcccagtttagtgcaatggcccataagtacctgcctgccttagatgagttcccccatcctccaaagaggcttaggtcagacccagacgcgtgccccaccatgcccctgttggccatgctgctccgcgggctgacacagatccagagtcggatcctgggcccggggaggaagtgctgtgcgctggccaacctggctgacatgctgactgtgtttgcgctgacagaggacgacccccaggaggtgtctgcaaccgtgtatctggacaaactggccacggtgatctctgtgtggaactcggacacccagaatccctaccaccagcaggcgctggcagagaaggtgaaggaggcagaacgggatgtcagcctgacctcgctggccaaactccccagtgagaccattttcgtgggctgcgagttcctgcaccacctgctgcgggagtggggggaggagttgcaggccgtgctccgcagcagccaggggacaagttacgacagctaccggctgtgcgacagtctgacttccttcagccagaacgcgacgctctacctgaaccgcaccagcctgtccaaggaggacaggcaggtggtctctgagctggcggagtgtgtcagggacttcctgaggaaaacgagcacggtgctgaagaacagggccttggaggatatcacagcttccattgccatggccgtcatccagcagaagatggaccgccatatggaagtgtgctacatttttgcctctgagaagaagtgggccttctcggacgagtgggtagcctgcctggggagtaacagggccctcttccgagagccagacttggtgttgaggctgctggaaacagtgatagacgtcagcacagctgacagagccatccctgagtctcagatccggcaggtgatccacctgatcctggaatgttacgcagacctctccctgccaggtaaaaataaagtccttgcaggtatcctgcgttcctgggggcgaaagggcctctctgaaaagttgctggcttatgtggagggttttcaggaagacctcaatacaacttttaaccagctcactcagagtgcctccgaacagggcttggcaaaagctgtggcctccgtggcccgcctggtcatagtgcacccggaagtcacggtgaagaaaatgtgcagcctggctgtggtcaatctcggcacccacaagttcctgggccagattctcactgccttccctgcccttaggtttgtggaagagcagggtcccaattcatctgccactttcatggtgtcatgcctcaaagaaaccgtctggatgaagttctctacacccaaggaagaaaagcaatttttagagctcctgaactgcctgatgagtcccgtgaaaccccaagggattccagtggctgctcttcttgagccagacgaggtgctgaaggaatttgtcctgcctttcttgaggttagatgttgaagaggtagacctcagtctgaggatcttcatccagactctagaggcaaacgcgtgccgagaggaatactggctccagacctgctccccgtttccactcctcttcagcttgtgccagctcttggaccgcttcagcaaatactggcagcttcccaaggagaagcggtgcctctctttggataggaaggatctagcgatccatatcctggagctcctgtgtgagattgtatcagccaatgctgagaccttctccccggatgtctggatcaagtccctgtcctggctccaccgcaagttagaacagctagactggactgtgggcctgaggctgaagagcttcttcgaggggcacttcaagtgtgaagtgccagccacactttttgagatctgtaagctttcagaagacgagtggacctcccaggcccacccagggtacggggctggcacggggctcctggcctggatggagtgctgctgcgtctccagcggcatctcggagaggatgctgtctctcttggtggtggacgtgggcaatcctgaggaggtcagactgttcagcaaaggctttctggtggccctggtgcaagtcatgccttggtgcagccctcaggagtggcagcgccttcaccagctgaccaggagactgctggagaagcagctcctccatgtcccttatagcctggaatatattcagtttgttcccctgctcaacctgaagccctttgcccaggagttgcaactctccgtcctcttcctgaggactttccagtttctctgcagccatagctgtcgtaattggcttcctctggaaggctggaaccacgtggtcaaactcctctgtggcagtctgacccgcctcctggactcagtcagggcgatacaggcagctggcccttgggttcaaggaccagagcaggacctgacccaggaagccctgtttgtttacacccaggtgttctgccatgctctgcacatcatggccatgctccacccggaggtctgtgagccactctacgttttagccttggaaaccctcacctgctatgagactttgagcaagaccaacccttctgtcagctccttgctccagagggcacacgagcagtgcttcttaaagtccattgctgagggcatcggccctgaagaacggcgccaaaccctgttgcagaagatgagcagcttctgacttggcgtggggagctgggccccaacatggcgggtctgcagaagatcagcagcttcttacctgtgcgggagcgaaaaagctgggcttcaacatggcaggtctgtaggggtcagacccgagcagcctggactttacagttatgtgaaactgtccacaaaaagtcatggcaataatggtgtaaagaaaatagtttcttgggtatttgtaacgtacaaactatcataaaaattctcctctttcgcatctcaaaaaaaaaaaaaaaaaaaaaaaaaaaaaaaaaaaaaaaaaaaaaaaaaaaaaaaaaaaaaaaaaaaaaaaaaaaaaaaaaggggggggggggggaaaaatttcccgggggggggcacaccaatgtcgtcgacgcaccgccacctgttgtgtggtgagacaggagggggcccaccatggaggggaccacgatcaaacaacgacgccggcgccggcgcgcgaaacaacacacacggcgccgccgaggaaacacacccggtgccagtcctcgggagagacgaccccccctgcggggggggagcacatagggggaccacccccgcaaaaaaaacgccgcggggactaaacacgcggggtgactgcggcaaccccgggcatctcg

SEQ ID NO: 286382 - DNA, 3525 bp, Homo sapiens
ggcggaggttgtgagcaggcctaagcgcggccgccgtggctcctgcgtctcccatcgtgccgtgcgtcccgcgccgcgttcgagttctcggaggggagggggcgttagccccgcgcagccgccggcgtcgccgccatggacctaggacccttgaacatctgtgaagaaatgactattctgcatggaggcttcttgctggccgagcagctgttccaccctaaggcactggcagaattaacaaagtctgactgggaacgtgttggacggcccatcgtggaggccttaagggagatctcctcggctgcagcacactcccagccctttgcctggaagaagaaagccctgatcatcatctgggccaaggttctgcagccgcaccccgtgaccccgtccgacacagagacacggtggcaggaagacctgttcttctcggtgggcaacatgatccccaccatcaaccacaccatcctcttcgagctgctcaaatccctggaagcttctggactctttatccagctcctgatggccctgcccaccaccatctgccatgcagaactagagcgctttctggaacatgtgaccgttgacacttctgccgaagacgtggccttcttcctggacgtctggtgggaggtgatgaagcacaagggtcacccgcaggaccccctgctctcccagtttagtgcaatggcccataagtacctgcctgccttagatgagttcccccatcctccaaagaggcttaggtcagacccagacgcgtgccccaccatgcccctgttggccatgctgctccgcgggctgacacagatccagagtcggatcctgggcccggggaggaagtgctgtgcgctggccaacctggctgacatgctgactgtgtttgcgctgacagaggacgacccccaggaggtgtctgcaaccgtgtatctggacaaactggccacggtgatctctgtgtggaactcggacacccagaatccctaccaccagcaggcgctggcagagaaggtgaaggaggcagaacgggatgtcagcctgacctcgctggccaaactccccagtgagaccattttcgtgggctgcgagttcctgcaccacctgctgcgggagtggggggaggagttgcaggccgtgctccgcagcagccaggggacaagttacgacagctaccggctgtgcgacagtctgacttccttcagccagaacgcgacgctctacctgaaccgcaccagcctgtccaaggaggacaggcaggtggtctctgagctggcggagtgtgtcagggacttcctgaggaaaacgagcacggtgctgaagaacagggccttggaggatatcacagcttccattgccatggccgtcatccagcagaagatggaccgccatatggaagtgtgctacatttttgcctctgagaagaagtgggccttctcggacgagtgggtagcctgcctggggagtaacagggccctcttccgagagccagacttggtgttgaggctgctggaaacagtgatagacgtcagcacagctgacagagccatccctgagtctcagatccggcaggtgatccacctgatcctggaatgttacgcagacctctccctgccaggtaaaaataaagtccttgcaggtatcctgcgttcctgggggcgaaagggcctctctgaaaagttgctggcttatgtggagggttttcaggaagacctcaatacaacttttaaccagctcactcagagtgcctccgaacagggcttggcaaaagctgtggcctccgtggcccgcctggtcatagtgcacccggaagtcacggtgaagaaaatgtgcagcctggctgtggtcaatctcggcacccacaagttcctgggccagattctcactgccttccctgcccttaggtttgtggaagagcagggtcccaattcatctgccactttcatggtgtcatgcctcaaagaaaccgtctggatgaagttctctacacccaaggaagaaaagcaatttttagagctcctgaactgcctgatgagtcccgtgaaaccccaagggattccagtggctgctcttcttgagccagacgaggtgctgaaggaatttgtcctgcctttcttgaggttagatgttgaagaggtagacctcagtctgaggatcttcatccagactctagaggcaaacgcgtgccgagaggaatactggctccagacctgctccccgtttccactcctcttcagcttgtgccagctcttggaccgcttcagcaaatactggcagcttcccaaggagaagcggtgcctctctttggataggaaggatctagcgatccatatcctggagctcctgtgtgagattgtatcagccaatgctgagaccttctccccggatgtctggatcaagtccctgtcctggctccaccgcaagttagaacagctagactggactgtgggcctgaggctgaagagcttcttcgaggggcacttcaagtgtgaagtgccagccacactttttgagatctgtaagctttcagaagacgagtggacctcccaggcccacccagggtacggggctggcacggggctcctggcctggatggagtgctgctgcgtctccagcggcatctcggagaggatgctgtctctcttggtggtggacgtgggcaatcctgaggaggtcagactgttcagcaaaggctttctggtggccctggtgcaagtcatgccttggtgcagccctcaggagtggcagcgccttcaccagctgaccaggagactgctggagaagcagctcctccatgtcccttatagcctggaatatattcagtttgttcccctgctcaacctgaagccctttgcccaggagttgcaactctccgtcctcttcctgaggactttccagtttctctgcagccatagctgtcgtaattggcttcctctggaaggctggaaccacgtggtcaaactcctctgtggcagtctgacccgcctcctggactcagtcagggcgatacaggcagctggcccttgggttcaaggaccagagcaggacctgacccaggaagccctgtttgtttacacccaggtgttctgccatgctctgcacatcatggccatgctccacccggaggtctgtgagccactctacgttttagccttggaaaccctcacctgctatgagactttgagcaagaccaacccttctgtcagctccttgctccagagggcacacgagcagtgcttcttaaagtccattgctgagggcatcggccctgaagaacggcgccaaaccctgttgcagaagatgagcagcttctgacttggcgtggggagctgggccccaacatggcgggtctgcagaagatcagcagcttcttacctgtgcgggagcgaaaaagctgggcttcaacatggcaggtctgtaggggtcagacccgagcagcctggactttacacctacacgaactagacactacaaaaactcatatcaaatcatggtccaaagacaatacactcccggtacaatcacgac

SEQ ID NO: 286383 - DNA, 3072 bp, Homo sapiens
  misc_feature (1050)..(1050): n is a, c, g, or t
  misc_feature (1138)..(1138): n is a, c, g, or t
  misc_feature (1321)..(1321): n is a, c, g, or t
  misc_feature (2189)..(2189): n is a, c, g, or t
atggtccttagtctcctggagtcagtgttttctctgctggtgtctggcctgtgaaaatggggaatatgagctcttgggggcatgacagactgaggaaggagtagcatctctcactcctgggaaaggggagatgactcaggaatgaggaatagggagcagtgtttgcaccctcgttttagtttctgggccaaaggaaacatacctgataaagacctacatcctttgatgtttctgagctgggggaggcaaagaatagtgacaagattctggtcttgccaaccatgaaaaggtttggggaaaccaacatttactgagcacctaattagactctgtaactggattcttactgtagctctatctcatttatccatcatagcgtcccggggagatggggtcaggagatagcagtgccaacccactagcaagggcttgactggtatatatcacatgatccccaaaggcataacatgaagtctgtattatccccacatatgcagaaggaaggcttggagaagcaatctgaccaagatcacatccctttttttttttcggagatggagggggagtctcactgtgttaccccagctagtcttgaactcctggcctcagggatccacctgcctcagccccccaagtagctgggattacaagtgctagccactgaacctggccagaatcacatcatttttaaatggctgaactaggatttaaacccatgtctgattaaacatcccaagatgttttccatggtaagtctgtgtcaatcgttagttccctgaaggaaggcttaatctagcacagtattttctgtatctactccctggtttctcccacagagctagggccatgagtaccttgtttttgactggaaggagctgtggggtggaccgtttccctgaaagctagaagaatgtttgaagcctgttcccaaggcaagtttataaagagtgaaggcagggcttgtctgattccttctgtgcccattgctctgtggctatgtgattgctctgtgcccattaccctgtggctgtgtgactgctgctgtgcccnttaccctgtggctgcgtgattgctgctgtgcccattaccctgtggctgtgtgattgctctgtgcccattatcctgtggccgtgtgatngctctgtgcccattaccctgtagccgtgtgattgctgctgtgcccattaccttgtggctgtgtgattgctgctgtgcccattatcctgtggccgtgtgattgctctgtgcccattatcctgtggccgtgtgattgctctgtgcccattatcctgtggccgtgtgattgctctgtgcccattancctgtggccgtgtgattgctgctgtgcccattaccctgtggccgtgtgattgctctgtgcccattatcctgtggccgtgtgattgctctgtgcccattatcctgtggctgtgtgattgctctgtgcccattatcctgtagccgtgtgattgcttctgtgcccattaccctgtggctgtgtgattgctgctgtgcccattatcctgtggctgtgtgattgctgctgtgcccattaccctgtggctgtgtgattgctctgtgcccattaccctgtggctgtgtgattgctctgtgcccattatcctgtggccgtgtgattgctgctgtgcctgttaccctgtggctgtgtgattgctctgtgcccattaccctgtggctatgctcccttcatctgtcatgagaagctcagctgtcatgtcctgtggtacatgctcagtggcccctgtagtttgtactgtcctcctatttctaaacccctctccccacatcctctgctggcccagcctttgctggagggtctcgcctcagcagcccagctttttcttttcacacacttttcctgaaggatctcattcaccgtcttggttccggtgatcccctctgggcagatacctctcagaatcacatttcccagcttacttccctcctgaacttccacctggcatttccgttgctggaggacatctgtaccttgatggccaaagctgaactcatctttcctcacacctgctctgattctcctccattccctgtatgtgatgtcacctggtggcctcccagttcccaggctggagagctcggaagccattctggattcctcggccaagtccttctgactccagctgtgcagtggctcttgtagtcatccnttctccccgtccgctgatgtcctttaaaacccttgtcatctcaaaccatgacagcctactaacagcagtggccatctggaaacattttcactatactgtcttatttggcttgtctgtgtgcaggacccttgaacatctgtgaagaaatgactattctgcatggaggcttcttgctggccgagcagctgttccaccctaaggcactggcagaattaacaaagtctgactgggaacgtgttggacggcccatcgtggaggccttaagggagatctcctcggctgcagcacactcccagccctttgcctggaagaagaaagccctgatcatcatctgggccaaggttctgcagccgcaccccgtgaccccgtccgacacagagacacggtggcaggaagacctgttcttctcggtgggcaacatgatccccaccatcaaccacaccatcgtctgtgagccactctacgttttagccttggaaaccctcacctgctatgagactttgagcaagaccaacccttctgtcagctccttgctccagagggcacacgagcagtgcttcttaaagtccattgctgagggcatcggccctgaagaacggcgccaaaccctgttgcagaagatgagcagcttctgacttggcgtggggagctgggccccaacatggcgggtctgcagaagatcagcagcttcttacctgtgcgggagcgaaaaagctgggcttcaacatggcaggtctgtaggggtcagacccgagcagcctggactttacagttatgtgaaactgtccacaaaaagtcatggcaataatggtgtaaagaaaatagtttcttgggtatttgtaacgtacaaactatcataaaaattctcctctttcgcatctca

SEQ ID NO: 286384 - DNA, 476 bp, Homo sapiens
aaagtccaaagttatgaggtagtctctgccttcctcccagaccaggctggcagaaactctctcctcgtctcatggcagtgctgttggctgttttaattccaccccatttccttttttctttttcttttttcttgagacagactctgtcgcccaggctggagtgcagtggtgtgatctcggcttactgcaacctctgcctcccaggttaaagcgattctcctgccttggcctcctaagtagttgggactgcaggcacacgccaccacgcccagctaatttttgtatttttaatagggacagggttttaccatgttggccaggctggtctccaactcctggcctcaagtgatctacctgccttggcctcccaaagtgctgggattacaggcgtgagccactgtgcctggacgacctgagcattttcttagtccatgtttatttatgttacccacgtttcttaatcccttgactcctgt

SEQ ID NO: 286385 - DNA, 405 bp, Homo sapiens
cctcctttgttctgcattcagcagctatttatcgagtacctactctgtcaggcactgtcataggcgtggggcaaagcaggaaccaagagacgaggttccctgatctcatgggacttaggttctggtgaagggagacaatcagtgcacatgcacacaccccacacgcatacacacatgaacacatgcacatgtgcacacacaagtaagatggcttcctcccagaccaggctggcagaaactctctcctcgtctcatggcagtgctgttggctgttttaattccaccccatttccttttttctttttcttttttcttgagacagactctgtcgcccagcagagcttgcagtgagctgagatcgcgccactgcactccagcctgggtgacagagcgagactccatctc

SEQ ID NO: 286386 - DNA, 2416 bp, Homo sapiens
  misc_feature (1031)..(1031): n is a, c, g, or t
  misc_feature (1386)..(1386): n is a, c, g, or t
  misc_feature (1734)..(1734): n is a, c, g, or t
cacacacacacaccatgccccccgccaccaccaccacgcacacagacgcaggttcctggaactgtttcccccagttctctgcctcagacatcttcaccccatgtcctgccctgatctggtgttctgggcatggctccttttattgctttttaaaaggagtctgtggttttatgagggctgtttggccggcagaggttgggctaggccgggttttcgatgcctgtggccctgtcagcccagggaagaggccgctgaagctgagcagctgctcctgaaaacagcccgggacagctcttcccagcctccgcccgctgcactgagcactccactctctctgccctccggctgctagctccgatggcagcccccggcctctcagtaatcctcagcaactcaagctttcgctggagtcctcggcaggtgggcggctgtaaaatctttttgtttgctgctttgtcatcctcttcccatccccgaccggcagtacccatggtccaggaaataaacacccagtacaaaaactccctgttcgtatctggtaaattttcaactaaaaagttcagcgttcaggtgagtgggctcgagatccagccggtttgaagagagaggaataaaggacagggtgttgggcgtgggactggcacccgctgaaaccctcatcctgtgggtgcccggtgtgggtccccgctggcgtcacaacgtgcagcccacctgctctgccagcttccgcgaccttgatctcagccaatcctgttttgggccccatcacagtctttctgtctgtggagctgggcaagcaggaggtttctcagggcccaagatggtttttcagatgtgaatattggccaactcccgaagttgctagaaaaatgtaggcagcttggccaccgaagtaaaagccatcgatggcatttttcccagcctcagctgaattcaaaccactaaactcttgtggtttattttttttacagctttcttagctaacaggactggatgcctttaaaaaacttttcaaaataatattttggaanctagcattatttggttttccctctgtaaaggctaatctatcataatttccccatagcttgctttgcggaagagggtgggtgagggacaaaggaaaggtaacatgctaaccaagacaagcgtagtgtgaaggaagggcgggccctgttcggcctctgcccagcagagtcacaagctttgtgggcctcagtgtcctcctctggagaacaggaagaataatacgacagcccaactaccttacaagacagttctgtgattaggctgatgttcgtcagaacatttagtcaccgtaaaatgctacacaatgtgaattattgtgctttaacaaataatttgaaagcagtataaagtgcttcnagacttgcagatatcaagaaagctggatatctgggttattcattctcggttggcaaaaggtggtccctgcatgatcagccctacgggccccacatattcttttaagggctcaggcttttggaaggcttctcagtgcagcaagcatgaatagtaagggctacgctgcgctctttacttacttgtttttgccttaaaccatcacagttaccacaagggttaaggatgcaggtagcattgcagacagactgacagagctttgtgttctggcttggccaattagcttagcttctctgagcccagtttcctcatctgtaaaacaggtataacaacaacaacaacaacaacaanaatagtaatcagctgatacaattcttgtgagattaaaagacaacattcacaaattgcttaccagtatgatatcttgcacattgattaaatgaatgtaagataatgatgttgataattattttaaggaatttgagggagaaaattcccacctacgagttcctgtgcacctagtggtgggactttctcttggtcatgcattcatttgacaagcatttactgaataccttctgtgagctcttaggagatcagaatatgccatcctcaaatacgaaggattgttcagctgaagacgattaagaagcagatgcaggaaccctttagacttccctctatttgcctaaaagcaggacatagatttacagagacaaagagtattcctgcccaggagagcaaaggttaaccaatgaagactgctttagactctcatcagcctggaggtgatacagaggactctacttcaccagctgtctagccagcctttgtccgccatggatttgccttcccacaagttgcctgcagagacttacagtccttttcctttgtcccttctctaaaaatgtgctattctttgttgaggatcttatataagctgggagtcaaggccacttcttggagaatgattctggatacttctctgggtatctcccatgtatttataaaatacacatgttaatcaacttct

SEQ ID NO: 286387 - DNA, 4203 bp, Homo sapiens
  misc_feature (702)..(702): n is a, c, g, or t
  misc_feature (716)..(716): n is a, c, g, or t
  misc_feature (1191)..(1191): n is a, c, g, or t
  misc_feature (1235)..(1235): n is a, c, g, or t
  misc_feature (2025)..(2025): n is a, c, g, or t
  misc_feature (2685)..(2685): n is a, c, g, or t
  misc_feature (3260)..(3260): n is a, c, g, or t
  misc_feature (3377)..(3377): n is a, c, g, or t
  misc_feature (4021)..(4021): n is a, c, g, or t
  misc_feature (4142)..(4142): n is a, c, g, or t
gggttggagctggcagaaccgtaactccctctctgagggtgaatacgggccttgattgccagaagggccctcggccggggacgcgggatgatgcggggccgggagatgctttcctggaggctgagaaacctggagggagacccccaaaacttctcagttcgccgaccccttggtcccagagggagaggaggtgggctgtgcctcagcagggtcgcaggcattgcaggggcatcacgttagtcagagcatgttggcatggaggccactcagcccagggaggcaggactcacgccccaaatggaaggcacgcagtcgtgcctgcctagaggcgttaatattgtgccacactttgggggtgaggatctggcaactttatacctttttgagttgtcttttcaagtctgtaggatcagcccacagcttggttcctgtgaagtgagcttgctgtgactgcttcttcagggacaactgtggtcatcttggggagatgccttggggtctgtggcaagaggcaaaaaggagaatgtgtgatactcagaatgcattaaagcgtgctcttacagagcagaagtcagtggctgctcaccagagaggggcctgggggttgagaaaagcaaaaaaatggatgggcttctatcagatttcaacactgatgaactccagttggggggcaggtgccagccagggctattaaataataanaggaggggctgccntaggatgacaggatgggggagggtggggaggggaagaggaaggggacgtgctccaagaaggcacccagcaccagtggtctcattagctttttgctatcagtcctcaactacatttgggggacagttcctgaccaggcaatctgtcagcaaaggggtgctgcaatctgtcagcaaagggaagaggggaagtttggggtcttaactggctctctactaagatacccagaggaatgccttcatttgcataataaaccagaggaaaatttgagtctgcccctgagttccaaaggttctgggtaccagggcttgaatccagcagtgtgactattcgtgcctcagttttttcatcctgaaatttggaaagtcgttctttccattgtgatattctctagctagaacccagagaggataagaaactgcctcatggtagcctcccaggggagaaggttctagtaggagatggcctcagagcaangacttccagcctcccatcctctggtggtctgggaggatcacagnatgtcaaggccttgctcctgtggccttgattcagattagctgtggttcaagactgcctgtgtggcacatgtggatacgtgcaaggtcgctgaggcagtgctgtgcccttaaagtttatctgcttttccaacccaaaagcagactccctaaagggtagggaatgcctcattactcactgggccctcctgcagctcctggcatggaactgacacatagttggcactggcaatgcacatacttactagatgttaaagaagtccagaaccagaaccagaggcacataaataggatctgcatcagcagtgggttagagaaagggtgggaaactaagtgaaatcttagaatgcatccaaggaagtagatcaatttgagctttaactactggagaatggcccctgagaaggccccatttgttcacacgtatagctaattgtatatacctttgaggaatgcaagagccggcaggaaattcccctcctcctgaaccacagagtatttctgggtgggcatcgattgtctatgggccatggcgtaagacccccaccccccgaccccccggcaacaaaagtatcttcttgctccctaaaaaaaaatgtatggagactacatatccttgcctgtctagtcagccttggttaatttcataaagtaaaggggccctgagcctgcctgcccggccgagtttagagttgaaagggaaacgtctttgaggtggaaaccaattgcatggatcaaatggtcctgatggtgcatagagccttaggtttggaaagaagtgaagggccttgcngccttgctggggacttgagcctctcagccattggtgctctctggagctgcccgcccaccaggggcaatggcccttgttggcctccaggccccctccttccctggatgctgtgctgttctcctcttggtcttgtttcattggctgtggcagaaactttggtcccaacaaggcccaggaaacagaccctagcaaagacctgaggcaactgggtgccccaggaccacaggaactcatgtgtgctgtgagggctttaagagctttgaagtggggagtctctgacgtggatcagggctatgggtgctgatgctgtcaataagccacacgcaaaggttgggtcaatatgactgcttctcagaccctcttcggaggcagactctccctcacctgcctggccaaattccctctgggcagaaggaccctagggagcttttcctggcccatgtggcagaggcccaggctcccactcagacaatgaccccttgctttgcccactgaaagaagtccccagaagatgagctctgttacaagcagaacagaaaagaaacagtgggattagggctccaaaaaccctccagaactatcagagaattctggacagtggtccctgatggcatctgtgttaggggctgggaacaagaacccctctcacaggcacctctncaggcggggttaagactgtcaaatactggccgaggccaagggagactctgtcatgtctgaggccataggcatgttttcttctggacttcagcgagaggcagagcccccagccccatgcagtcacctcagctctgcctgagaagaagcgagggaagcccattcctccccatcagttggcctctggggaggcaaagtcaagtatgtgatggttccttacctgtgcagggaaaatggaacttgggagtcagctgtctgaaggcatcacgccttgtatgacccttgcaagcccaagctacctacctgttcctgtacagaaaccctccctggcctcatcctgtgggtggcaaacccacatattcagttattgctgttttcttccttccttggatacttgtctccaataaatatttacagtgggacccacagatgaaccttagccccaaacataagatagctatgtcaaaaggggtcctgggacagtgataccccaggggggtcaggcaaaaacagaagcaagcctcttggccacctcctcccttagccttctgcgtaaagatggacttgcaggaggagancacaccctgcaactacagaacctcatggtacggaaccaccaggggatcctcgcccacggccctgggtggaattgatgttgggaagatagattagtagtgaggcgcatcaccccactntgactcaccttcttctgcccccacgcctgtccttcagaccatctccctgctgcggcagagccactgagttcagggagcaactgtgggcagatgaaattgggctgtggtgggtgtgggaatccctgtggacttccaaaagcacttcggtttctgccctgcttggcgtggttccagaacccagggtggtggcgaggtgggagctggcagagcgcagggaagaagttccaggatcagagctcacctttctgttcttcaccctgatctgttcttccctgatcagtcctcccagactgcactggagagtgaggcctttgcctgttcggatttgctgcctcgtgtgtttcaagctgcccacacttcacaggctgcttcgaagccctccctacccaccccgtgagaaacgcccctggggagaggcagagatgggtcttttagtcttgcagcccttgtttgtttaaaatgtcaggctgacttcttctcaatcccagaaatattttactggcatggcttcagcaaacatgactcaaagcctagaaggacatggccagatctcactgagtgaccatttagtccaacctgaggactgatgttaggaggaaaaattctttctccaggtcaaattagacttctgcagatcaaatagnataccaagagaaggaggcactttggccaggatggggaggggctaaagagcaggaaacaagcttggggcgagctggaaatatgtgtaacacaggcttgtaggagcacaggcttccagtggcngggaaatctccaattgggtgtgtagtaaagacttaaacctgttaaaataaattgattagcc

SEQ ID NO: 286388 - DNA, 682 bp, Homo sapiens
agcacaatttgaaacccaacattgatttgtgtgattatttgattaatgtctccctcgcctccaagacagacctcacctaattgagctgaacatctttcccggcctctggcacttaatagcatccccaaagaacattcaagtctgagcctcaaggagcctctgcgactcggtgtctagatccaggaaatggagaatgagccgtgactttggatgcttcactcttgtccatcaggctcggaattggagctttggtatgaaccatgcccggtaacagggactgtgcagaggaagaatcccagctagcctatggatgaagagctcagtgaaaggagaggcagacaggaccgatggctgccaccttggaccatgatgtgggagccacgttatgagaatggcagagcaaccagatagcgttggcaccaccaatcccagccctggacttcccatggtaaggagagagagaaacgtcttatgggagccaccatcattctcgtgcagcaaacctgatcctaacacacagcaccaagaccctgcctcctcctctcccttccctcccagtgccgacgaagacctactatgcagagaggatagaggagggacacagaggccactggaggtgatttgaaaaggacgaggacacctgggaacaaggcaatgaaggtggctaggacagaggcatgag

SEQ ID NO: 286389 - DNA, 897 bp, Homo sapiens
gggttggagctggcagaaccgtaactccctctctgagggtgaatacgggccttgattgccagaagggccctcggccggggacgcgggatgatgcggggccgggagatgctttcctggaggctgagaaacctggagggagacccccaaaacttctcagttcgccgaccccttggtcccagagggagaggagcatccccaaagaacattcaagtctgagcctcaaggagcctctgcgactcggtgtctagatccaggaaatggagaatgagccgtgactttggatgcttcactcttgtccatcaggctcggaattggtgagcatctcccacattaccgtctccaacggaacaaggtgccccattggacatttcctctgcatggaccagccattctccaaatctgcccccatgtcaccccagctccccatcgcagtcacttctcactccttgtcccctgtccccctgagtgacaggacttttgccagttaggtcctgtccctgtttctgatcttgggtccattccccatggtccctttcttgcttgtgccttgggatctcaggcctgttgaagtaggaggcaggactcaacttcagaccagattgaagactggctgacacagaagaggcaccaaaagcacctctctctccataagacatgcccaccagtgccatgacagtttaccattgctatggcaatgcccagaagttctcaccccttttccagacatttctgcataatctacccctcaattggcatgtgatcaaaagtgggtgtcaaaatgactgtggaactgtccctgagctgctactcttgacatgctggttacagggtagcccggctctgcagggacagtcacggagctgaaaaactgctgcctaatgaagctgttttcttcta

SEQ ID NO: 286390 - DNA, 1207 bp, Homo sapiens
gggttggagctggcagaaccgtaactccctctctgagggtgaatacgggccttgattgccagaagggccctcggccggggacgcgggatgatgcggggccgggagatgctttcctggaggctgagaaacctggagggagacccccaaaacttctcagttcgccgaccccttggtcccagagggagaggagcatccccaaagaacattcaagtctgagcctcaaggagcctctgcgactcggtgtctagatccaggaaatggagaatgagccgtgactttggatgcttcactcttgtccatcaggctcggaattggtgagcatctcccacattaccgtctccaacggaacaaggtgccccattggacatttcctctgcatggaccagccattctccaaatctgcccccatgtcaccccagctccccatcgcagtcacttctcactccttgtcccctgtccccctgagtgacaggacttttgccagttaggtcctgtccctgtttctgatcttgggtccattccccatggtccctttcttgcttgtgccttgggatctcaggcctgttgaagtaggaggcaggactcaacttcagaccagattgaagactggctgacacagaagaggcaccaaaagcacctctctctccataagacatgcccaccagtgccatgacagtttaccattgctatggcaatgcccagaagttctcaccccttttccagacatttctgcataatctacccctcaattggcatgtgatcaaaagtgggtgtcaaaatgactgtggaactgtccctgagctgctactcttgacatgctggttacagggtagcccggctctgcagggacagtcacggagctgaaaaactgctgcctaatgaagctgttttcttctaccaccggctcaccctcaaattatttcctgagcgaactcaagaaccttcctgggctaagccccaattttggggctcgcctgcccctgcatcacagcttcctcttctgttcacagctgcaaccgcctactcaaccttctgcggttcctctccctgcccctccacagtggctgctgatgggagctctggctccctgcgttttcactatctcccagtcaaatgcagagtccctgtgcaatttaaatgcttctcagctaagaacagagaaggggatagcataaggatattcaaaagattcaagaaatctcaaaag

SEQ ID NO: 286391 - DNA, 485 bp, Homo sapiens
cgcccgtgacgggcatgagaaaagaaagtggtgatgccgagtgcaaaacgttagactgccccgtgtgaggctcgaactcacgaccttcagattatgagactgacgcgctgcctactgcgctaacgaggctgctcagcgaccacttcgcgccgcggcttttgtggagataggggtcgcccctcgcgcccgtgcgtcccgcttccggcgcccgaaactgtgccgcgccggccgaatacaaaccaacagactgtagccatcttctgaacgctgtcctagatcatgtgaaggcacagcttcagaggttaaaaatttcggaatctggaaaccagagagaatgtttaaccaccaggagagttccaggcgccgcggcagggggactgggagaggggactgcgcccagaatgaaggctcgggacaaaagcagttgcgcaaacgcgccaaggctggacgtcgagtgaccgcgggcggaggtcaccagcggccgc

SEQ ID NO: 286392 - DNA, 528 bp, Homo sapiens
cgcccgtgacgggcatgagaaaagaaagtggtgatgccgagtgcaaaacgttagactgccccgtgtgaggctcgaactcacgaccttcagattatgagactgacgcgctgcctactgcgctaacgaggctgctcagcgaccacttcgcgccgcggcttttgtggagataggggtcgcccctcgcgcccgtgcgtcccgcttccggcgcccgaaactgtgccgcgccggccgaatacaaaccaacagactgtagccatcttctgaacgctgtcctagatcatgtgaaggcacagcttcagaggttaaaaatttcggaatctggaaaccagagagaatgtttaagtactcttctttattaattgtatgactatcagagatgtctgagccaccaggagagttccaggcgccgcggcagggggactgggagaggggactgcgcccagaatgaaggctcgggacaaaagcagttgcgcaaacgcgccaaggctggacgtcgagtgaccgcgggcggaggtcaccagcggccgc

SEQ ID NO: 286393 - DNA, 3028 bp, Homo sapiens
ggggtaaggagttcaaggcagcgcccacacccgggggctctccgcaacccgaccgcctgtccgctcccccacttcccgccctccctcccacctactcattcacccacccacccacccagagccgggacggcagcccaggcgcccgggccccgccgtctcctcgccgcgatcctggacttcctcttgctgcaggacccggcttccacgtgtgtcccggagccggcgtctcagcacacgctccgctccgggcctgggtgcctacagcagccagagcagcagggagtccgggacccgggcggcatctgggccaagttaggcgccgccgaggccagcgctgaacgtctccagggccggaggagccgcggggcgtccgggtctgagcctcagcaaatgggctccgacgtgcgggacctgaacgcgctgctgcccgccgtcccctccctgggtggcggcggcggctgtgccctgcctgtgagcggcgcggcgcagtgggcgccggtgctggactttgcgcccccgggcgcttcggcttacgggtcgttgggcggccccgcgccgccaccggctccgccgccacccccgccgccgccgcctcactccttcatcaaacaggagccgagctggggcggcgcggagccgcacgaggagcagtgcctgagcgccttcactgtccacttttccggccagttcactggcacagccggagcctgtcgctacgggcccttcggtcctcctccgcccagccaggcgtcatccggccaggccaggatgtttcctaacgcgccctacctgcccagctgcctcgagagccagcccgctattcgcaatcagggttacagcacggtcaccttcgacgggacgcccagctacggtcacacgccctcgcaccatgcggcgcagttccccaaccactcattcaagcatgaggatcccatgggccagcagggctcgctgggtgagcagcagtactcggtgccgcccccggtctatggctgccacacccccaccgacagctgcaccggcagccaggctttgctgctgaggacgccctacagcagtgacaatttataccaaatgacatcccagcttgaatgcatgacctggaatcagatgaacttaggagccaccttaaagggagttgctgctgggagctccagctcagtgaaatggacagaagggcagagcaaccacagcacagggtacgagagcgataaccacacaacgcccatcctctgcggagcccaatacagaatacacacgcacggtgtcttcagaggcattcaggatgtgcgacgtgtgcctggagtagccccgactcttgtacggtcggcatctgagaccagtgagaaacgccccttcatgtgtgcttacccaggctgcaataagagatattttaagctgtcccacttacagatgcacagcaggaagcacactggtgagaaaccataccagtgtgacttcaaggactgtgaacgaaggttttctcgttcagaccagctcaaaagacaccaaaggagacatacaggtgtgaaaccattccagtgtaaaacttgtcagcgaaagttctcccggtccgaccacctgaagacccacaccaggactcatacaggtaaaacaagtgaaaagcccttcagctgtcggtggccaagttgtcagaaaaagtttgcccggtcagatgaattagtccgccatcacaacatgcatcagagaaacatgaccaaactccagctggcgctttgaggggtctccctcggggaccgttcagtgtcccaggcagcacagtgtgtgaactgctttcaagtctgactctccactcctcctcactaaaaaggaaacttcagttgatcttcttcatccaacttccaagacaagataccggtgcttctggaaactaccaggtgtgcctggaagagttggtctctgccctgcctacttttagttgactcacaggccctggagaagcagctaacaatgtctggttagttaaaagcccattgccatttggtctggattttctactgtaagaagagccatagctgatcatgtccccctgacccttcccttctttttttatgctcgttttcgctggggatggaattattgtaccattttctatcatggaatatttataggccagggcatgtgtatgtgtctgctaatgtaaactttgtcatggtttccatttactaacagcaacagcaagaaataaatcagagagcaaggcatcgggggtgaatcttgtctaacattcccgaggtcagccaggctgctaacctggaaagcaggatgtagttctgccaggcaacttttaaagctcatgcatttcaagcagctgaagaaagaatcagaactaaccagtacctctgtatagaaatctaaaagaattttaccattcagttaattcaatgtgaacactggcacactgctcttaagaaactatgaagatctgagatttttttgtgtatgtttttgactcttttgagtggtaatcatatgtgtctttatagatgtacatacctccttgcacaaatggaggggaattcattttcatcactgggagtgtccttagtgtataaaaaccatgctggtatatggcttcaagttgtaaaaatgaaagtgactttaaaagaaaataggggatggtccaggatctccactgataagactgtttttaagtaacttaaggacctttgggtctacaagtatatgtgaaaaaaatgagacttactgggtgaggaaatccattgtttaaagatggtcgtgtgtgtgtgtgtgtgtgtgtgtgtgtgtgtgttgtgttgtgttttgttttttaagggagggaatttattatttaccgttgcttgaaattactgtgtaaatatatgtctgataatgatttgctctttgacaactaaaattaggactgtataagtactagatgcatcactgggtgttgatcttacaagatattgatgataacacttaaaattgtaacctgcatttttcactttgctctcaattaaagtctattcaaaaggaaaagcaa

SEQ ID NO: 286394 - DNA, 2977 bp, Homo sapiens
ggggtaaggagttcaaggcagcgcccacacccgggggctctccgcaacccgaccgcctgtccgctcccccacttcccgccctccctcccacctactcattcacccacccacccacccagagccgggacggcagcccaggcgcccgggccccgccgtctcctcgccgcgatcctggacttcctcttgctgcaggacccggcttccacgtgtgtcccggagccggcgtctcagcacacgctccgctccgggcctgggtgcctacagcagccagagcagcagggagtccgggacccgggcggcatctgggccaagttaggcgccgccgaggccagcgctgaacgtctccagggccggaggagccgcggggcgtccgggtctgagcctcagcaaatgggctccgacgtgcgggacctgaacgcgctgctgcccgccgtcccctccctgggtggcggcggcggctgtgccctgcctgtgagcggcgcggcgcagtgggcgccggtgctggactttgcgcccccgggcgcttcggcttacgggtcgttgggcggccccgcgccgccaccggctccgccgccacccccgccgccgccgcctcactccttcatcaaacaggagccgagctggggcggcgcggagccgcacgaggagcagtgcctgagcgccttcactgtccacttttccggccagttcactggcacagccggagcctgtcgctacgggcccttcggtcctcctccgcccagccaggcgtcatccggccaggccaggatgtttcctaacgcgccctacctgcccagctgcctcgagagccagcccgctattcgcaatcagggttacagcacggtcaccttcgacgggacgcccagctacggtcacacgccctcgcaccatgcggcgcagttccccaaccactcattcaagcatgaggatcccatgggccagcagggctcgctgggtgagcagcagtactcggtgccgcccccggtctatggctgccacacccccaccgacagctgcaccggcagccaggctttgctgctgaggacgccctacagcagtgacaatttataccaaatgacatcccagcttgaatgcatgacctggaatcagatgaacttaggagccaccttaaagggccacagcacagggtacgagagcgataaccacacaacgcccatcctctgcggagcccaatacagaatacacacgcacggtgtcttcagaggcattcaggatgtgcgacgtgtgcctggagtagccccgactcttgtacggtcggcatctgagaccagtgagaaacgccccttcatgtgtgcttacccaggctgcaataagagatattttaagctgtcccacttacagatgcacagcaggaagcacactggtgagaaaccataccagtgtgacttcaaggactgtgaacgaaggttttctcgttcagaccagctcaaaagacaccaaaggagacatacaggtgtgaaaccattccagtgtaaaacttgtcagcgaaagttctcccggtccgaccacctgaagacccacaccaggactcatacaggtaaaacaagtgaaaagcccttcagctgtcggtggccaagttgtcagaaaaagtttgcccggtcagatgaattagtccgccatcacaacatgcatcagagaaacatgaccaaactccagctggcgctttgaggggtctccctcggggaccgttcagtgtcccaggcagcacagtgtgtgaactgctttcaagtctgactctccactcctcctcactaaaaaggaaacttcagttgatcttcttcatccaacttccaagacaagataccggtgcttctggaaactaccaggtgtgcctggaagagttggtctctgccctgcctacttttagttgactcacaggccctggagaagcagctaacaatgtctggttagttaaaagcccattgccatttggtctggattttctactgtaagaagagccatagctgatcatgtccccctgacccttcccttctttttttatgctcgttttcgctggggatggaattattgtaccattttctatcatggaatatttataggccagggcatgtgtatgtgtctgctaatgtaaactttgtcatggtttccatttactaacagcaacagcaagaaataaatcagagagcaaggcatcgggggtgaatcttgtctaacattcccgaggtcagccaggctgctaacctggaaagcaggatgtagttctgccaggcaacttttaaagctcatgcatttcaagcagctgaagaaagaatcagaactaaccagtacctctgtatagaaatctaaaagaattttaccattcagttaattcaatgtgaacactggcacactgctcttaagaaactatgaagatctgagatttttttgtgtatgtttttgactcttttgagtggtaatcatatgtgtctttatagatgtacatacctccttgcacaaatggaggggaattcattttcatcactgggagtgtccttagtgtataaaaaccatgctggtatatggcttcaagttgtaaaaatgaaagtgactttaaaagaaaataggggatggtccaggatctccactgataagactgtttttaagtaacttaaggacctttgggtctacaagtatatgtgaaaaaaatgagacttactgggtgaggaaatccattgtttaaagatggtcgtgtgtgtgtgtgtgtgtgtgtgtgtgtgtgtgttgtgttgtgttttgttttttaagggagggaatttattatttaccgttgcttgaaattactgtgtaaatatatgtctgataatgatttgctctttgacaactaaaattaggactgtataagtactagatgcatcactgggtgttgatcttacaagatattgatgataacacttaaaattgtaacctgcatttttcactttgctctcaattaaagtctattcaaaaggaaaagcaa

SEQ ID NO: 286395 - DNA, 2488 bp, Homo sapiens
tccgcaggcgctttcaccactgcccctcccggggggacctgaaggagagggtttgaggccggtctttgcccgccgaggtctgcgtgtccggtctgggaggaggcctaggagggctcgcgggccacggcatccttgggcccgagttctggggtgcggacggacgtctcgagagtgggtgccgcgactcgggacccacggccctcgccgggcacggacagttgcggagcagggctctgaggattgtgcagtgccctgggtccctgcctactcctgggctcaggaatggagaagggttacagcacggtcaccttcgacgggacgcccagctacggtcacacgccctcgcaccatgcggcgcagttccccaaccactcattcaagcatgaggatcccatgggccagcagggctcgctgggtgagcagcagtactcggtgccgcccccggtctatggctgccacacccccaccgacagctgcaccggcagccaggctttgctgctgaggacgccctacagcagtgacaatttataccaaatgacatcccagcttgaatgcatgacctggaatcagatgaacttaggagccaccttaaagggagttgctgctgggagctccagctcagtgaaatggacagaagggcagagcaaccacagcacagggtacgagagcgataaccacacaacgcccatcctctgcggagcccaatacagaatacacacgcacggtgtcttcagaggcattcaggatgtgcgacgtgtgcctggagtagccccgactcttgtacggtcggcatctgagaccagtgagaaacgccccttcatgtgtgcttacccaggctgcaataagagatattttaagctgtcccacttacagatgcacagcaggaagcacactggtgagaaaccataccagtgtgacttcaaggactgtgaacgaaggttttctcgttcagaccagctcaaaagacaccaaaggagacatacaggtgtgaaaccattccagtgtaaaacttgtcagcgaaagttctcccggtccgaccacctgaagacccacaccaggactcatacaggtaaaacaagtgaaaagcccttcagctgtcggtggccaagttgtcagaaaaagtttgcccggtcagatgaattagtccgccatcacaacatgcatcagagaaacatgaccaaactccagctggcgctttgaggggtctccctcggggaccgttcagtgtcccaggcagcacagtgtgtgaactgctttcaagtctgactctccactcctcctcactaaaaaggaaacttcagttgatcttcttcatccaacttccaagacaagataccggtgcttctggaaactaccaggtgtgcctggaagagttggtctctgccctgcctacttttagttgactcacaggccctggagaagcagctaacaatgtctggttagttaaaagcccattgccatttggtctggattttctactgtaagaagagccatagctgatcatgtccccctgacccttcccttctttttttatgctcgttttcgctggggatggaattattgtaccattttctatcatggaatatttataggccagggcatgtgtatgtgtctgctaatgtaaactttgtcatggtttccatttactaacagcaacagcaagaaataaatcagagagcaaggcatcgggggtgaatcttgtctaacattcccgaggtcagccaggctgctaacctggaaagcaggatgtagttctgccaggcaacttttaaagctcatgcatttcaagcagctgaagaaagaatcagaactaaccagtacctctgtatagaaatctaaaagaattttaccattcagttaattcaatgtgaacactggcacactgctcttaagaaactatgaagatctgagatttttttgtgtatgtttttgactcttttgagtggtaatcatatgtgtctttatagatgtacatacctccttgcacaaatggaggggaattcattttcatcactgggagtgtccttagtgtataaaaaccatgctggtatatggcttcaagttgtaaaaatgaaagtgactttaaaagaaaataggggatggtccaggatctccactgataagactgtttttaagtaacttaaggacctttgggtctacaagtatatgtgaaaaaaatgagacttactgggtgaggaaatccattgtttaaagatggtcgtgtgtgtgtgtgtgtgtgtgtgtgtgtgtgtgttgtgttgtgttttgttttttaagggagggaatttattatttaccgttgcttgaaattactgtgtaaatatatgtctgataatgatttgctctttgacaactaaaattaggactgtataagtactagatgcatcactgggtgttgatcttacaagatattgatgataacacttaaaattgtaacctgcatttttcactttgctctcaattaaagtctattcaaaaggaaaagcaa

SEQ ID NO: 286396 - DNA, 1804 bp, Homo sapiens
atgggccatcatcatcatcatcatcatcatcatcacagcagcggccatatcgaaggtcgtgatgtgcgacgtgtgcctggagtagccccgactcttgtacggtcggcatctgagaccagtgagaaacgccccttcatgtgtgcttacccaggctgcaataagagatattttaagctgtcccacttacagatgcacagcaggaagcacactggtgagaaaccataccagtgtgacttcaaggactgtgaacgaaggttttctcgttcagaccagctcaaaagacaccaaaggagacatacaggtgtgaaaccattccagtgtaaaacttgtcagcgaaagttctcccggtccgaccacctgaagacccacaccaggactcatacaggtaaaacaagtgaaaagcccttcagctgtcggtggccaagttgtcagaaaaagtttgcccggtcagatgaattagtccgccatcacaacatgcatcagagaaacatgaccaaactccagctggcgctttgaggggtctccctcggggaccgttcagtgtcccaggcagcacagtgtgtgaactgctttcaagtctgactctccactcctcctcactaaaaaggaaacttcagttgatcttcttcatccaacttccaagacaagataccggtgcttctggaaactaccaggtgtgcctggaagagttggtctctgccctgcctacttttagttgactcacaggccctggagaagcagctaacaatgtctggttagttaaaagcccattgccatttggtctggattttctactgtaagaagagccatagctgatcatgtccccctgacccttcccttctttttttatgctcgttttcgctggggatggaattattgtaccattttctatcatggaatatttataggccagggcatgtgtatgtgtctgctaatgtaaactttgtcatggtttccatttactaacagcaacagcaagaaataaatcagagagcaaggcatcgggggtgaatcttgtctaacattcccgaggtcagccaggctgctaacctggaaagcaggatgtagttctgccaggcaacttttaaagctcatgcatttcaagcagctgaagaaagaatcagaactaaccagtacctctgtatagaaatctaaaagaattttaccattcagttaattcaatgtgaacactggcacactgctcttaagaaactatgaagatctgagatttttttgtgtatgtttttgactcttttgagtggtaatcatatgtgtctttatagatgtacatacctccttgcacaaatggaggggaattcattttcatcactgggagtgtccttagtgtataaaaaccatgctggtatatggcttcaagttgtaaaaatgaaagtgactttaaaagaaaataggggatggtccaggatctccactgataagactgtttttaagtaacttaaggacctttgggtctacaagtatatgtgaaaaaaatgagacttactgggtgaggaaatccattgtttaaagatggtcgtgtgtgtgtgtgtgtgtgtgtgtgtgtgtgtgttgtgttgtgttttgttttttaagggagggaatttattatttaccgttgcttgaaattactgtgtaaatatatgtctgataatgatttgctctttgacaactaaaattaggactgtataagtactagatgcatcactgggtgttgatcttacaagatattgatgataacacttaaaattgtaacctgcatttttcactttgctctcaattaaagtctattcaaaaggaaaagcaa

SEQ ID NO: 286397 - DNA, 2452 bp, Homo sapiens
tccgcaggcgctttcaccactgcccctcccggggggacctgaaggagagggtttgaggccggtctttgcccgccgaggtctgcgtgtccggtctgggaggaggcctaggagggctcgcgggccacggcatccttgggcccgagttctggggtgcggacggacgtctcgccgggcacggacagttgcggagcagggctctgaggattgtgcagtgccctgggtccctgcctactcctgggctcaggaatggagaagggttacagcacggtcaccttcgacgggacgcccagctacggtcacacgccctcgcaccatgcggcgcagttccccaaccactcattcaagcatgaggatcccatgggccagcagggctcgctgggtgagcagcagtactcggtgccgcccccggtctatggctgccacacccccaccgacagctgcaccggcagccaggctttgctgctgaggacgccctacagcagtgacaatttataccaaatgacatcccagcttgaatgcatgacctggaatcagatgaacttaggagccaccttaaagggagttgctgctgggagctccagctcagtgaaatggacagaagggcagagcaaccacagcacagggtacgagagcgataaccacacaacgcccatcctctgcggagcccaatacagaatacacacgcacggtgtcttcagaggcattcaggatgtgcgacgtgtgcctggagtagccccgactcttgtacggtcggcatctgagaccagtgagaaacgccccttcatgtgtgcttacccaggctgcaataagagatattttaagctgtcccacttacagatgcacagcaggaagcacactggtgagaaaccataccagtgtgacttcaaggactgtgaacgaaggttttctcgttcagaccagctcaaaagacaccaaaggagacatacaggtgtgaaaccattccagtgtaaaacttgtcagcgaaagttctcccggtccgaccacctgaagacccacaccaggactcatacaggtaaaacaagtgaaaagcccttcagctgtcggtggccaagttgtcagaaaaagtttgcccggtcagatgaattagtccgccatcacaacatgcatcagagaaacatgaccaaactccagctggcgctttgaggggtctccctcggggaccgttcagtgtcccaggcagcacagtgtgtgaactgctttcaagtctgactctccactcctcctcactaaaaaggaaacttcagttgatcttcttcatccaacttccaagacaagataccggtgcttctggaaactaccaggtgtgcctggaagagttggtctctgccctgcctacttttagttgactcacaggccctggagaagcagctaacaatgtctggttagttaaaagcccattgccatttggtctggattttctactgtaagaagagccatagctgatcatgtccccctgacccttcccttctttttttatgctcgttttcgctggggatggaattattgtaccattttctatcatggaatatttataggccagggcatgtgtatgtgtctgctaatgtaaactttgtcatggtttccatttactaacagcaacagcaagaaataaatcagagagcaaggcatcgggggtgaatcttgtctaacattcccgaggtcagccaggctgctaacctggaaagcaggatgtagttctgccaggcaacttttaaagctcatgcatttcaagcagctgaagaaagaatcagaactaaccagtacctctgtatagaaatctaaaagaattttaccattcagttaattcaatgtgaacactggcacactgctcttaagaaactatgaagatctgagatttttttgtgtatgtttttgactcttttgagtggtaatcatatgtgtctttatagatgtacatacctccttgcacaaatggaggggaattcattttcatcactgggagtgtccttagtgtataaaaaccatgctggtatatggcttcaagttgtaaaaatgaaagtgactttaaaagaaaataggggatggtccaggatctccactgataagactgtttttaagtaacttaaggacctttgggtctacaagtatatgtgaaaaaaatgagacttactgggtgaggaaatccattgtttaaagatggtcgtgtgtgtgtgtgtgtgtgtgtgtgtgtgtgtgttgtgttgtgttttgttttttaagggagggaatttattatttaccgttgcttgaaattactgtgtaaatatatgtctgataatgatttgctctttgacaactaaaattaggactgtataagtactagatgcatcactgggtgttgatcttacaagatattgatgataacacttaaaattgtaacctgcatttttcactttgctctcaattaaagtctattcaaaaggaaaagcaa

SEQ ID NO: 286398 - DNA, 354 bp, Homo sapiens
aatggcagagctagatgtgagccttggggcagaatcctctggcccctgagctcccattcatttgtaacttgcaagttggggatcatcctaccctaacaagctccagcgaagtgccttaggcattttgggatctgttcagtcctagtaggagaggttgcctttaatgagatccccttttccagtatcattttcaaatagaatatgtgtcttccccaaggtgagaaaccataccagtgtgacttcaaggactgtgaacgaaggttttctcgttcagaccagctcaaaagacaccaaaggagacatacaggtttgtaggttcacttctcattgctggcagctgtgttcccttgggct

SEQ ID NO: 286399 - DNA, 461 bp, Homo sapiens
ccttagattattcttggattttctacaatcacaatgcacttcctgccgtgcttgtgttgggaaatctgccagaacccacaggagggaaagtctaatgaaagcacgcgcctgctggaaaacgaaccgggcttttgaaaagagaggggctgcgtttgtgctgacacgagcaagagacctgtattgccttaacactcccagcaatgaccacctgcaagcttgcgctgcgactcccgtccgaagacatgcgggccagtatgagcggagaggttcccagcaccgtcacaagaccctgtgctattattttagactcacctgtggctgttgacaacaccacacacatgaaatgatgctcaccagaatcaaaatactcagctaaacaaagaattgtgttggtcatgaaattattaccaggagggataaaactccagggtgagccattaaagaatctgaattcaattcat

SEQ ID NO: 286400 - DNA, 378 bp, Homo sapiens
ccttagattattcttggattttctacaatcacaatgcacttcctgccgtgcttgtgttgggaaatctgccagaacccacaggagggaaagtctaatgaaagcacgcgcctgctggaaaacgaaccgggcttttgaaaagagaggggctgcgtttgtgctgacacgagcaagagacctgtattgccttaacactcccagcaatgaccacctgcaagcttgcgctgcgactcccgtccgaagacatgcgggccagtatgagcggagaggttcccagcaccgtcacaagaccctgtgctattattttagactcacctgtggctgttgacaacaccacacacatgaaatgatgctcaccagaatcaaaatactcagctaaac

SEQ ID NO: 286401 - DNA, 668 bp, Homo sapiens
agcaacagcagctccaaggtaagtgaagcaaaccattagttacaatgtatttactttttaaaaaagtctccgtggtgaaaacaaaatgtccttttgcttaatattagtgttctaagaacccagtgttgtcaggactttgaaaagtgcttgatgttttaattatattttttattgttgttaaagtagatgtcttgctgggttcagtggttcacgcctataatcatagccctttgggagtccaagacaggaggattgcttgaggacaggaggtcaacacaagctttggcaacgtagtgagacctcctctctataaaataaaaataaaaaattgctgagcatggtggcacacacctgtagtcctaactactgaggaagctaaggcaggagagtcacttgagcttaggagttggaggttgtagtgagctaagattgcaccactatactccagcctaggtgacagactgagaccttatctccaaaaaaaaaaaaaaaaaaaaaaaaaaaaatatgtatgaggagaaaaggaacaaaaaaaataataaaaaacaaagagtggaggaaagaggaaacaagataggaaagagaaaaagaaaaaaaaaggaaacacaagagaaaacaaggaagaaaaaaaagagaaagaaatacacaaaaaaaaacaacagaacagg

SEQ ID NO: 286402 - DNA, 481 bp, Homo sapiens
atacagtgagtgctgccaacatctggcatactagaattgatctactgggcactgcagcctagtggctaaaagtcctgccacttactaaccatgggaccttggacatgttcttcaactgctgtgtgttatgaggattaaatgatttaatccataaaaaatgcttgaagaatgccaacatgcacaatgttgctccaacagccaagttatgatcttggaagagtttgctgtccagtgacttcctgatggcattcaaggttggcatagaacgctacctggcccatgggttactcgccatctaaaaccaaaaatcaggacatatttatatcttattgctatgtccaaaggttgatttttcttcacttggtgagcatcttctgtttggcatttccacatgtaataagttaagaactgatttgagaagatatccaaaaaatgcaattgtataaatccaaataaaaaatttaaataatcatcccaaaaa

SEQ ID NO: 286403 - DNA, 693 bp, Homo sapiens
atacagtgagtgctgccaacatctggcatactagaattgatctactgggcactgcagcctagtggctaaaagtcctgccacttactaaccatgggaccttggacatgttcttcaactgctgtgtgttatgaggattaaatgatttaatccataaaaaatgcttgaagaatgccaacatgcacaatgttgctccaacagccaagttatgatcttggaagagtttgctgtccagtgacttcctgatggcattcaaggttggcatagaacgctacctggcccatgggttactcgccatctaaaaccaaaaatcaggacatatttatatcttattgctatgtccaaaggttgatttttcttcacttgcctctcttgaaggtagttgtggcaataaagtgtagtctccatgaaagggatgtgagcagaagtcatgtgtgccacttctggttcatcaactcaaaggcaaaggtactttttgaggacttccagcaccctcttccaacagactggaagatggatgtggatatgaaacgacttcaaccacacagaccaggacatcagtctaggggctggcagaggtgagcatcttctgtttggcatttccacatgtaataagttaagaactgatttgagaagatatccaaaaaatgcaattgtataaatccaaataaaaaatttaaataatcatcccaaaaa

SEQ ID NO: 286404 - DNA, 2019 bp, Homo sapiens
cgccctgcgcgctcgggctggctcggcggctgcggcgggcgggcaggcgggcaggccggcaggcgggtgcgcggagggctggtgccccgcagcaggtgggcggggtgcggttggcggcggcggctgggccgggggctgccggctgcgctcgggccgtgcgcggcggccgtgcgggcacgccatggacttcaacatgaagaagctggcgtcggacgcgggcatcttcttcacccgggcggtgcagttcacggaggagaaatttggccaggctgagaagactgagcttgatgcccactttgaaaaccttctggcccgggcagacagcaccaagaactggacagagaagatcttgaggcagacagaggtgctgctgcagcccaaccccagtgcccgagtggaggagttcctgtatgagaagctggacaggaaggtcccctcaagggtcaccaacggggagctgctggctcagtacatggcagacgcggccagtgagctggggccgaccaccccctatgggaagacactgatcaaggtggcagaagctgaaaagcaactgggagccgcggagagggattttatccacacggcctccatcagcttcctcacacccttgcgcaacttcctggagggggactggaagaccatctcgaaggagaggcggctcctccaaaaccggcgtctggacttggatgcctgcaaagcgaggctgaagaaggccaaggctgcagaagccaaagccacgacggtgcctgactttcaggagactagacctcgtaattacattctctcggccagcgcctccgcgctctggaatgatgaagtggacaaggccgagcaggagctccgcgtggcccagacagagtttgaccggcaagcagaagtgacccgtctcttgctggagggaatcagtagcactcacgtgaaccacctgcgctgcctccacgagttcgtcaagtctcagacaacctactacgcacagtgctaccgccacatgctggacttgcagaagcagctgggcagatttcccggcaccttcgtgggcaccacagagcccgcctccccacccctgagcagcacctcacccaccactgctgcggccactatgcctgtggtgccctctgtggccagcctggcccctccgggggaggcctcgctctgcctggaagaggtggccccccctgccagtgggacccgcaaagctcgggtgctctatgactacgaggcagccgacagcagtgagctggccctgctggctgatgagctcatcactgtctacagcctgcctggcatggaccctgactggctcattggcgagagaggcaacaagaagggcaaggtccctgtcacctacttggaactgctcagctaggcaggtgcccccatcccccccgcattctggcctaggcaggagaggatgggcgcagccctgccacttaacttgtttgttggtgacacagttgttcagagtggggagaattcaccccattctgtccctgcccctagtcacctagctgtgagggtgcctgaggctgaatggctccacccctcccccagccctgcttctgacctgtggctctggagcccctgcccctgcctgcatccccgagcaccccaccctccaggctccactaaggagggaggggctgtctgcagcagctgcactcagcacctaggccagggtggggccgccgcagatgggctcaggaagccccaggtgcactcagcgagagccctgcctttcagttgccaaaagctgcatcaggggaatgcggcaaggcacacagggctctggcagcccctggggactgggcgctgcccctgggaggggagagcctggccagggctggtgttgggcccggagcagcatcttccggtgctatcctcccctcccacccctcacagctcaagccaagtccagcggccgcagtcttcacctctccacactcactttttatctggtgtttttacttctgcctgcgtttgctctctagccaataaaccgtccttgtgtgcgagtca

SEQ ID NO: 286405 - DNA, 737 bp, Homo sapiens
  misc_feature (554)..(554): n is a, c, g, or t
  misc_feature (558)..(558): n is a, c, g, or t
  misc_feature (562)..(562): n is a, c, g, or t
tggcacgagggagcatttagccttctggaagaacccctgcctggggtgggactgtgcacgccagacaaggtggcatgggcctgaacccacctggactgacttctgcactgaagccacaaatggagggtaggctggtgggtgggggagttcacggaggagaaatttggccaggctgagaagactgagcttgatgcccactttgaaaaccttctggcccgggcagacagcaccaagaactggacagagaagatcttgaggcagacagaggtgctgctgcagcccaaccccagtgcccgagtggaggagttcctgtatgagaagctggacaggaaggtcccctcaagggtcaccaacggggagctgctggctcagtacatggcagacgcggccagtgagctggggccgaccaccccctatgggaagacactgatcaaggtggcagaagctgaaaagcaactgggagccgcggagagggattttatccacacggcctccatcagcttcctcacacccttgcgcaacttcctggagggggactggaagaccatctcgangganaggnggttcctccaaaacccgcctttggacttggtttcctgtcaaaggggctctaaaagggcccagggtttaaaaccccaaccccccttttgaatatgaatagggacagggggaaaaggattttctgtggccccaacatgtttgccccccgccaaaaaaaagccccctttttgggtggg

SEQ ID NO: 286406 - DNA, 793 bp, Homo sapiens
cgccctgcgcgctcgggctggctcggcggctgcggcgggcgggcaggcgggcaggccggcaggcgggtgcgcggagggctggtgccccgcagcaggtgggcggggtgcggttggcggcggcggctgggccgggggctgccggctgcgctcgggccgtgcgcggcggccgtgcgggcacgccatggacttcaacatgaagaagctggcgtcggacgcgggcatcttcttcacccgggcggtgcagttcacggaggagaaatttggccaggctgagaagactgagcttgatgcccactttgaaaaccttctggcccgggcagacagcaccaagaactggacagagaagatcttgaggcagacagaggtgctgctgcagcccaaccccagtgcccgagtggaggagttcctgtatgagaagctggacaggaaggtcccctcaagggtcaccaacggggagctgctggctcagtacatggcagacgcggccagtgagctggggccgaccaccccctatgatggagtctcactctgtcacccaggctggagtgcagtggcacaatctcgactcactgcaagctcctcctcccgggttcatgccattctcctgcctcagcctcccgagtagctggactacaggcgcctgccaccacgctcggctaattttttgtatttttagtagagatgaggtttcaccatcttggccaggctggtcttgaactcctgacctcgtgatccacccgcctcggcctcccaaagtgctgggattacaggcatagccactgtgcctggcctc

SEQ ID NO: 286407 - DNA, 3081 bp, Homo sapiens
  misc_feature (2854)..(2854): n is a, c, g, or t
  misc_feature (2892)..(2892): n is a, c, g, or t
cgccctgcgcgctcgggctggctcggcggctgcggcgggcgggcaggcgggcaggccggcaggcgggtgcgcggagggctggtgccccgcagcaggtgggcggggtgcggttggcggcggcggctgggccgggggctgccggctgcgctcgggccgtgcgcggcggccgtgcgggcacgccatggacttcaacatgaagaagctggcgtcggacgcgggcatcttcttcacccgggcggtgcagttcacggaggagaaatttggccaggctgagaagactgagcttgatgcccactttgaaaaccttctggcccgggcagacagcaccaagaactggacagagaagatcttgaggcagacagaggtgctgctgcagcccaaccccagtgcccgagtggaggagttcctgtatgagaagctggacaggaaggtcccctcaagggtcaccaacggggagctgctggctcagtacatggcagacgcggccagtgagctggggccgaccaccccctatgggaagacactgatcaaggtggcagaagctgaaaagcaactgggagccgcggagagggattttatccacacggcctccatcagcttcctcacacccttgcgcaacttcctggagggggactggaagaccatctcgaaggagaggcggctcctccaaaaccggcgtctggacttggatgcctgcaaagcgaggctgaagaaggccaaggctgcagaagccaaagccacgacggtgcctgactttcaggagactagacctcgtaattacattctctcggccagcgcctccgcgctctggaatgatgaagtggacaaggccgagcaggagctccgcgtggcccagacagagtttgaccggcaagcagaagtgacccgtctcttgctggagggaatcagtagcactcacgtgaaccacctgcgctgcctccacgagttcgtcaagtctcagacaacctactacgcacagtgctaccgccacatgctggacttgcagaagcagctgggcagatttcccggcaccttcgtgggcaccacagagcccgcctccccacccctgagcagcacctcacccaccactgctgcggccactatgcctgtggtgccctctgtggccagcctggcccctccgggggaggcctcgctctgcctggaagaggtggccccccctgccagtgggacccgcaaagctcgggtgctctatgactacgaggcagccgacagcagtgagctggccctgctggctgatgagctcatcactgtctacagcctgcctggcatggaccctgactggctcattggcgagagaggcaacaagaagggcaaggtccctgtcacctacttggaactgctcagctaggcaggtgcccccatcccccccgcattctggcctaggcaggagaggatgggcgcagccctgccacttaacttgtttgttggtgacacagttgttcagagtggggagaattcaccccattctgtccctgcccctagtcacctagctgtgagggtgcctgaggctgaatggctccacccctcccccagccctgcttctgacctgtggctctggagcccctgcccctgcctgcatccccgagcaccccaccctccaggctccactaaggagggaggggctgtctgcagcagctgcactcagcacctaggccagggtggggccgccgcagatgggctcaggaagccccaggtgcactcagcgagagccctgcctttcagttgccaaaagctgcatcaggggaatgcggcaaggcacacagggctctggcagcccctggggactgggcgctgcccctgggaggggagagcctggccagggctggtgttgggcccggagcagcatcttccggtgctatcctcccctcccacccctcacagctcaagccaagtccagcggccgcagtcttcacctctccacactcactttttatctggtgtttttacttctgcctgcgtttgctctctagccaataaaccgtccttgtgtgcgagtcacctgggctcctgtcagggcctggccctgagggtggtaaagggaaaggtagactcaccctctgccccactcttccacagagtgagcaggggccctgtggctgccccggcccccagctctctagttgggaagaagtgcagccctccctgtcttctgcggggcctgtgcctctcagagggcagtgctgttcctggacatgaagccgcacaaggaacgttttattcctaagaaaaagtttcctaaatttggattgtggagcggactgtagaatgcgtctgacagttcagttcaagcacaagaagtgggtagcggtcagtgctgtctgcaggtcgggcgtttcacccagcatgtgcccccgtgccatgggttctcatgccgtcctcagtgtccacatttcacagatgagatcagcaagacagtcagctcctcaagggaccacagttggcaagtggccaagcagggactgaagcccaggcagcctgattctagaaaccctaagtgatgtctgtgttttagatggcccctagcaggacctagcattctgacttcagtcctgagaaggccaacagccagtaggccccactgttggggcttctgaagaggggatcgggggatgacgggggcacggggctataaataggaaggcacagagcttcaagaaaggctcacccagggatgagctcagcccactgggccaatgaaagcctggccagggctggtgttgggcccggagcagcatcttccggtgctatcctcccctcccacccctcacagctcaagccaagtccagcggccgcagtcttcacctctccacactcactttttatctggtgtttntacttctgcctgcgtttgctctctagccaataaaccgnccttgtgtgcgacagaaaaaaaaagcaaaaaaaaatgggccacactgacaaacaagaaacctccagggggggcccggtccccaattggccctttgggggggccgtttacaattaaaatggcggcggttttaaaccgccgtaactggaaaaaccctggctttccccaacttattcgcctggcagaacatc

SEQ ID NO: 286408 - DNA, 1968 bp, Homo sapiens
cgccctgcgcgctcgggctggctcggcggctgcggcgggcgggcaggcgggcaggccggcaggcgggtgcgcggagggctggtgccccgcagcaggtgggcggggtgcggttggcggcggcgggcacgccatggacttcaacatgaagaagctggcgtcggacgcgggcatcttcttcacccgggcggtgcagttcacggaggagaaatttggccaggctgagaagactgagcttgatgcccactttgaaaaccttctggcccgggcagacagcaccaagaactggacagagaagatcttgaggcagacagaggtgctgctgcagcccaaccccagtgcccgagtggaggagttcctgtatgagaagctggacaggaaggtcccctcaagggtcaccaacggggagctgctggctcagtacatggcagacgcggccagtgagctggggccgaccaccccctatgggaagacactgatcaaggtggcagaagctgaaaagcaactgggagccgcggagagggattttatccacacggcctccatcagcttcctcacacccttgcgcaacttcctggagggggactggaagaccatctcgaaggagaggcggctcctccaaaaccggcgtctggacttggatgcctgcaaagcgaggctgaagaaggccaaggctgcagaagccaaagccacgacggtgcctgactttcaggagactagacctcgtaattacattctctcggccagcgcctccgcgctctggaatgatgaagtggacaaggccgagcaggagctccgcgtggcccagacagagtttgaccggcaagcagaagtgacccgtctcttgctggagggaatcagtagcactcacgtgaaccacctgcgctgcctccacgagttcgtcaagtctcagacaacctactacgcacagtgctaccgccacatgctggacttgcagaagcagctgggcagatttcccggcaccttcgtgggcaccacagagcccgcctccccacccctgagcagcacctcacccaccactgctgcggccactatgcctgtggtgccctctgtggccagcctggcccctccgggggaggcctcgctctgcctggaagaggtggccccccctgccagtgggacccgcaaagctcgggtgctctatgactacgaggcagccgacagcagtgagctggccctgctggctgatgagctcatcactgtctacagcctgcctggcatggaccctgactggctcattggcgagagaggcaacaagaagggcaaggtccctgtcacctacttggaactgctcagctaggcaggtgcccccatcccccccgcattctggcctaggcaggagaggatgggcgcagccctgccacttaacttgtttgttggtgacacagttgttcagagtggggagaattcaccccattctgtccctgcccctagtcacctagctgtgagggtgcctgaggctgaatggctccacccctcccccagccctgcttctgacctgtggctctggagcccctgcccctgcctgcatccccgagcaccccaccctccaggctccactaaggagggaggggctgtctgcagcagctgcactcagcacctaggccagggtggggccgccgcagatgggctcaggaagccccaggtgcactcagcgagagccctgcctttcagttgccaaaagctgcatcaggggaatgcggcaaggcacacagggctctggcagcccctggggactgggcgctgcccctgggaggggagagcctggccagggctggtgttgggcccggagcagcatcttccggtgctatcctcccctcccacccctcacagctcaagccaagtccagcggccgcagtcttcacctctccacactcactttttatctggtgtttttacttctgcctgcgtttgctctctagccaataaaccgtccttgtgtgcgagtca

SEQ ID NO: 286409 - DNA, 3851 bp, Homo sapiens
  misc_feature (3624)..(3624): n is a, c, g, or t
  misc_feature (3662)..(3662): n is a, c, g, or t
tcgacttcgaggaggagtcaccccagcagcaggccccacgtcaagcccagcacacactcagtcacatcacacacatctcaccactgtcccacaccactgcctctgactgcacaggagctagaagccagcttgggtaaggcgggggcactgccatgtgatcaggtcagtcctgagacactggggagggcagcagcccccacctctgtccacagcctgccccggtgccctgtggccatggagctggacttgtttccctctgcaaaacgctggagctggcggcagggccagccacactgagtagtgtggagaactcagggcggcagctgtcccatccccagggcccctccacctcctgctgtctctgaatgccaggccctggggaggccctgaggatagaggaggaggcctggccgtgcctttctggagttcacagacccctaaagacaggaggcagggatggcgtcgtaggcctggagagcgcctggggggcgggagggcctgaggctgtgcttaaggcccagaggtcctggagcagggcatgtcttgtcctgaggcttaggcagggcccccaggggagttggggcaggaggtggggaggacaggatcgtggaggcttcgcatgtcatggtgtctgttggtttttaggctttcttgggaagtctggtgtttcctatgtagtttggggactaggccacacctctccctcatgcttgtcaccactgctacaccttgtctgcccactttctctccttcccgcccctggaggtgagaccctcacctctctcgtgagcatgctgcctcatgtcttccgtgccgtcgttctgtggctgggtgactgtccctcaggccgccaaccctagttggctctcacagcaacttccagtgctcctggacggggacttcctaagcagcatgggggccacacgggccggccacgcacactggcctgggtccgcattccctatttcaggctgttgtctcgggtcagatctccggaagcggcaggagcgctgggtctcctggtcgtggccgggcagcgtctttcttcttcagggtctggatgccacttcccgcctcctccctgtgcccagtggaaggagaaacatcctagagggtggagactgccctgtttttcttttgccattgagtcccagtgtgactcaagcacgaggccacctttctctgccagaggacagaaagcttcagtgactggcccagggtcacacagttctgccgcccagcccagcagcctgagccagcagtcaggatggggtggggacactccgtctctcttgagaccccactcagagaatggggctgacactgtaggagaaatataagcaggactcctgctggctgctcccctcctgcatgaggcatgttagagggactgggaccgccagcccccagctcccatgccgggcctcggcccagtctcagctcctgtttgggagggggggcagaggggcaggggggcagaagttgagtctgggagctggggcagggcacaggctctagggtccagctgtcctcctctcccctcccctgctggccactcctgctgccgtctccacactctggaatgatgaagtggacaaggccgagcaggagctccgcgtggcccagacagagtttgaccggcaagcagaagtgacccgtctcttgctggagggaatcagtagcactcacgtgaaccacctgcgctgcctccacgagttcgtcaagtctcagacaacctactacgcacagtgctaccgccacatgctggacttgcagaagcagctgggcagatttcccggcaccttcgtgggcaccacagagcccgcctccccacccctgagcagcacctcacccaccactgctgcggccactatgcctgtggtgccctctgtggccagcctggcccctccgggggaggcctcgctctgcctggaagaggtggccccccctgccagtgggacccgcaaagctcgggtgctctatgactacgaggcagccgacagcagtgagctggccctgctggctgatgagctcatcactgtctacagcctgcctggcatggaccctgactggctcattggcgagagaggcaacaagaagggcaaggtccctgtcacctacttggaactgctcagctaggcaggtgcccccatcccccccgcattctggcctaggcaggagaggatgggcgcagccctgccacttaacttgtttgttggtgacacagttgttcagagtggggagaattcaccccattctgtccctgcccctagtcacctagctgtgagggtgcctgaggctgaatggctccacccctcccccagccctgcttctgacctgtggctctggagcccctgcccctgcctgcatccccgagcaccccaccctccaggctccactaaggagggaggggctgtctgcagcagctgcactcagcacctaggccagggtggggccgccgcagatgggctcaggaagccccaggtgcactcagcgagagccctgcctttcagttgccaaaagctgcatcaggggaatgcggcaaggcacacagggctctggcagcccctggggactgggcgctgcccctgggaggggagagcctggccagggctggtgttgggcccggagcagcatcttccggtgctatcctcccctcccacccctcacagctcaagccaagtccagcggccgcagtcttcacctctccacactcactttttatctggtgtttttacttctgcctgcgtttgctctctagccaataaaccgtccttgtgtgcgagtcacctgggctcctgtcagggcctggccctgagggtggtaaagggaaaggtagactcaccctctgccccactcttccacagagtgagcaggggccctgtggctgccccggcccccagctctctagttgggaagaagtgcagccctccctgtcttctgcggggcctgtgcctctcagagggcagtgctgttcctggacatgaagccgcacaaggaacgttttattcctaagaaaaagtttcctaaatttggattgtggagcggactgtagaatgcgtctgacagttcagttcaagcacaagaagtgggtagcggtcagtgctgtctgcaggtcgggcgtttcacccagcatgtgcccccgtgccatgggttctcatgccgtcctcagtgtccacatttcacagatgagatcagcaagacagtcagctcctcaagggaccacagttggcaagtggccaagcagggactgaagcccaggcagcctgattctagaaaccctaagtgatgtctgtgttttagatggcccctagcaggacctagcattctgacttcagtcctgagaaggccaacagccagtaggccccactgttggggcttctgaagaggggatcgggggatgacgggggcacggggctataaataggaaggcacagagcttcaagaaaggctcacccagggatgagctcagcccactgggccaatgaaagcctggccagggctggtgttgggcccggagcagcatcttccggtgctatcctcccctcccacccctcacagctcaagccaagtccagcggccgcagtcttcacctctccacactcactttttatctggtgtttntacttctgcctgcgtttgctctctagccaataaaccgnccttgtgtgcgacagaaaaaaaaagcaaaaaaaaatgggccacactgacaaacaagaaacctccagggggggcccggtccccaattggccctttgggggggccgtttacaattaaaatggcggcggttttaaaccgccgtaactggaaaaaccctggctttccccaacttattcgcctggcagaacatc

SEQ ID NO: 286410 - DNA, 2144 bp, Homo sapiens
cgccctgcgcgctcgggctggctcggcggctgcggcgggcgggcaggcgggcaggccggcaggcgggtgcgcggagggctggtgccccgcagcaggtgggcggggtgcggttggcggcggcggctgggccgggggctgccggctgcgctcgggccgtgcgcggcggccgtgcgggcacgccatggacttcaacatgaagaagctggcgtcggacgcgggcatcttcttcacccgggcggtgcagttcacggaggagaaatttggccaggctgagaagactgagcttgatgcccactttgaaaaccttctggcccgggcagacagcaccaagaactggacagagaagatcttgaggcagacagaggtgctgctgcagcccaaccccagtgcccgagtggaggagttcctgtatgagaagctggacaggaaggtcccctcaagggtcaccaacggggagctgctggctcagtacatggcagacgcggccagtgagctggggccgaccaccccctatgacaggatcttgctgtgtcacccagactggagtgcagtggtgcaatcatagcttactactatagcctcaaactcctgggttcaaatgatccttccgcctgggcctcccagagtattgggattacagggaagacactgatcaaggtggcagaagctgaaaagcaactgggagccgcggagagggattttatccacacggcctccatcagcttcctcacacccttgcgcaacttcctggagggggactggaagaccatctcgaaggagaggcggctcctccaaaaccggcgtctggacttggatgcctgcaaagcgaggctgaagaaggccaaggctgcagaagccaaagccacgacggtgcctgactttcaggagactagacctcgtaattacattctctcggccagcgcctccgcgctctggaatgatgaagtggacaaggccgagcaggagctccgcgtggcccagacagagtttgaccggcaagcagaagtgacccgtctcttgctggagggaatcagtagcactcacgtgaaccacctgcgctgcctccacgagttcgtcaagtctcagacaacctactacgcacagtgctaccgccacatgctggacttgcagaagcagctgggcagatttcccggcaccttcgtgggcaccacagagcccgcctccccacccctgagcagcacctcacccaccactgctgcggccactatgcctgtggtgccctctgtggccagcctggcccctccgggggaggcctcgctctgcctggaagaggtggccccccctgccagtgggacccgcaaagctcgggtgctctatgactacgaggcagccgacagcagtgagctggccctgctggctgatgagctcatcactgtctacagcctgcctggcatggaccctgactggctcattggcgagagaggcaacaagaagggcaaggtccctgtcacctacttggaactgctcagctaggcaggtgcccccatcccccccgcattctggcctaggcaggagaggatgggcgcagccctgccacttaacttgtttgttggtgacacagttgttcagagtggggagaattcaccccattctgtccctgcccctagtcacctagctgtgagggtgcctgaggctgaatggctccacccctcccccagccctgcttctgacctgtggctctggagcccctgcccctgcctgcatccccgagcaccccaccctccaggctccactaaggagggaggggctgtctgcagcagctgcactcagcacctaggccagggtggggccgccgcagatgggctcaggaagccccaggtgcactcagcgagagccctgcctttcagttgccaaaagctgcatcaggggaatgcggcaaggcacacagggctctggcagcccctggggactgggcgctgcccctgggaggggagagcctggccagggctggtgttgggcccggagcagcatcttccggtgctatcctcccctcccacccctcacagctcaagccaagtccagcggccgcagtcttcacctctccacactcactttttatctggtgtttttacttctgcctgcgtttgctctctagccaataaaccgtccttgtgtgcgagtca

SEQ ID NO: 286411 - DNA, 1748 bp, Homo sapiens
cgccctgcgcgctcgggctggctcggcggctgcggcgggcgggcaggcgggcaggccggcaggcgggtgcgcggagggctggtgccccgcagcaggtgggcggggtgcggttggcggcggcggctgggccgggggctgccggctgcgctcgggccgtgcgcggcggccgtgcgggcacgccatggacttcaacatgaagaagctggcgtcggacgcgggcatcttcttcacccgggcggtgcagggaagacactgatcaaggtggcagaagctgaaaagcaactgggagccgcggagagggattttatccacacggcctccatcagcttcctcacacccttgcgcaacttcctggagggggactggaagaccatctcgaaggagaggcggctcctccaaaaccggcgtctggacttggatgcctgcaaagcgaggctgaagaaggccaaggctgcagaagccaaagccacgacggtgcctgactttcaggagactagacctcgtaattacattctctcggccagcgcctccgcgctctggaatgatgaagtggacaaggccgagcaggagctccgcgtggcccagacagagtttgaccggcaagcagaagtgacccgtctcttgctggagggaatcagtagcactcacgtgaaccacctgcgctgcctccacgagttcgtcaagtctcagacaacctactacgcacagtgctaccgccacatgctggacttgcagaagcagctgggcagatttcccggcaccttcgtgggcaccacagagcccgcctccccacccctgagcagcacctcacccaccactgctgcggccactatgcctgtggtgccctctgtggccagcctggcccctccgggggaggcctcgctctgcctggaagaggtggccccccctgccagtgggacccgcaaagctcgggtgctctatgactacgaggcagccgacagcagtgagctggccctgctggctgatgagctcatcactgtctacagcctgcctggcatggaccctgactggctcattggcgagagaggcaacaagaagggcaaggtccctgtcacctacttggaactgctcagctaggcaggtgcccccatcccccccgcattctggcctaggcaggagaggatgggcgcagccctgccacttaacttgtttgttggtgacacagttgttcagagtggggagaattcaccccattctgtccctgcccctagtcacctagctgtgagggtgcctgaggctgaatggctccacccctcccccagccctgcttctgacctgtggctctggagcccctgcccctgcctgcatccccgagcaccccaccctccaggctccactaaggagggaggggctgtctgcagcagctgcactcagcacctaggccagggtggggccgccgcagatgggctcaggaagccccaggtgcactcagcgagagccctgcctttcagttgccaaaagctgcatcaggggaatgcggcaaggcacacagggctctggcagcccctggggactgggcgctgcccctgggaggggagagcctggccagggctggtgttgggcccggagcagcatcttccggtgctatcctcccctcccacccctcacagctcaagccaagtccagcggccgcagtcttcacctctccacactcactttttatctggtgtttttacttctgcctgcgtttgctctctagccaataaaccgtccttgtgtgcgagtca

SEQ ID NO: 286412 - DNA, 1956 bp, Homo sapiens
cgccctgcgcgctcgggctggctcggcggctgcggcgggcgggcaggcgggcaggccggcaggcgggtgcgcggagggctggtgccccgcagcaggtgggcggggtgcggttggcggcggcggctgggccgggggctgccggctgcgctcgggccgtgcgcggcggccgtgcgggcacgccatggacttcaacatgaagaagctggcgtcggacgcgggcatcttcttcacccgggcggtgcagttcacggaggagaaatttggccaggctgagaagactgagcttgatgcccactttgaaaaccttctggcccgggcagacagcaccaagaactggacagagaagatcttgaggcagacagaggtgctgctgcagcccaaccccagtgcccgagtggaggagttcctgtatgagaagctggacaggaaggtcccctcaagggtcaccaacggggagctgctggctcagtacatggcagacgcggccagtgagctggggccgaccaccccctatgggaagacactgatcaaggtggcagaagctgaaaagcaactgggagccgcggagagggattttatccacacggcctccatcagcttcctcacacccttgcgcaacttcctggagggggactggaagaccatctcgaaggagaggcggctcctccaaaaccggcgtctggacttggatgcctgcaaagcgaggctgaagaaggccaaggctgcagaagccaaagccacgctctggaatgatgaagtggacaaggccgagcaggagctccgcgtggcccagacagagtttgaccggcaagcagaagtgacccgtctcttgctggagggaatcagtagcactcacgtgaaccacctgcgctgcctccacgagttcgtcaagtctcagacaacctactacgcacagtgctaccgccacatgctggacttgcagaagcagctgggcagatttcccggcaccttcgtgggcaccacagagcccgcctccccacccctgagcagcacctcacccaccactgctgcggccactatgcctgtggtgccctctgtggccagcctggcccctccgggggaggcctcgctctgcctggaagaggtggccccccctgccagtgggacccgcaaagctcgggtgctctatgactacgaggcagccgacagcagtgagctggccctgctggctgatgagctcatcactgtctacagcctgcctggcatggaccctgactggctcattggcgagagaggcaacaagaagggcaaggtccctgtcacctacttggaactgctcagctaggcaggtgcccccatcccccccgcattctggcctaggcaggagaggatgggcgcagccctgccacttaacttgtttgttggtgacacagttgttcagagtggggagaattcaccccattctgtccctgcccctagtcacctagctgtgagggtgcctgaggctgaatggctccacccctcccccagccctgcttctgacctgtggctctggagcccctgcccctgcctgcatccccgagcaccccaccctccaggctccactaaggagggaggggctgtctgcagcagctgcactcagcacctaggccagggtggggccgccgcagatgggctcaggaagccccaggtgcactcagcgagagccctgcctttcagttgccaaaagctgcatcaggggaatgcggcaaggcacacagggctctggcagcccctggggactgggcgctgcccctgggaggggagagcctggccagggctggtgttgggcccggagcagcatcttccggtgctatcctcccctcccacccctcacagctcaagccaagtccagcggccgcagtcttcacctctccacactcactttttatctggtgtttttacttctgcctgcgtttgctctctagccaataaaccgtccttgtgtgcgagtca

SEQ ID NO: 286413 - DNA, 2419 bp, Homo sapiens
cgccctgcgcgctcgggctggctcggcggctgcggcgggcgggcaggcgggcaggccggcaggcgggtgcgcggagggctggtgccccgcagcaggtgggcggggtgcggttggcggcggcggctgggccgggggctgccggctgcgctcgggccgtgcgcggcggccgtgcgggcacgccatggacttcaacatgaagaagctggcgtcggacgcgggcatcttcttcacccgggcggtgcagttcacggaggagaaatttggccaggctgagaagactgagcttgatgcccactttgaaaaccttctggcccgggcagacagcaccaagaactggacagagaagatcttgaggcagacagaggtgctgctgcagcccaaccccagtgcccgagtggaggagttcctgtatgagaagctggacaggaaggtcccctcaagggtcaccaacggggagctgctggctcagtacatggcagacgcggccagtgagctggggccgaccaccccctatgggaagacactgatcaaggtggcagaagctgaaaagcaactgggagccgcggagagggattttatccacacggcctccatcagcttcctcacacccttgcgcaacttcctggagggggactggaagaccatctcgaaggagaggcggctcctccaaaaccggcgtctggacttggatgcctgcaaagcgaggctgaagaaggccaaggctgcagaagccaaagccacgacggtgcctgactttcaggagactagacctcgtaattacattctctcggccagcgcctccgcgctctggaatgatgaagtggacaaggccgagcaggagctccgcgtggcccagacagagtttgaccggcaagcagaagtgacccgtctcttgctggagggaatcagtagcactcacgtgaaccacctgcgctgcctccacgagttcgtcaagtctcagacaacctactacgcacagtgctaccgccacatgctggacttgcagaagcagctgggcaggcggggccagcactgctgaacccactggggccccctggctcccataccctgtccgtgggcagcatgagctcctctgggcaagtcctatttcccggcaccttcgtgggcaccacagagcccgcctccccacccctgagcagcacctcacccaccactgctgcggccactatgcctgtggtgccctctgtggccagcctggcccctccgggggaggcctcgctctgcctggaagaggtggccccccctgccagtgggacccgcaaagctcgggtgctctatgactacgaggcagccgacagcagtgagctggccctgctggctgatgaggtgggcccggtgccgcaaggtggggcaggaatgggctgggtgaggagcagcctgggcactgggatcaggcacatggggcctggaggggccctgttggcaaagtggggaccagcaggttaaagagggcatatccagctctgaggaaaggatccttgctctgctgggtctctggagcaagtgagatgagcgccagccactgaaggtgtagcacatgccacgggccatggggaggtggcagctctgtccccacttagtcctggggccagttccacccttggccaggccatgaccgtcctctactgccatctctgcagctcatcactgtctacagcctgcctggcatggaccctgactggctcattggcgagagaggcaacaagaagggcaaggtccctgtcacctacttggaactgctcagctaggcaggtgcccccatcccccccgcattctggcctaggcaggagaggatgggcgcagccctgccacttaacttgtttgttggtgacacagttgttcagagtggggagaattcaccccattctgtccctgcccctagtcacctagctgtgagggtgcctgaggctgaatggctccacccctcccccagccctgcttctgacctgtggctctggagcccctgcccctgcctgcatccccgagcaccccaccctccaggctccactaaggagggaggggctgtctgcagcagctgcactcagcacctaggccagggtggggccgccgcagatgggctcaggaagccccaggtgcactcagcgagagccctgcctttcagttgccaaaagctgcatcaggggaatgcggcaaggcacacagggctctggcagcccctggggactgggcgctgcccctgggaggggagagcctggccagggctggtgttgggcccggagcagcatcttccggtgctatcctcccctcccacccctcacagctcaagccaagtccagcggccgcagtcttcacctctccacactcactttttatctggtgtttttacttctgcctgcgtttgctctctagccaataaaccgtccttgtgtgcgagtca

SEQ ID NO: 286414 - DNA, 2755 bp, Homo sapiens
tcgacttcgaggaggagtcaccccagcagcaggccccacgtcaagcccagcacacactcagtcacatcacacacatctcaccactgtcccacaccactgcctctgactgcacaggagctagaagccagcttgggtaaggcgggggcactgccatgtgatcaggtcagtcctgagacactggggagggcagcagcccccacctctgtccacagcctgccccggtgccctgtggccatggagctggacttgtttccctctgcaaaacgctggagctggcggcagggccagccacactgagtagtgtggagaactcagggcggcagctgtcccatccccagggcccctccacctcctgctgtctctgaatgccaggccctggggaggccctgaggatagaggaggaggcctggccgtgcctttctggagttcacagacccctaaagacaggaggcagggatggcgtcgtaggcctggagagcgcctggggggcgggagggcctgaggctgtgcttaaggcccagaggtcctggagcagggcatgtcttgtcctgaggcttaggcagggcccccaggggagttggggcaggaggtggggaggacaggatcgtggaggcttcgcatgtcatggtgtctgttggtttttaggctttcttgggaagtctggtgtttcctatgtagtttggggactaggccacacctctccctcatgcttgtcaccactgctacaccttgtctgcccactttctctccttcccgcccctggaggtgagaccctcacctctctcgtgagcatgctgcctcatgtcttccgtgccgtcgttctgtggctgggtgactgtccctcaggccgccaaccctagttggctctcacagcaacttccagtgctcctggacggggacttcctaagcagcatgggggccacacgggccggccacgcacactggcctgggtccgcattccctatttcaggctgttgtctcgggtcagatctccggaagcggcaggagcgctgggtctcctggtcgtggccgggcagcgtctttcttcttcagggtctggatgccacttcccgcctcctccctgtgcccagtggaaggagaaacatcctagagggtggagactgccctgtttttcttttgccattgagtcccagtgtgactcaagcacgaggccacctttctctgccagaggacagaaagcttcagtgactggcccagggtcacacagttctgccgcccagcccagcagcctgagccagcagtcaggatggggtggggacactccgtctctcttgagaccccactcagagaatggggctgacactgtaggagaaatataagcaggactcctgctggctgctcccctcctgcatgaggcatgttagagggactgggaccgccagcccccagctcccatgccgggcctcggcccagtctcagctcctgtttgggagggggggcagaggggcaggcacaggctctagggtccagctgtcctcctctcccctcccctgctggccactcctgctgccgtctccacactctggaatgatgaagtggacaaggccgagcaggagctccgcgtggcccagacagagtttgaccggcaagcagaagtgacccgtctcttgctggagggaatcagtagcactcacgtgaaccacctgcgctgcctccacgagttcgtcaagtctcagacaacctactacgcacagtgctaccgccacatgctggacttgcagaagcagctgggcagatttcccggcaccttcgtgggcaccacagagcccgcctccccacccctgagcagcacctcacccaccactgctgcggccactatgcctgtggtgccctctgtggccagcctggcccctccgggggaggcctcgctctgcctggaagaggtggccccccctgccagtgggacccgcaaagctcgggtgctctatgactacgaggcagccgacagcagtgagctggccctgctggctgatgagctcatcactgtctacagcctgcctggcatggaccctgactggctcattggcgagagaggcaacaagaagggcaaggtccctgtcacctacttggaactgctcagctaggcaggtgcccccatcccccccgcattctggcctaggcaggagaggatgggcgcagccctgccacttaacttgtttgttggtgacacagttgttcagagtggggagaattcaccccattctgtccctgcccctagtcacctagctgtgagggtgcctgaggctgaatggctccacccctcccccagccctgcttctgacctgtggctctggagcccctgcccctgcctgcatccccgagcaccccaccctccaggctccactaaggagggaggggctgtctgcagcagctgcactcagcacctaggccagggtggggccgccgcagatgggctcaggaagccccaggtgcactcagcgagagccctgcctttcagttgccaaaagctgcatcaggggaatgcggcaaggcacacagggctctggcagcccctggggactgggcgctgcccctgggaggggagagcctggccagggctggtgttgggcccggagcagcatcttccggtgctatcctcccctcccacccctcacagctcaagccaagtccagcggccgcagtcttcacctctccacactcactttttatctggtgtttttacttctgcctgcgtttgctctctagccaataaaccgtccttgtgtgcgagtca

SEQ ID NO: 286415 - DNA, 1330 bp, Homo sapiens
cttcttcacccgggcggtgcagttcacggaggagaaatttggccaaagccacgacggtgcctgactttcaggagactagacctcgtaattacattctctcggccagcgcctccgcgctctggaatgatgaagtggacaaggccgagcaggagctccgcgtggcccagacagagtttgaccggcaagcagaagtgacccgtctcttgctggagggaatcagtagcactcacgtgaaccacctgcgctgcctccacgagttcgtcaagtctcagacaacctactacgcacagtgctaccgccacatgctggacttgcagaagcagctgggcagatttcccggcaccttcgtgggcaccacagagcccgcctccccacccctgagcagcacctcacccaccactgctgcggccactatgcctgtggtgccctctgtggccagcctggcccctccgggggaggcctcgctctgcctggaagaggtggccccccctgccagtgggacccgcaaagctcgggtgctctatgactacgaggcagccgacagcagtgagctggccctgctggctgatgagctcatcactgtctacagcctgcctggcatggaccctgactggctcattggcgagagaggcaacaagaagggcaaggtccctgtcacctacttggaactgctcagctaggcaggtgcccccatcccccccgcattctggcctaggcaggagaggatgggcgcagccctgccacttaacttgtttgttggtgacacagttgttcagagtggggagaattcaccccattctgtccctgcccctagtcacctagctgtgagggtgcctgaggctgaatggctccacccctcccccagccctgcttctgacctgtggctctggagcccctgcccctgcctgcatccccgagcaccccaccctccaggctccactaaggagggaggggctgtctgcagcagctgcactcagcacctaggccagggtggggccgccgcagatgggctcaggaagccccaggtgcactcagcgagagccctgcctttcagttgccaaaagctgcatcaggggaatgcggcaaggcacacagggctctggcagcccctggggactgggcgctgcccctgggaggggagagcctggccagggctggtgttgggcccggagcagcatcttccggtgctatcctcccctcccacccctcacagctcaagccaagtccagcggccgcagtcttcacctctccacactcactttttatctggtgtttttacttctgcctgcgtttgctctctagccaataaaccgtccttgtgtgcgagtca

SEQ ID NO: 286416 - DNA, 1614 bp, Homo sapiens
gattagatctagaggatcccgacgctctctctgtggggtctgatctgtttctcactctgccccacacccactggggaggggttactgctttccctccctgggcctcagtttcccctctgtggggaaatgttttctccacagtaccctgtagcacacagtaggccctcaggatgcacttgctgggtggatttctccgatgggtgatggaggaagggtctgtcactgcagctgcctgtggggtcctgagtggggctctagcttctctggggttggggctccaggtgtgaagtcaggcatagacccagaaggctctctgtgttcccaggggaaagggacaggcggctcccaggtaggctccaggagaagactgcggggaagctggtgggtggtgtgtgggtgctcatggctgccctgccctgcccaggccgagcaggagctccgcgtggcccagacagagtttgaccggcaagcagaagtgacccgtctcttgctggagggaatcagtagcactcacgtgaaccacctgcgctgcctccacgagttcgtcaagtctcagacaacctactacgcacagtgctaccgccacatgctggacttgcagaagcagctgggcagatttcccggcaccttcgtgggcaccacagagcccgcctccccacccctgagcagcacctcacccaccactgctgcggccactatgcctgtggtgccctctgtggccagcctggcccctccgggggaggcctcgctctgcctggaagaggtggccccccctgccagtgggacccgcaaagctcgggtgctctatgactacgaggcagccgacagcagtgagctggccctgctggctgatgagctcatcactgtctacagcctgcctggcatggaccctgactggctcattggcgagagaggcaacaagaagggcaaggtccctgtcacctacttggaactgctcagctaggcaggtgcccccatcccccccgcattctggcctaggcaggagaggatgggcgcagccctgccacttaacttgtttgttggtgacacagttgttcagagtggggagaattcaccccattctgtccctgcccctagtcacctagctgtgagggtgcctgaggctgaatggctccacccctcccccagccctgcttctgacctgtggctctggagcccctgcccctgcctgcatccccgagcaccccaccctccaggctccactaaggagggaggggctgtctgcagcagctgcactcagcacctaggccagggtggggccgccgcagatgggctcaggaagccccaggtgcactcagcgagagccctgcctttcagttgccaaaagctgcatcaggggaatgcggcaaggcacacagggctctggcagcccctggggactgggcgctgcccctgggaggggagagcctggccagggctggtgttgggcccggagcagcatcttccggtgctatcctcccctcccacccctcacagctcaagccaagtccagcggccgcagtcttcacctctccacactcactttttatctggtgtttttacttctgcctgcgtttgctctctagccaataaaccgtccttgtgtgcgagtca

SEQ ID NO: 286417 - DNA, 1603 bp, Homo sapiens
  misc_feature (6)..(6): n is a, c, g, or t
tgaatnacaggccggcggctgccgggagtctagacaggagccgaaacctcgaagaggcggcggccacggagcagggaggagggtgtgatcaagtggactccagccccgttcctagataccgtgttaacgctaagaaactgacccctctcctgcccccgccacttactgacatggactcaaccttggattcgtcaacaggctcccttctgaaaaccaataatcatattggcggtggggccttcagtgtggactccccacagagagaggacgctctctctgtggggcagaggcagtacctgggcaagctggcggctggggtcccaacaactgccaggagcacggctctgtccccagcctgggaaagcccctgcccctcctctccctcatcaaggacacgggcctgtccacaggctgccgagcaggagctccgcgtggcccagacagagtttgaccggcaagcagaagtgacccgtctcttgctggagggaatcagtagcactcacgtgaaccacctgcgctgcctccacgagttcgtcaagtctcagacaacctactacgcacagtgctaccgccacatgctggacttgcagaagcagctgggcagatttcccggcaccttcgtgggcaccacagagcccgcctccccacccctgagcagcacctcacccaccactgctgcggccactatgcctgtggtgccctctgtggccagcctggcccctccgggggaggcctcgctctgcctggaagaggtggccccccctgccagtgggacccgcaaagctcgggtgctctatgactacgaggcagccgacagcagtgagctggccctgctggctgatgagctcatcactgtctacagcctgcctggcatggaccctgactggctcattggcgagagaggcaacaagaagggcaaggtccctgtcacctacttggaactgctcagctaggcaggtgcccccatcccccccgcattctggcctaggcaggagaggatgggcgcagccctgccacttaacttgtttgttggtgacacagttgttcagagtggggagaattcaccccattctgtccctgcccctagtcacctagctgtgagggtgcctgaggctgaatggctccacccctcccccagccctgcttctgacctgtggctctggagcccctgcccctgcctgcatccccgagcaccccaccctccaggctccactaaggagggaggggctgtctgcagcagctgcactcagcacctaggccagggtggggccgccgcagatgggctcaggaagccccaggtgcactcagcgagagccctgcctttcagttgccaaaagctgcatcaggggaatgcggcaaggcacacagggctctggcagcccctggggactgggcgctgcccctgggaggggagagcctggccagggctggtgttgggcccggagcagcatcttccggtgctatcctcccctcccacccctcacagctcaagccaagtccagcggccgcagtcttcacctctccacactcactttttatctggtgtttttacttctgcctgcgtttgctctctagccaataaaccgtccttgtgtgcgagtca

SEQ ID NO: 286418 - DNA, 1373 bp, Homo sapiens
gattagatctagaggatcccgacgctctctctgtggggtctgatctgtttctcactctgccccacacccactggggaggggttactgctttccctccctgggcctcagtttcccctctgtggggaaatgttttctccacagtaccctgtagcacacagtaggccctcaggatgcacttgctgggtggatttctccgatgggtgatggaggaagggtctgtcactgcagctgcctgtggggtcctgagtggggctctagcttctctggggttggggctccaggtgtgaagtcaggcatagacccagaaggctctctgtgttcccaggggaaagggacaggcggctcccaggtaggctccaggagaagactgcggggaagctggtgggtggtgtgtgggtgctcatggctgccctgccctgcccaggccgagcaggagctccgcgtggcccagacagagtttgaccggcaagcagaagtgacccgtctcttgctggagggaatcagtagcactcacgtgaaccacctgcgctgcctccacgagttcgtcaagtctcagacaacctactacgcacagtgctaccgccacatgctggacttgcagaagcagctgggcagctcatcactgtctacagcctgcctggcatggaccctgactggctcattggcgagagaggcaacaagaagggcaaggtccctgtcacctacttggaactgctcagctaggcaggtgcccccatcccccccgcattctggcctaggcaggagaggatgggcgcagccctgccacttaacttgtttgttggtgacacagttgttcagagtggggagaattcaccccattctgtccctgcccctagtcacctagctgtgagggtgcctgaggctgaatggctccacccctcccccagccctgcttctgacctgtggctctggagcccctgcccctgcctgcatccccgagcaccccaccctccaggctccactaaggagggaggggctgtctgcagcagctgcactcagcacctaggccagggtggggccgccgcagatgggctcaggaagccccaggtgcactcagcgagagccctgcctttcagttgccaaaagctgcatcaggggaatgcggcaaggcacacagggctctggcagcccctggggactgggcgctgcccctgggaggggagagcctggccagggctggtgttgggcccggagcagcatcttccggtgctatcctcccctcccacccctcacagctcaagccaagtccagcggccgcagtcttcacctctccacactcactttttatctggtgtttttacttctgcctgcgtttgctctctagccaataaaccgtccttgtgtgcgagtca

SEQ ID NO: 286419 - DNA, 692 bp, Homo sapiens
cacgaggcagtgctagggggaggggtggagccattcagctaggcaggtgcccccatcccccccgcattctggcctaggcaggagaggatgggcgcagccctgccacttaacttgtttgttggtgacacagttgttcagagtggggagaattcaccccattctgtccctgcccctagtcacctagctgtgagggtgcctgaggctgaatggctccacccctcccccagccctgcttctgacctgtggctctggagcccctgcccctgcctgcatccccgagcaccccaccctccaggctccactaaggagggaggggctgtctgcagcagctgcactcagcacctaggccagggtggggccgccgcagatgggctcaggaagccccaggtgcactcagcgagagccctgcctttcagttgccaaaagctgcatcaggggaatgcggcaaggcacacagggctctggcagcccctggggactgggcgctgcccctgggaggggagagcctggccagggctggtgttgggcccggagcagcatcttccggtgctatcctcccctcccacccctcacagctcaagccaagtccagcggccgcagtcttcacctctccacactcactttttatctggtgtttttacttctgcctgcgtttgctctctagccaataaaccgtccttgtgtgcgagtca

SEQ ID NO: 286420 - DNA, 2548 bp, Homo sapiens
  misc_feature (2321)..(2321): n is a, c, g, or t
  misc_feature (2359)..(2359): n is a, c, g, or t
cgccctgcgcgctcgggctggctcggcggctgcggcgggcgggcaggcgggcaggccggcaggcgggtgcgcggagggctggtgccccgcagcaggtgggcggggtgcggttggcggcggcggctgggccgggggctgccggctgcgctcgggccgtgcgcggcggccgtgcgggcacgccatggacttcaacatgaagaagctggcgtcggacgcgggcatcttcttcacccgggcggtgcagttcacggaggagaaatttggccaggctgagaagactgagcttgatgcccactttgaaaaccttctggcccgggcagacagcaccaagaactggacagagaagatcttgaggcagacagaggtgctgctgcagcccaaccccagtgcccgagtggaggagttcctgtatgagaagctggacaggaaggtcccctcaagggtcaccaacggggagctgctggctcagtacatggcagacgcggccagtgagctggggccgaccaccccctatgggaagacactgatcaaggtggcagaagctgaaaagcaactgggagccgcggagagggattttatccacacggcctccatcagcttcctcacacccttgcgcaacttcctggagggggactggaagaccatctcgaaggagaggcggctcctccaaaaccggcgtctggacttggatgcctgcaaagcgaggctgaagaaggccaaggctgcagaagccaaagccacgacggtgcctgactttcaggagactagacctcgtaattacattctctcggccagcgcctccgcgctctggaatgatgaagtggacaaggccgagcaggagctccgcgtggcccagacagagtttgaccggcaagcagaagtgacccgtctcttgctggagggaatcagtagcactcacgtgaaccacctgcgctgcctccacgagttcgtcaagtctcagacaacctactacgcacagtgctaccgccacatgctggacttgcagaagcagctgggcagatttcccggcaccttcgtgggcaccacagagcccgcctccccacccctgagcagcacctcacccaccactgctgcggccactatgcctgtggtgccctctgtggccagcctggcccctccgggggaggcctcgctctgcctggaagaggtggccccccctgccagtgggacccgcaaagctcgggtgctctatgactacgaggcagccgacagcagtgagctggccctgctggctgatgagctcatcactgtctacagcctgcctggcatggaccctgactggctcattggcgagagaggcaacaagaagggcaaggtccctgtcacctacttggaactgctcagctagctcaagccaagtccagcggccgcagtcttcacctctccacactcactttttatctggtgtttttacttctgcctgcgtttgctctctagccaataaaccgtccttgtgtgcgagtcacctgggctcctgtcagggcctggccctgagggtggtaaagggaaaggtagactcaccctctgccccactcttccacagagtgagcaggggccctgtggctgccccggcccccagctctctagttgggaagaagtgcagccctccctgtcttctgcggggcctgtgcctctcagagggcagtgctgttcctggacatgaagccgcacaaggaacgttttattcctaagaaaaagtttcctaaatttggattgtggagcggactgtagaatgcgtctgacagttcagttcaagcacaagaagtgggtagcggtcagtgctgtctgcaggtcgggcgtttcacccagcatgtgcccccgtgccatgggttctcatgccgtcctcagtgtccacatttcacagatgagatcagcaagacagtcagctcctcaagggaccacagttggcaagtggccaagcagggactgaagcccaggcagcctgattctagaaaccctaagtgatgtctgtgttttagatggcccctagcaggacctagcattctgacttcagtcctgagaaggccaacagccagtaggccccactgttggggcttctgaagaggggatcgggggatgacgggggcacggggctataaataggaaggcacagagcttcaagaaaggctcacccagggatgagctcagcccactgggccaatgaaagcctggccagggctggtgttgggcccggagcagcatcttccggtgctatcctcccctcccacccctcacagctcaagccaagtccagcggccgcagtcttcacctctccacactcactttttatctggtgtttntacttctgcctgcgtttgctctctagccaataaaccgnccttgtgtgcgacagaaaaaaaaagcaaaaaaaaatgggccacactgacaaacaagaaacctccagggggggcccggtccccaattggccctttgggggggccgtttacaattaaaatggcggcggttttaaaccgccgtaactggaaaaaccctggctttccccaacttattcgcctggcagaacatc

SEQ ID NO: 286421 - DNA, 2951 bp, Homo sapiens
  misc_feature (2724)..(2724): n is a, c, g, or t
  misc_feature (2762)..(2762): n is a, c, g, or t
cgccctgcgcgctcgggctggctcggcggctgcggcgggcgggcaggcgggcaggccggcaggcgggtgcgcggagggctggtgccccgcagcaggtgggcggggtgcggttggcggcggcggctgggccgggggctgccggctgcgctcgggccgtgcgcggcggccgtgcgggcacgccatggacttcaacatgaagaagctggcgtcggacgcgggcatcttcttcacccgggcggtgcagttcacggaggagaaatttggccaggctgagaagactgagcttgatgcccactttgaaaaccttctggcccgggcagacagcaccaagaactggacagagaagatcttgaggcagacagaggtgctgctgcagcccaaccccagtgcccgagtggaggagttcctgtatgagaagctggacaggaaggtcccctcaagggtcaccaacggggagctgctggctcagtacatggcagacgcggccagtgagctggggccgaccaccccctatgggaagacactgatcaaggtggcagaagctgaaaagcaactgggagccgcggagagggattttatccacacggcctccatcagcttcctcacacccttgcgcaacttcctggagggggactggaagaccatctcgaaggagaggcggctcctccaaaaccggcgtctggacttggatgcctgcaaagcgaggctgaagaaggccaaggctgcagaagccaaagccacgacggtgcctgactttcaggagactagacctcgtaattacattctctcggccagcgcctccgcgctctggaatgatgaagtggacaaggccgagcaggagctccgcgtggcccagacagagtttgaccggcaagcagaagtgacccgtctcttgctggagggaatcagtagcactcacgtgaaccacctgcgctgcctccacgagttcgtcaagtctcagacaacctactacgcacagtgctaccgccacatgctggacttgcagaagcagctgggcagatttcccggcaccttcgtgggcaccacagagcccgcctccccacccctgagcagcacctcacccaccactgctgcggccactatgcctgtggtgccctctgtggccagcctggcccctccgggggaggcctcgctctgcctggaagaggtggccccccctgccagtgggacccgcaaagctcgggtgctctatgactacgaggcagccgacagcagtgagctggccctgctggctgatgagctcatcactgtctacagcctgcctggcatggaccctgactggctcattggcgagagaggcaacaagaagggcaaggtccctgtcacctacttggaactgctcagctaggcaggtgcccccatcccccccgcattctggcctaggcaggagaggatgggcgcagccctgccacttaacttgtttgttggtgacacagttgttcagagtggggagaattcaccccattctgtccctgcccctagtcacctagctgtgagggtgcctgaggctgaatggctccacccctcccccagccctgcttctgacctctcaggaagccccaggtgcactcagcgagagccctgcctttcagttgccaaaagctgcatcaggggaatgcggcaaggcacacagggctctggcagcccctggggactgggcgctgcccctgggaggggagagcctggccagggctggtgttgggcccggagcagcatcttccggtgctatcctcccctcccacccctcacagctcaagccaagtccagcggccgcagtcttcacctctccacactcactttttatctggtgtttttacttctgcctgcgtttgctctctagccaataaaccgtccttgtgtgcgagtcacctgggctcctgtcagggcctggccctgagggtggtaaagggaaaggtagactcaccctctgccccactcttccacagagtgagcaggggccctgtggctgccccggcccccagctctctagttgggaagaagtgcagccctccctgtcttctgcggggcctgtgcctctcagagggcagtgctgttcctggacatgaagccgcacaaggaacgttttattcctaagaaaaagtttcctaaatttggattgtggagcggactgtagaatgcgtctgacagttcagttcaagcacaagaagtgggtagcggtcagtgctgtctgcaggtcgggcgtttcacccagcatgtgcccccgtgccatgggttctcatgccgtcctcagtgtccacatttcacagatgagatcagcaagacagtcagctcctcaagggaccacagttggcaagtggccaagcagggactgaagcccaggcagcctgattctagaaaccctaagtgatgtctgtgttttagatggcccctagcaggacctagcattctgacttcagtcctgagaaggccaacagccagtaggccccactgttggggcttctgaagaggggatcgggggatgacgggggcacggggctataaataggaaggcacagagcttcaagaaaggctcacccagggatgagctcagcccactgggccaatgaaagcctggccagggctggtgttgggcccggagcagcatcttccggtgctatcctcccctcccacccctcacagctcaagccaagtccagcggccgcagtcttcacctctccacactcactttttatctggtgtttntacttctgcctgcgtttgctctctagccaataaaccgnccttgtgtgcgacagaaaaaaaaagcaaaaaaaaatgggccacactgacaaacaagaaacctccagggggggcccggtccccaattggccctttgggggggccgtttacaattaaaatggcggcggttttaaaccgccgtaactggaaaaaccctggctttccccaacttattcgcctggcagaacatc

SEQ ID NO: 286422 - DNA, 2866 bp, Homo sapiens
  misc_feature (2639)..(2639): n is a, c, g, or t
  misc_feature (2677)..(2677): n is a, c, g, or t
cgccctgcgcgctcgggctggctcggcggctgcggcgggcgggcaggcgggcaggccggcaggcgggtgcgcggagggctggtgccccgcagcaggtgggcggggtgcggttggcggcggcggctgggccgggggctgccggctgcgctcgggccgtgcgcggcggccgtgcgggcacgccatggacttcaacatgaagaagctggcgtcggacgcgggcatcttcttcacccgggcggtgcagttcacggaggagaaatttggccaggctgagaagactgagcttgatgcccactttgaaaaccttctggcccgggcagacagcaccaagaactggacagagaagatcttgaggcagacagaggtgctgctgcagcccaaccccagtgcccgagtggaggagttcctgtatgagaagctggacaggaaggtcccctcaagggtcaccaacggggagctgctggctcagtacatggcagacgcggccagtgagctggggccgaccaccccctatgggaagacactgatcaaggtggcagaagctgaaaagcaactgggagccgcggagagggattttatccacacggcctccatcagcttcctcacacccttgcgcaacttcctggagggggactggaagaccatctcgaaggagaggcggctcctccaaaaccggcgtctggacttggatgcctgcaaagcgaggctgaagaaggccaaggctgcagaagccaaagccacgacggtgcctgactttcaggagactagacctcgtaattacattctctcggccagcgcctccgcgctctggaatgatgaagtggacaaggccgagcaggagctccgcgtggcccagacagagtttgaccggcaagcagaagtgacccgtctcttgctggagggaatcagtagcactcacgtgaaccacctgcgctgcctccacgagttcgtcaagtctcagacaacctactacgcacagtgctaccgccacatgctggacttgcagaagcagctgggcagatttcccggcaccttcgtgggcaccacagagcccgcctccccacccctgagcagcacctcacccaccactgctgcggccactatgcctgtggtgccctctgtggccagcctggcccctccgggggaggcctcgctctgcctggaagaggtggccccccctgccagtgggacccgcaaagctcgggtgctctatgactacgaggcagccgacagcagtgagctggccctgctggctgatgagctcatcactgtctacagcctgcctggcatggaccctgactggctcattggcgagagaggcaacaagaagggcaaggtccctgtcacctacttggaactgctcagctaggcaggtgcccccatcccccccgcattctggcctaggcaggagaggatgggcgcagccctgccacttaacttgtttgttggtgacacagttgttcagagtggggagaattcaccccattctgtccctgcccctagtcacctagctgtgagggtgcctgaggctgaatggctccacccctcccccagccctgcttctgacctggctctggcagcccctggggactgggcgctgcccctgggaggggagagcctggccagggctggtgttgggcccggagcagcatcttccggtgctatcctcccctcccacccctcacagctcaagccaagtccagcggccgcagtcttcacctctccacactcactttttatctggtgtttttacttctgcctgcgtttgctctctagccaataaaccgtccttgtgtgcgagtcacctgggctcctgtcagggcctggccctgagggtggtaaagggaaaggtagactcaccctctgccccactcttccacagagtgagcaggggccctgtggctgccccggcccccagctctctagttgggaagaagtgcagccctccctgtcttctgcggggcctgtgcctctcagagggcagtgctgttcctggacatgaagccgcacaaggaacgttttattcctaagaaaaagtttcctaaatttggattgtggagcggactgtagaatgcgtctgacagttcagttcaagcacaagaagtgggtagcggtcagtgctgtctgcaggtcgggcgtttcacccagcatgtgcccccgtgccatgggttctcatgccgtcctcagtgtccacatttcacagatgagatcagcaagacagtcagctcctcaagggaccacagttggcaagtggccaagcagggactgaagcccaggcagcctgattctagaaaccctaagtgatgtctgtgttttagatggcccctagcaggacctagcattctgacttcagtcctgagaaggccaacagccagtaggccccactgttggggcttctgaagaggggatcgggggatgacgggggcacggggctataaataggaaggcacagagcttcaagaaaggctcacccagggatgagctcagcccactgggccaatgaaagcctggccagggctggtgttgggcccggagcagcatcttccggtgctatcctcccctcccacccctcacagctcaagccaagtccagcggccgcagtcttcacctctccacactcactttttatctggtgtttntacttctgcctgcgtttgctctctagccaataaaccgnccttgtgtgcgacagaaaaaaaaagcaaaaaaaaatgggccacactgacaaacaagaaacctccagggggggcccggtccccaattggccctttgggggggccgtttacaattaaaatggcggcggttttaaaccgccgtaactggaaaaaccctggctttccccaacttattcgcctggcagaacatc

SEQ ID NO: 286423 - DNA, 1623 bp, Homo sapiens
cgccctgcgcgctcgggctggctcggcggctgcggcgggcgggcaggcgggcaggccggcaggcgggtgcgcggagggctggtgccccgcagcaggtgggcggggtgcggttggcggcggcggctgggccgggggctgccggctgcgctcgggccgtgcgcggcggccgtgcgggcacgccatggacttcaacatgaagaagctggcgtcggacgcgggcatcttcttcacccgggcggtgcagttcacggaggagaaatttggccaggctgagaagactgagcttgatgcccactttgaaaaccttctggcccgggcagacagcaccaagaactggacagagaagatcttgaggcagacagaggtgctgctgcagcccaaccccagtgcccgagtggaggagttcctgtatgagaagctggacaggaaggtcccctcaagggtcaccaacggggagctgctggctcagtacatggcagacgcggccagtgagctggggccgaccaccccctatgggaagacactgatcaaggtggcagaagctgaaaagcaactgggagccgcggagagggattttatccacacggcctccatcagcttcctcacacccttgcgcaacttcctggagggggactggaagaccatctcgaaggagaggcggctcctccaaaaccggcgtctggacttggatgcctgcaaagcgaggctgaagaaggccaaggctgcagaagccaaagccacgacggtgcctgactttcaggagactagacctcgtaattacattctctcggccagcgcctccgcgctctggaatgatgaagtggacaaggccgagcaggagctccgcgtggcccagacagagtttgaccggcaagcagaagtgacccgtctcttgctggagggaatcagtagcactcacgtgaaccacctgcgctgcctccacgagttcgtcaagtctcagacaacctactacgcacagtgctaccgccacatgctggacttgcagaagcagctgggcagatttcccggcaccttcgtgggcaccacagagcccgcctccccacccctgagcagcacctcacccaccactgctgcggccactatgcctgtggtgccctctgtggccagcctggcccctccgggggaggcctcgctctgcctggaagaggtggccccccctgccagtgggacccgcaaagctcgggtgctctatgactacgaggcagccgacagcagtgagctggccctgctggctgatgagctcatcactgtctacagcctgcctggcatggaccctgactggctcattggcgagagaggcaacaagaagggcaaggtccctgtcacctacttggaactgctcagctaggcaggtgcccccatcccccccgcattctggcctaggcaggagaggatgggcgcagccctgccacttaacttgtttgttggtgacacagttgttcagagtggggagaattcaccccattctgtccctgcccctagtcacctagctgtgagggtgcctgaggctgaatggctccacccctcccccagccctgcttctgacctcggggatgcaggcaggggcaggggctccagagccacaggtcaggtcgaccggcc

SEQ ID NO: 286424 - DNA, 1599 bp, Homo sapiens
cgccctgcgcgctcgggctggctcggcggctgcggcgggcgggcaggcgggcaggccggcaggcgggtgcgcggagggctggtgccccgcagcaggtgggcggggtgcggttggcggcggcggctgggccgggggctgccggctgcgctcgggccgtgcgcggcggccgtgcgggcacgccatggacttcaacatgaagaagctggcgtcggacgcgggcatcttcttcacccgggcggtgcagttcacggaggagaaatttggccaggctgagaagactgagcttgatgcccactttgaaaaccttctggcccgggcagacagcaccaagaactggacagagaagatcttgaggcagacagaggtgctgctgcagcccaaccccagtgcccgagtggaggagttcctgtatgagaagctggacaggaaggtcccctcaagggtcaccaacggggagctgctggctcagtacatggcagacgcggccagtgagctggggccgaccaccccctatgggaagacactgatcaaggtggcagaagctgaaaagcaactgggagccgcggagagggattttatccacacggcctccatcagcttcctcacacccttgcgcaacttcctggagggggactggaagaccatctcgaaggagaggcggctcctccaaaaccggcgtctggacttggatgcctgcaaagcgaggctgaagaaggccaaggctgcagaagccaaagccacgacggtgcctgactttcaggagactagacctcgtaattacattctctcggccagcgcctccgcgctctggaatgatgaagtggacaaggccgagcaggagctccgcgtggcccagacagagtttgaccggcaagcagaagtgacccgtctcttgctggagggaatcagtagcactcacgtgaaccacctgcgctgcctccacgagttcgtcaagtctcagacaacctactacgcacagtgctaccgccacatgctggacttgcagaagcagctgggcagatttcccggcaccttcgtgggcaccacagagcccgcctccccacccctgagcagcacctcacccaccactgctgcggccactatgcctgtggtgccctctgtggccagcctggcccctccgggggaggcctcgctctgcctggaagaggtggccccccctgccagtgggacccgcaaagctcgggtgctctatgactacgaggcagccgacagcagtgagctggccctgctggctgatgagctcatcactgtctacagcctgcctggcatggaccctgactggctcattggcgagagaggcaacaagaagggcaaggtccctgtcacctacttggaactgctcagctaggcaggtgcccccatcccccccgcattctggcctaggcaggagaggatgggcgcagccctgccacttaacttgtttgttggtgacacagttgttcagagtggggagaattcaccccattctgtccctgcccctagtcacctagctgtgagggtgcctgaggctgaatggctccacccctcccccagccctgcttctgacctcgggctagtcgggtaaggtcctgctagagt

SEQ ID NO: 286425 - DNA, 1659 bp, Homo sapiens
  misc_feature (1432)..(1432): n is a, c, g, or t
  misc_feature (1470)..(1470): n is a, c, g, or t
cgccctgcgcgctcgggctggctcggcggctgcggcgggcgggcaggcgggcaggccggcaggcgggtgcgcggagggctggtgccccgcagcaggtgggcggggtgcggttggcggcggcggctgggccgggggctgccggctgcgctcgggccgtgcgcggcggccgtgcgggcacgccatggacttcaacatgaagaagctggcgtcggacgcgggcatcttcttcacccgggcggtgcagttcacggaggagaaatttggccaggctgagaagactgagcttgatgcccactttgaaaaccttctggcccgggcagacagcaccaagaactggacagagaagatcttgaggcagacagaggtgctgctgcagcccaaccccagtgcccgagtggaggagttcctgtatgagaagctggacaggaaggtcccctcaagggtcaccaacggggagctgctggctcagtacatggcagacgcggccagtgagctggggccgaccaccccctatgggaagacactgatcaaggtggcagaagctgaaaagcaactgggagccgcggagagggattttatccacacggcctccatcagcttcctcacacccttgcgcaacttcctggagggggactggaagaccatctcgaaggagaggcggctcctccaaaaccggcgtctggacttggatgcctgcaaagcgaggctgaagaaggccaaggctgcagaagccaaagccacgacggtgcctgactttcaggagactagacctcgtaattacattctctcggccagcgcctccgcgctctggaatgatgaagtggacaaggccgagcaggagctccgcgtggcccagacagagtttgaccggcaagcagaagtgacccgtctcttgctggagggaatcagtagcactcacgtgaaccacctgcgctgcctccacgagttcgtcaagtctcagacaacctactacgcacagtgctaccgccacatgctggacttgcagaagcagctgggcagatttcccggcaccttcgtgggcaccacagagcccgcctccccacccctgagcagcacctcacccaccactgctgcggccactatgcctgtggtgccctctgtggccagcctggcccctccgggggaggcctcgctctgcctggaagaggtggccccccctgccagtgggacccgcaaagctcgggtgctctatgactacgaggcagccgacagcagtgagctggccctgctggctgatgagctcatcactgtctacagcctgcctggcatggaccctgactggctcattggcgagagaggcaacaagaagggcaaggtccctgtcacctacttggaactgctcagctagctcaagccaagtccagcggccgcagtcttcacctctccacactcactttttatctggtgtttntacttctgcctgcgtttgctctctagccaataaaccgnccttgtgtgcgacagaaaaaaaaagcaaaaaaaaatgggccacactgacaaacaagaaacctccagggggggcccggtccccaattggccctttgggggggccgtttacaattaaaatggcggcggttttaaaccgccgtaactggaaaaaccctggctttccccaacttattcgcctggcagaacatc

SEQ ID NO: 286426 - DNA, 1486 bp, Homo sapiens
cgccctgcgcgctcgggctggctcggcggctgcggcgggcgggcaggcgggcaggccggcaggcgggtgcgcggagggctggtgccccgcagcaggtgggcggggtgcggttggcggcggcggctgggccgggggctgccggctgcgctcgggccgtgcgcggcggccgtgcgggcacgccatggacttcaacatgaagaagctggcgtcggacgcgggcatcttcttcacccgggcggtgcagttcacggaggagaaatttggccaggctgagaagactgagcttgatgcccactttgaaaaccttctggcccgggcagacagcaccaagaactggacagagaagatcttgaggcagacagaggtgctgctgcagcccaaccccagtgcccgagtggaggagttcctgtatgagaagctggacaggaaggtcccctcaagggtcaccaacggggagctgctggctcagtacatggcagacgcggccagtgagctggggccgaccaccccctatgggaagacactgatcaaggtggcagaagctgaaaagcaactgggagccgcggagagggattttatccacacggcctccatcagcttcctcacacccttgcgcaacttcctggagggggactggaagaccatctcgaaggagaggcggctcctccaaaaccggcgtctggacttggatgcctgcaaagcgaggctgaagaaggccaaggctgcagaagccaaagccacgacggtgcctgactttcaggagactagacctcgtaattacattctctcggccagcgcctccgcgctctggaatgatgaagtggacaaggccgagcaggagctccgcgtggcccagacagagtttgaccggcaagcagaagtgacccgtctcttgctggagggaatcagtagcactcacgtgaaccacctgcgctgcctccacgagttcgtcaagtctcagacaacctactacgcacagtgctaccgccacatgctggacttgcagaagcagctgggcagatttcccggcaccttcgtgggcaccacagagcccgcctccccacccctgagcagcacctcacccaccactgctgcggccactatgcctgtggtgccctctgtggccagcctggcccctccgggggaggcctcgctctgcctggaagaggtggccccccctgccagtgggacccgcaaagctcgggtgctctatgactacgaggcagccgacagcagtgagctggccctgctggctgatgagctcatcactgtctacagcctgcctggcatggaccctgactggctcattggcgagagaggcaacaagaagggcaaggtccctgtcacctacttggaactgctcagctagctcaagccaagtccagcggccgcagtcttcacctctccacactcactttttatctggtgtttttacttctgcctgcgtttgctctctagccaataaaccgtccttgtgtgcgagtca

SEQ ID NO: 286427 - DNA, 1506 bp, Homo sapiens
cgccctgcgcgctcgggctggctcggcggctgcggcgggcgggcaggcgggcaggccggcaggcgggtgcgcggagggctggtgccccgcagcaggtgggcggggtgcggttggcggcggcggctgggccgggggctgccggctgcgctcgggccgtgcgcggcggccgtgcgggcacgccatggacttcaacatgaagaagctggcgtcggacgcgggcatcttcttcacccgggcggtgcagttcacggaggagaaatttggccaggctgagaagactgagcttgatgcccactttgaaaaccttctggcccgggcagacagcaccaagaactggacagagaagatcttgaggcagacagaggtgctgctgcagcccaaccccagtgcccgagtggaggagttcctgtatgagaagctggacaggaaggtcccctcaagggtcaccaacggggagctgctggctcagtacatggcagacgcggccagtgagctggggccgaccaccccctatgggaagacactgatcaaggtggcagaagctgaaaagcaactgggagccgcggagagggattttatccacacggcctccatcagcttcctcacacccttgcgcaacttcctggagggggactggaagaccatctcgaaggagaggcggctcctccaaaaccggcgtctggacttggatgcctgcaaagcgaggctgaagaaggccaaggctgcagaagccaaagccacgacggtgcctgactttcaggagactagacctcgtaattacattctctcggccagcgcctccgcgctctggaatgatgaagtggacaaggccgagcaggagctccgcgtggcccagacagagtttgaccggcaagcagaagtgacccgtctcttgctggagggaatcagtagcactcacgtgaaccacctgcgctgcctccacgagttcgtcaagtctcagacaacctactacgcacagtgctaccgccacatgctggacttgcagaagcagctgggcagatttcccggcaccttcgtgggcaccacagagcccgcctccccacccctgagcagcacctcacccaccactgctgcggccactatgcctgtggtgccctctgtggccagcctggcccctccgggggaggcctcgctctgcctggaagaggtggccccccctgccagtgggacccgcaaagctcgggtgctctatgactacgaggcagccgacagcagtgagctggccctgctggctgatgagctcatcactgtctacagcctgcctggcatggaccctgactggctcattggcgagagaggcaacaagaagggcaaggtccctgtcacctacttggaactgctcagctagctcaagccaagtccagcggccgcagtcttcacctctccacactcactttttatctggtgtttttacttctgcctgcgtttgctctctagccaataaaccgtccttgtgtgcgagtcaaaaaaaaaaagtcgtatcga

SEQ ID NO: 286428 - DNA, 2231 bp, Homo sapiens
  misc_feature (2004)..(2004): n is a, c, g, or t
  misc_feature (2042)..(2042): n is a, c, g, or t
cgccctgcgcgctcgggctggctcggcggctgcggcgggcgggcaggcgggcaggccggcaggcgggtgcgcggagggctggtgccccgcagcaggtgggcggggtgcggttggcggcggcggctgggccgggggctgccggctgcgctcgggccgtgcgcggcggccgtgcgggcacgccatggacttcaacatgaagaagctggcgtcggacgcgggcatcttcttcacccgggcggtgcagttcacggaggagaaatttggccaggctgagaagactgagcttgatgcccactttgaaaaccttctggcccgggcagacagcaccaagaactggacagagaagatcttgaggcagacagaggtgctgctgcagcccaaccccagtgcccgagtggaggagttcctgtatgagaagctggacaggaaggtcccctcaagggtcaccaacggggagctgctggctcagtacatggcagacgcggccagtgagctggggccgaccaccccctatgggaagacactgatcaaggtggcagaagctgaaaagcaactgggagccgcggagagggattttatccacacggcctccatcagcttcctcacacccttgcgcaacttcctggagggggactggaagaccatctcgaaggagaggcggctcctccaaaaccggcgtctggacttggatgcctgcaaagcgaggctgaagaaggccaaggctgcagaagccaaagccacgacggtgcctgactttcaggagactagacctcgtaattacattctctcggccagcgcctccgcgctctggaatgatgaagtggacaaggccgagcaggagctccgcgtggcccagacagagtttgaccggcaagcagaagtgacccgtctcttgctggagggaatcagtagcactcacgtgaaccacctgcgctgcctccacgagttcgtcaagtctcagacaacctactacgcacagtgctaccgccacatgtggtgttgggcccggagcagcatcttccggtgctatcctcccctcccacccctcacagctcaagccaagtccagcggccgcagtcttcacctctccacactcactttttatctggtgtttttacttctgcctgcgtttgctctctagccaataaaccgtccttgtgtgcgagtcacctgggctcctgtcagggcctggccctgagggtggtaaagggaaaggtagactcaccctctgccccactcttccacagagtgagcaggggccctgtggctgccccggcccccagctctctagttgggaagaagtgcagccctccctgtcttctgcggggcctgtgcctctcagagggcagtgctgttcctggacatgaagccgcacaaggaacgttttattcctaagaaaaagtttcctaaatttggattgtggagcggactgtagaatgcgtctgacagttcagttcaagcacaagaagtgggtagcggtcagtgctgtctgcaggtcgggcgtttcacccagcatgtgcccccgtgccatgggttctcatgccgtcctcagtgtccacatttcacagatgagatcagcaagacagtcagctcctcaagggaccacagttggcaagtggccaagcagggactgaagcccaggcagcctgattctagaaaccctaagtgatgtctgtgttttagatggcccctagcaggacctagcattctgacttcagtcctgagaaggccaacagccagtaggccccactgttggggcttctgaagaggggatcgggggatgacgggggcacggggctataaataggaaggcacagagcttcaagaaaggctcacccagggatgagctcagcccactgggccaatgaaagcctggccagggctggtgttgggcccggagcagcatcttccggtgctatcctcccctcccacccctcacagctcaagccaagtccagcggccgcagtcttcacctctccacactcactttttatctggtgtttntacttctgcctgcgtttgctctctagccaataaaccgnccttgtgtgcgacagaaaaaaaaagcaaaaaaaaatgggccacactgacaaacaagaaacctccagggggggcccggtccccaattggccctttgggggggccgtttacaattaaaatggcggcggttttaaaccgccgtaactggaaaaaccctggctttccccaacttattcgcctggcagaacatc

SEQ ID NO: 286429 - DNA, 1015 bp, Homo sapiens
cgccctgcgcgctcgggctggctcggcggctgcggcgggcgggcaggcgggcaggccggcaggcgggtgcgcggagggctggtgccccgcagcaggtgggcggggtgcggttggcggcggcggctgggccgggggctgccggctgcgctcgggccgtgcgcggcggccgtgcgggcacgccatggacttcaacatgaagaagctggcgtcggacgcgggcatcttcttcacccgggcggtgcagttcacggaggagaaatttggccaggctgagaagactgagcttgatgcccactttgaaaaccttctggcccgggcagacagcaccaagaactggacagagaagatcttgaggcagacagaggtgctgctgcagcccaaccccagtgcccgagtggaggagttcctgtatgagaagctggacaggaaggtcccctcaagggtcaccaacggggagctgctggctcagtacatggcagacgcggccagtgagctggggccgaccaccccctatgggaagacactgatcaaggtggcagaagctgaaaagcaactgggagccgcggagagggattttatccacacggcctccatcagcttcctcacacccttgcgcaacttcctggagggggactggaagaccatctcgaaggagaggcggctcctccaaaaccggcgtctggacttggatgcctgcaaagcgaggctgaagaaggccaaggctgcagaagccaaagccacgacggtgcctgactttcaggagactagacctcgtaattacattctctcggccagcgcctccgcgttctcacctcacacaccagagccctctacactctcaaacaccagagccccatacacacacacacaccagatcccccctacacacacatcagagcccaacacacacacaccagagccccctacacacacaccagagcccccaacacacacaccagagcccccaacacacacacaccagagcctccaacacatacacaccagaggcacttca

SEQ ID NO: 286430 - DNA, 834 bp, Homo sapiens
  misc_feature (651)..(651): n is a, c, g, or t
  misc_feature (655)..(655): n is a, c, g, or t
  misc_feature (659)..(659): n is a, c, g, or t
cgccctgcgcgctcgggctggctcggcggctgcggcgggcgggcaggcgggcaggccggcaggcgggtgcgcggagggctggtgccccgcagcaggtgggcggggtgcggttggcggcggcggctgggccgggggctgccggctgcgctcgggccgtgcgcggcggccgtgcgggcacgccatggacttcaacatgaagaagctggcgtcggacgcgggcatcttcttcacccgggcggtgcagttcacggaggagaaatttggccaggctgagaagactgagcttgatgcccactttgaaaaccttctggcccgggcagacagcaccaagaactggacagagaagatcttgaggcagacagaggtgctgctgcagcccaaccccagtgcccgagtggaggagttcctgtatgagaagctggacaggaaggtcccctcaagggtcaccaacggggagctgctggctcagtacatggcagacgcggccagtgagctggggccgaccaccccctatgggaagacactgatcaaggtggcagaagctgaaaagcaactgggagccgcggagagggattttatccacacggcctccatcagcttcctcacacccttgcgcaacttcctggagggggactggaagaccatctcgangganaggnggttcctccaaaacccgcctttggacttggtttcctgtcaaaggggctctaaaagggcccagggtttaaaaccccaaccccccttttgaatatgaatagggacagggggaaaaggattttctgtggccccaacatgtttgccccccgccaaaaaaaagccccctttttgggtggg

SEQ ID NO: 286431 - DNA, 780 bp, Homo sapiens
cgccctgcgcgctcgggctggctcggcggctgcggcgggcgggcaggcgggcaggccggcaggcgggtgcgcggagggctggtgccccgcagcaggtgggcggggtgcggttggcggcggcggctgggccgggggctgccggctgcgctcgggccgtgcgcggcggccgtgcgggcacgccatggacttcaacatgaagaagctggcgtcggacgcgggcatcttcttcacccgggcggtgcagttcacggaggagaaatttggccaggctgagaagactgagcttgatgcccactttgaaaaccttctggcccgggcagacagcaccaagaactggacagagaagatcttgaggcagacagaggtgctgctgcagcccaaccccagtgcccgagtggaggagttcctgtatgagaagctggacaggaaggtcccctcaagggtcaccaacggggagctgctggctcagtacatggcagacgcggccagtgagctggggccgaccaccccctatgacaggatcttgctgtgtcacccagactggagtgcagtggtgcaatcatagcttactactatagcctcaaactcctgggttcaaatgatccttccgcctgggcctcccagagtattgggattacaggtgtgagccagcgcgcccagcctcttattgtttcttcacatattttttctgccttattttctcctcctcttctgggactcttgttagtcatatgttggttcacttgacagtgccccgtaggtgctgaggcgctgctcatt

SEQ ID NO: 286432 - DNA, 766 bp, Homo sapiens
  misc_feature (539)..(539): n is a, c, g, or t
  misc_feature (577)..(577): n is a, c, g, or t
tgggccaatgaaagcagggtcaaggacaggaccagcgcaggccaaggaagggaatatctgacagcgcccacccagccaaaccctcagtgtccacatttcacagatgagatcagcaagacagtcagctcctcaagggaccacagttggcaagtggccaagcagggactgaagcccaggcagcctgattctagaaaccctaagtgatgtctgtgttttagatggcccctagcaggacctagcattctgacttcagtcctgagaaggccaacagccagtaggccccactgttggggcttctgaagaggggatcgggggatgacgggggcacggggctataaataggaaggcacagagcttcaagaaaggctcacccagggatgagctcagcccactgggccaatgaaagcctggccagggctggtgttgggcccggagcagcatcttccggtgctatcctcccctcccacccctcacagctcaagccaagtccagcggccgcagtcttcacctctccacactcactttttatctggtgtttntacttctgcctgcgtttgctctctagccaataaaccgnccttgtgtgcgacagaaaaaaaaagcaaaaaaaaatgggccacactgacaaacaagaaacctccagggggggcccggtccccaattggccctttgggggggccgtttacaattaaaatggcggcggttttaaaccgccgtaactggaaaaaccctggctttccccaacttattcgcctggcagaacatc

SEQ ID NO: 286433 - DNA, 204 bp, Homo sapiens
agcgcaccccacccccaccccacccctcgtcctcctctctccccacgtcccacaccactgcctctgactgcacaggagctagaagccagcttgggtaaggcgggggcactgccatgtgatcaggtcagtcctgagacactggggagggcagcagcccccacctctgtccacagcctgccccggtgccctgtggccatggagctg

SEQ ID NO: 286434 - DNA, 390 bp, Homo sapiens
ccgcccagcccagcagcctgagccagcagtcaggatggggtggggacactccgtctctcttgagaccccactcagagaatggggctgacactgtaggagaaatataagcaggactcctgctggctgctcccctcctgcatgaggcatgttagagggactgggaccgccagcccccagctcccatgccgggcctcggcccagtctcagctcctgtttgggagggggggcagaggggcaggggggcagaagttgagtctgggagctggggcagggcacaggctctagggtccagctgtcctcctctcccctcccctgctggccactcctgctgccgtctccacactctggaatgatgaagtggacaaggtaagttggggcctggggggctgg

SEQ ID NO: 286435 - DNA, 4542 bp, Homo sapiens
ctttccgacactctttgggaagagaatctctaatgacggcaacagtggagaacctaacgttccagaaggacactttgggaaatgctgttgacaaaaacaggcgccacggctcgacagagccactcgtcctcgcctggtcatcccagttccggaggctgacctggggatgcgccctggacgccctgcaccgcagtccttgcgtcgctgctagtcagcacggcgttacccacctcatccgcagctccaggacgccgcactccacgcgctgccgcaaggaggacgcgcagcctggtcaccatggaaacggtgccgcctccgtcacggctcaagcgagaggtcaaaggtcagtcctgcaagttccgcttccggttccgagatcctgtttgttttctgaaagctttgtggtttcggtgagctctcagagccgatttctagcgtccgtgccggggacaggtgtccagaggtcgactgctgcagacatggcggcctccaccgcggccgggaagcagcggattcccaaagtggccaaggtgaaaaacaaagccccggctgaggtacagataactgctgaacaactcttaagagaggctaaagaaagagaacttgagcttcttccacctccacctcaacagaagatcacagatgaagaagaattaaatgattataaactaaggaaaaggaagacttttgaagataatataagaaaaaacaggactgtgattagtaactggataaaatacgcacaatgggaagaaagcctaaaggagattcaaagggctcgatccatatacgagcgtgctttagatgtagactaccgaaatattacactctggctgaaatacgcagaaatggaaatgaagaatcgccaagtcaaccatgctcgaaatatctgggaccgggccataacaacgctgcctcgagttaatcagttctggtacaagtacacgtacatggaggaaatgttgggaaacgttgccggtgcccggcaggtgtttgagcgctggatggagtggcagcctgaggagcaagcctggcactcctacatcaactttgagctgagatacaaagaggtggatcgggcccgcaccatttatgagcgatttgtcctcgtgcaccctgatgttaagaactggatcaagtatgcccgctttgaagaaaaacatgcttattttgcccatgcacggaaagtgtatgagagagctgtggaattctttggagatgaacatatggatgagcacctttatgttgcctttgccaagtttgaagaaaatcagaaagagtttgaaagggtacgagtgatttacaagtatgccctggacagaatttcaaaacaagatgcccaagaactctttaaaaattataccatctttgagaagaagtttggtgataggcggggtattgaagatatcattgtgagcaaacggagattccagtacgaagaagaagtgaaggcgaatccacacaattatgatgcatggtttgattacttgcgcttggtagaaagtgacgcagaagctgaagccgtgagagaagtctatgaaagggccattgccaatgtcccacccattcaggagaagaggcactggaagcgctacatttatctttggatcaactatgcactctatgaagaattggaggcaaaggatcctgagaggacaagacaggtgtatcaagcctctttggaactaattcctcacaaaaagttcacatttgccaaaatgtggatactgtatgcacagtttgaaatacgacagaagaatctgtcattagccagaagagcattgggaacttccataggcaaatgtccaaagaacaaattatttaaagtttacatagaattggagctacagcttcgagaatttgacagatgccggaagctttatgaaaagttcctggaatttggacctgaaaattgtacctcatggattaaattcgctgaattagagacaatccttggtgatattgacagagcacgggcaatctatgaattagccatcagtcagccacgtttagacatgccagaggtgctttggaaatcatatattgattttgaaattgagcaggaagaaacagaaagaacacgaaacctttaccggcggttgcttcaacggacgcagcatgtcaaggtatggatcagctttgctcagtttgagttgtcttcaggaaaagaaggaagtttgactaaatgcagacaaatttatgaagaagctaacaaaaccatgcgaaactgtgaagaaaaggaagagagacttatgctgctggaatcttggcgaagttttgaagaagaatttggaacagcttcagataaggagagagtagacaaactcatgccagagaaagtcaagaagagaagaaaggtccagactgatgatgggtctgatgcaggctgggaagaatactttgattacatctttccagaagatgctgccaaccaacctaacctcaaactcctggccatggccaaactgtggaagaaacagcagcaggaaaaggaggatgctgagcaccatccagatgaggacgtcgatgagagtgaatcctgatctttttttcatagacaaatgttttgttatttttataaattaattgtttggaactcttgtgactcctggaagttcttatatatttcaccagtaagaaattgattggtatctttgatggctactttttaagttattttttaaatgctcttgggttagctaggggtagggattgcaagtaaaggacttttttaactgctggatttgtttttccaactgagtccaaacttttctaatgtctgtccacatcatgcattaggaaatgtaattaaggtaacattctacagttacttttcatgtcatacccataaagatagtttatgcattcatctgaaatgtgtaactttttcatgtcttcagagtcacagacttgagttcatttcccagctctgccactcatgattatataacttaattttcattttcctcattcacaaaatgggccaatagtttgacagctcattttgaagattacattataaaaggaatatacctggtgggtgcatagtaagtgctcagtaaattgtttgttctaagccacttttaaaaatggtttcattccttgtagaattgaatgcgagtggattaataatttaccttactttcttactagtgtccagttatattgttttttagaacaacacttggaaaataatttgcagtgattatatttctgaacaaggttcagaaaacattgtttactaagaatttagtctaataatttcagttaggcgctcatcagttctccagagtggttgagtttgtaataccttgtttaaagaataatggcttgttcacgtgtgtgctatgaaaaatgatgtcccatgttcacataaatttgggaaattctggactaagacttaagtctcgttaatcaaatctctttatagttaggcttctgtacattatgtatctccagtagcaatgttgccatattatttatttcccaaacttagtggacaatggagtcatttctacctagagtaccagtaaacatctcccagtgtgctatagtagaaaatgtctactcctcactgctgacatgttaaacttactcttggtttagagcatgtgtagaaacacctaaggtagctctatgctaaataatgaagagtagcacaagaatgaatgtatttgctgatacgttgctcacattctcaagcaaaaattcaactgcattaaccgatctgagagttttcctttaacctggactgtgtttctcaagcacattttttctttgttcactgcccaaggactagaactgtatttttaaggttgttttcccctaaaaggacctttagtaagcaaatttattattaaatgtgcacatcttattcacccaagggaataaaagctacttcgtaatgttgttactaaattttatcttgaaaataaataacagtgtttgaggacagaagaaactaggactgttgttgagataaaatctgttttcagcctgactgctttagtcactggacgagcatcagctactgcggtgtcagatcacttctcgagtagaggtctgcctagtgagtgagcaggagaacatcatcttaatagcctttggctcacccagagtcagggagagatgaaaataataggtcagaatgcaagtgacttaatcacagtcttcctagaattatctgtttgtttatgttgcatgaatgcataagaaaaaaattctgtcatgttcccaaggtagaattgtaataagcatgtgccagtgtgaaagctggaaggaaaaaagctattctctaacaggagaacataaagattcatttctctcccaccctcaactccaccaaagtaaatcctttcgatagtaaaagtttaataatttcttgtgggtttttctttcgttaagtctttcactaactaactaactggatattttcacatattacagaggaagacactacacataaaatacatggttggcctatgatatagttatatggcctttctttaggaattatgttcttttccctctccaaaaaaaaaa

SEQ ID NO: 286436 - DNA, 3954 bp, Homo sapiens
ctttccgacactctttgggaagagaatctctaatgacggcaacagtggagaacctaacgttccagaaggacactttgggaaatgctgttgacaaaaacaggcgccacggctcgacagagccactcgtcctcgcctggtcatcccagttccggaggctgacctggggatgcgccctggacgccctgcaccgcagtccttgcgtcgctgctagtcagcacggcgttacccacctcatccgcagctccaggacgccgcactccacgcgctgccgcaaggaggacgcgcagcctggtcaccatggaaacggtgccgcctccgtcacggctcaagcgagaggtcaaaggtcagtcctgcaagttccgcttccggttccgagatcctgtttgttttctgaaagctttgtggtttcggtgagctctcagagccgatttctagcgtccgtgccggggacaggtgtccagaggtcgactgctgcagacatggcggcctccaccgcggccgggaagcagcggattcccaaagtggccaaggtgaaaaacaaagccccggctgaggtacagataactgctgaacaactcttaagagaggctaaagaaagagaacttgagcttcttccacctccacctcaacagaagatcacagatgaagaagaattaaatgattataaactaaggaaaaggaagacttttgaagataatataagaaaaaacaggactgtgattagtaactggataaaatacgcacaatgggaagaaagcctaaaggagattcaaagggctcgatccatatacgagcgtgctttagatgtagactaccgaaatattacactctggctgaaatacgcagaaatggaaatgaagaatcgccaagtcaaccatgctcgaaatatctgggaccgggccataacaacgctgcctcgagttaatcagttctggtacaagtacacgtacatggaggaaatgttgggaaacgttgccggtgcccggcaggtgtttgagcgctggatggagtggcagcctgaggagcaagcctggcactcctacatcaactttgagctgagatacaaagaggtggatcgggcccgcaccatttatgagcgatttgtcctcgtgcaccctgatgttaagaactggatcaagtatgcccgctttgaagaaaaacatgcttattttgcccatgcacggaaagtgtatgagagagctgtggaattctttggagatgaacatatggatgagcacctttatgttgcctttgccaagtttgaagaaaatcagaaagagtttgaaagggtacgagtgatttacaagtatgccctggacagaatttcaaaacaagatgcccaagaactctttaaaaattataccatctttgagaagaagtttggtgataggcggggtattgaagatatcattgtgagcaaacggagattccagtacgaagaagaagtgaaggcgaatccacacaattatgatgcatggtttgattacttgcgcttggtagaaagtgacgcagaagctgaagccgtgagagaagtctatgaaagggccattgccaatgtcccacccattcaggagaagaggcactggaagcgctacatttatctttggatcaactatgcactctatgaagaattggaggcaaaggatcctgagaggacaagacaggtgtatcaagcctctttggaactaattcctcacaaaaagttcacatttgccaaaatgtggatactgtatgcacagtttgaaatacgacagaagaatctgtcattagccagaagagcattgggaacttccataggcaaatgtccaaagaacaaattatttaaagtttacatagaattggagctacagcttcgagaatttgacagatgccggaagctttatgaaaagttcctggaatttggacctgaaaattgtacctcatggattaaattcgctgaattagagacaatccttggtgatattgacagagcacgggcaatctatgaattagccatcagtcagccacgtttagacatgccagaggtgctttggaaatcatatattgattttgaaattgagcaggaagaaacagaaagaacacgaaacctttaccggcggttgcttcaacggacgcagcatgtcaaggtatggatcagctttgctcagtttgagttgtcttcaggaaaagaaggaagtttgactaaatgcagacaaatttatgaagaagctaacaaaaccatgcgaaactgtgaagaaaaggaagagagacttatgctgctggaatcttggcgaagttttgaagaagaatttggaacagcttcagataaggagagagtagacaaactcatgccagagaaagtcaagaagagaagaaaggtccagactgatgatgggtctgatgcaggctgggaagaatactttgattacatctttccagaagatgctgccaaccaacctaacctcaaactcctggccatggccaaactgtggaagaaacagcagcaggaaaaggaggatgctgagcaccatccagatgaggacgtcgatgagagtgaatcctgatctttttttcatagacaaatgttttgttatttttataaattaattgtttggaactcttgtgactcctggaagttcttatatatttcaccagtaagaaattgattggtatctttgatggctactttttaagttattttttaaatgctcttgggttagctaggggtagggattgcaagtaaaggacttttttaactgctggatttgtttttccaactgagtccaaacttttctaatgtctgtccacatcatgcattaggaaatgtaattaaggtaacattctacagttacttttcatgtcatacccataaagatagtttatgcattcatctgaaatgtgtaactttttcatgtcttcagagtcacagacttgagttcatttcccagctctgccactcatgattatataacttaattttcattttcctcattcacaaaatgggccaatagtttgacagctcattttgaagattacattataaaaggaatatacctggtgggtgcatagtaagtgctcagtaaattgtttgttctaagccacttttaaaaatggtttcattccttgtagaattgaatgcgagtggattaataatttaccttactttcttactagtgtccagttatattgttttttagaacaacacttggaaaataatttgcagtgattatatttctgaacaaggttcagaaaacattgtttactaagaatttagtctaataatttcagttaggcgctcatcagttctccagagtggttgagtttgtaataccttgtttaaagaataatggcttgttcacgtgtgtgctatgaaaaatgatgtcccatgttcacataaatttgggaaattctggactaagacttaagtctcgttaatcaaatctctttatagttaggcttctgtacattatgtatctccagtagcaatgttgccatattatttatttcccaaacttagtggacaatggagtcatttctacctagagtaccagtaaacatctcccagtgtgctatagtagaaaatgtctactcctcactgctgacatgttaaacttactcttggtttagagcatgtgtagaaacacctaaggtagctctatgctaaataatgaagagtagcacaagaatgaatgtatttgctgatacgttgctcacattctcaagcaaaaattcaactgcattaaccgatctgagagttttcctttaacctggactgtgtttctcaagcacattttttctttgttcactgcccaaggactagaactgtatttttaaggttgttttcccctaaaaggacctttagtaagcaaatttattattaaatgtgcacatcttattcacccaagggaataaaagctacttcgtaatgttgttactaaattttatcttgaaaataaataacagtgtttgaggaca

SEQ ID NO: 286437 - DNA, 4578 bp, Homo sapiens
  misc_feature (122)..(122): n is a, c, g, or t
  misc_feature (135)..(135): n is a, c, g, or t
ctttccgacactctttgggaagagaatctctaatgacggcaacagtggagaacctaacgttccagaaggacactttgggaaatgctgttgacaaaaacacatccagattggagctccgttcntactcccttgcanggcgccacggctcgacagagccactcgtcctcgcctggtcatcccagttccggaggctgacctggggatgcgccctggacgccctgcaccgcagtccttgcgtcgctgctagtcagcacggcgttacccacctcatccgcagctccaggacgccgcactccacgcgctgccgcaaggaggacgcgcagcctggtcaccatggaaacggtgccgcctccgtcacggctcaagcgagaggtcaaaggtcagtcctgcaagttccgcttccggttccgagatcctgtttgttttctgaaagctttgtggtttcggtgagctctcagagccgatttctagcgtccgtgccggggacaggtgtccagaggtcgactgctgcagacatggcggcctccaccgcggccgggaagcagcggattcccaaagtggccaaggtgaaaaacaaagccccggctgaggtacagataactgctgaacaactcttaagagaggctaaagaaagagaacttgagcttcttccacctccacctcaacagaagatcacagatgaagaagaattaaatgattataaactaaggaaaaggaagacttttgaagataatataagaaaaaacaggactgtgattagtaactggataaaatacgcacaatgggaagaaagcctaaaggagattcaaagggctcgatccatatacgagcgtgctttagatgtagactaccgaaatattacactctggctgaaatacgcagaaatggaaatgaagaatcgccaagtcaaccatgctcgaaatatctgggaccgggccataacaacgctgcctcgagttaatcagttctggtacaagtacacgtacatggaggaaatgttgggaaacgttgccggtgcccggcaggtgtttgagcgctggatggagtggcagcctgaggagcaagcctggcactcctacatcaactttgagctgagatacaaagaggtggatcgggcccgcaccatttatgagcgatttgtcctcgtgcaccctgatgttaagaactggatcaagtatgcccgctttgaagaaaaacatgcttattttgcccatgcacggaaagtgtatgagagagctgtggaattctttggagatgaacatatggatgagcacctttatgttgcctttgccaagtttgaagaaaatcagaaagagtttgaaagggtacgagtgatttacaagtatgccctggacagaatttcaaaacaagatgcccaagaactctttaaaaattataccatctttgagaagaagtttggtgataggcggggtattgaagatatcattgtgagcaaacggagattccagtacgaagaagaagtgaaggcgaatccacacaattatgatgcatggtttgattacttgcgcttggtagaaagtgacgcagaagctgaagccgtgagagaagtctatgaaagggccattgccaatgtcccacccattcaggagaagaggcactggaagcgctacatttatctttggatcaactatgcactctatgaagaattggaggcaaaggatcctgagaggacaagacaggtgtatcaagcctctttggaactaattcctcacaaaaagttcacatttgccaaaatgtggatactgtatgcacagtttgaaatacgacagaagaatctgtcattagccagaagagcattgggaacttccataggcaaatgtccaaagaacaaattatttaaagtttacatagaattggagctacagcttcgagaatttgacagatgccggaagctttatgaaaagttcctggaatttggacctgaaaattgtacctcatggattaaattcgctgaattagagacaatccttggtgatattgacagagcacgggcaatctatgaattagccatcagtcagccacgtttagacatgccagaggtgctttggaaatcatatattgattttgaaattgagcaggaagaaacagaaagaacacgaaacctttaccggcggttgcttcaacggacgcagcatgtcaaggtatggatcagctttgctcagtttgagttgtcttcaggaaaagaaggaagtttgactaaatgcagacaaatttatgaagaagctaacaaaaccatgcgaaactgtgaagaaaaggaagagagacttatgctgctggaatcttggcgaagttttgaagaagaatttggaacagcttcagataaggagagagtagacaaactcatgccagagaaagtcaagaagagaagaaaggtccagactgatgatgggtctgatgcaggctgggaagaatactttgattacatctttccagaagatgctgccaaccaacctaacctcaaactcctggccatggccaaactgtggaagaaacagcagcaggaaaaggaggatgctgagcaccatccagatgaggacgtcgatgagagtgaatcctgatctttttttcatagacaaatgttttgttatttttataaattaattgtttggaactcttgtgactcctggaagttcttatatatttcaccagtaagaaattgattggtatctttgatggctactttttaagttattttttaaatgctcttgggttagctaggggtagggattgcaagtaaaggacttttttaactgctggatttgtttttccaactgagtccaaacttttctaatgtctgtccacatcatgcattaggaaatgtaattaaggtaacattctacagttacttttcatgtcatacccataaagatagtttatgcattcatctgaaatgtgtaactttttcatgtcttcagagtcacagacttgagttcatttcccagctctgccactcatgattatataacttaattttcattttcctcattcacaaaatgggccaatagtttgacagctcattttgaagattacattataaaaggaatatacctggtgggtgcatagtaagtgctcagtaaattgtttgttctaagccacttttaaaaatggtttcattccttgtagaattgaatgcgagtggattaataatttaccttactttcttactagtgtccagttatattgttttttagaacaacacttggaaaataatttgcagtgattatatttctgaacaaggttcagaaaacattgtttactaagaatttagtctaataatttcagttaggcgctcatcagttctccagagtggttgagtttgtaataccttgtttaaagaataatggcttgttcacgtgtgtgctatgaaaaatgatgtcccatgttcacataaatttgggaaattctggactaagacttaagtctcgttaatcaaatctctttatagttaggcttctgtacattatgtatctccagtagcaatgttgccatattatttatttcccaaacttagtggacaatggagtcatttctacctagagtaccagtaaacatctcccagtgtgctatagtagaaaatgtctactcctcactgctgacatgttaaacttactcttggtttagagcatgtgtagaaacacctaaggtagctctatgctaaataatgaagagtagcacaagaatgaatgtatttgctgatacgttgctcacattctcaagcaaaaattcaactgcattaaccgatctgagagttttcctttaacctggactgtgtttctcaagcacattttttctttgttcactgcccaaggactagaactgtatttttaaggttgttttcccctaaaaggacctttagtaagcaaatttattattaaatgtgcacatcttattcacccaagggaataaaagctacttcgtaatgttgttactaaattttatcttgaaaataaataacagtgtttgaggacagaagaaactaggactgttgttgagataaaatctgttttcagcctgactgctttagtcactggacgagcatcagctactgcggtgtcagatcacttctcgagtagaggtctgcctagtgagtgagcaggagaacatcatcttaatagcctttggctcacccagagtcagggagagatgaaaataataggtcagaatgcaagtgacttaatcacagtcttcctagaattatctgtttgtttatgttgcatgaatgcataagaaaaaaattctgtcatgttcccaaggtagaattgtaataagcatgtgccagtgtgaaagctggaaggaaaaaagctattctctaacaggagaacataaagattcatttctctcccaccctcaactccaccaaagtaaatcctttcgatagtaaaagtttaataatttcttgtgggtttttctttcgttaagtctttcactaactaactaactggatattttcacatattacagaggaagacactacacataaaatacatggttggcctatgatatagttatatggcctttctttaggaattatgttcttttccctctccaaaaaaaaaa

SEQ ID NO: 286438 - DNA, 4357 bp, Homo sapiens
ctttccgacactctttgggaagagaatctctaatgacggcaacagtggagaacctaacgttccagaaggacactttgggaaatgctgttgacaaaaacaggcgccacggctcgacagagccactcgtcctcgcctggtcatcccagttccggaggctgacctggggatgcgccctggacgccctgcaccgcagtccttgcgtcgctgctagtcagcacggcgttacccacctcatccgcagctccaggacgccgcactccacgcgctgccgcaaggaggacgcgcagcctggtcaccatggaaacggtgccgcctccgtcacggctcaagcgagaggtcaaaggtgtgaaaaacaaagccccggctgaggtacagataactgctgaacaactcttaagagaggctaaagaaagagaacttgagcttcttccacctccacctcaacagaagatcacagatgaagaagaattaaatgattataaactaaggaaaaggaagacttttgaagataatataagaaaaaacaggactgtgattagtaactggataaaatacgcacaatgggaagaaagcctaaaggagattcaaagggctcgatccatatacgagcgtgctttagatgtagactaccgaaatattacactctggctgaaatacgcagaaatggaaatgaagaatcgccaagtcaaccatgctcgaaatatctgggaccgggccataacaacgctgcctcgagttaatcagttctggtacaagtacacgtacatggaggaaatgttgggaaacgttgccggtgcccggcaggtgtttgagcgctggatggagtggcagcctgaggagcaagcctggcactcctacatcaactttgagctgagatacaaagaggtggatcgggcccgcaccatttatgagcgatttgtcctcgtgcaccctgatgttaagaactggatcaagtatgcccgctttgaagaaaaacatgcttattttgcccatgcacggaaagtgtatgagagagctgtggaattctttggagatgaacatatggatgagcacctttatgttgcctttgccaagtttgaagaaaatcagaaagagtttgaaagggtacgagtgatttacaagtatgccctggacagaatttcaaaacaagatgcccaagaactctttaaaaattataccatctttgagaagaagtttggtgataggcggggtattgaagatatcattgtgagcaaacggagattccagtacgaagaagaagtgaaggcgaatccacacaattatgatgcatggtttgattacttgcgcttggtagaaagtgacgcagaagctgaagccgtgagagaagtctatgaaagggccattgccaatgtcccacccattcaggagaagaggcactggaagcgctacatttatctttggatcaactatgcactctatgaagaattggaggcaaaggatcctgagaggacaagacaggtgtatcaagcctctttggaactaattcctcacaaaaagttcacatttgccaaaatgtggatactgtatgcacagtttgaaatacgacagaagaatctgtcattagccagaagagcattgggaacttccataggcaaatgtccaaagaacaaattatttaaagtttacatagaattggagctacagcttcgagaatttgacagatgccggaagctttatgaaaagttcctggaatttggacctgaaaattgtacctcatggattaaattcgctgaattagagacaatccttggtgatattgacagagcacgggcaatctatgaattagccatcagtcagccacgtttagacatgccagaggtgctttggaaatcatatattgattttgaaattgagcaggaagaaacagaaagaacacgaaacctttaccggcggttgcttcaacggacgcagcatgtcaaggtatggatcagctttgctcagtttgagttgtcttcaggaaaagaaggaagtttgactaaatgcagacaaatttatgaagaagctaacaaaaccatgcgaaactgtgaagaaaaggaagagagacttatgctgctggaatcttggcgaagttttgaagaagaatttggaacagcttcagataaggagagagtagacaaactcatgccagagaaagtcaagaagagaagaaaggtccagactgatgatgggtctgatgcaggctgggaagaatactttgattacatctttccagaagatgctgccaaccaacctaacctcaaactcctggccatggccaaactgtggaagaaacagcagcaggaaaaggaggatgctgagcaccatccagatgaggacgtcgatgagagtgaatcctgatctttttttcatagacaaatgttttgttatttttataaattaattgtttggaactcttgtgactcctggaagttcttatatatttcaccagtaagaaattgattggtatctttgatggctactttttaagttattttttaaatgctcttgggttagctaggggtagggattgcaagtaaaggacttttttaactgctggatttgtttttccaactgagtccaaacttttctaatgtctgtccacatcatgcattaggaaatgtaattaaggtaacattctacagttacttttcatgtcatacccataaagatagtttatgcattcatctgaaatgtgtaactttttcatgtcttcagagtcacagacttgagttcatttcccagctctgccactcatgattatataacttaattttcattttcctcattcacaaaatgggccaatagtttgacagctcattttgaagattacattataaaaggaatatacctggtgggtgcatagtaagtgctcagtaaattgtttgttctaagccacttttaaaaatggtttcattccttgtagaattgaatgcgagtggattaataatttaccttactttcttactagtgtccagttatattgttttttagaacaacacttggaaaataatttgcagtgattatatttctgaacaaggttcagaaaacattgtttactaagaatttagtctaataatttcagttaggcgctcatcagttctccagagtggttgagtttgtaataccttgtttaaagaataatggcttgttcacgtgtgtgctatgaaaaatgatgtcccatgttcacataaatttgggaaattctggactaagacttaagtctcgttaatcaaatctctttatagttaggcttctgtacattatgtatctccagtagcaatgttgccatattatttatttcccaaacttagtggacaatggagtcatttctacctagagtaccagtaaacatctcccagtgtgctatagtagaaaatgtctactcctcactgctgacatgttaaacttactcttggtttagagcatgtgtagaaacacctaaggtagctctatgctaaataatgaagagtagcacaagaatgaatgtatttgctgatacgttgctcacattctcaagcaaaaattcaactgcattaaccgatctgagagttttcctttaacctggactgtgtttctcaagcacattttttctttgttcactgcccaaggactagaactgtatttttaaggttgttttcccctaaaaggacctttagtaagcaaatttattattaaatgtgcacatcttattcacccaagggaataaaagctacttcgtaatgttgttactaaattttatcttgaaaataaataacagtgtttgaggacagaagaaactaggactgttgttgagataaaatctgttttcagcctgactgctttagtcactggacgagcatcagctactgcggtgtcagatcacttctcgagtagaggtctgcctagtgagtgagcaggagaacatcatcttaatagcctttggctcacccagagtcagggagagatgaaaataataggtcagaatgcaagtgacttaatcacagtcttcctagaattatctgtttgtttatgttgcatgaatgcataagaaaaaaattctgtcatgttcccaaggtagaattgtaataagcatgtgccagtgtgaaagctggaaggaaaaaagctattctctaacaggagaacataaagattcatttctctcccaccctcaactccaccaaagtaaatcctttcgatagtaaaagtttaataatttcttgtgggtttttctttcgttaagtctttcactaactaactaactggatattttcacatattacagaggaagacactacacataaaatacatggttggcctatgatatagttatatggcctttctttaggaattatgttcttttccctctccaaaaaaaaaa

SEQ ID NO: 286439 - DNA, 4263 bp, Homo sapiens
ctttccgacactctttgggaagagaatctctaatgacggcaacagtggagaacctaacgttccagaaggacactttgggaaatgctgttgacaaaaacatccttgcgtcgctgctagtcagcacggcgttacccacctcatccgcagctccaggacgccgcactccacgcgctgccgcaaggaggacgcgcagcctggtcaccatggaaacggtgccgcctccgtcacggctcaagcgagaggtcaaaggtgtgaaaaacaaagccccggctgaggtacagataactgctgaacaactcttaagagaggctaaagaaagagaacttgagcttcttccacctccacctcaacagaagatcacagatgaagaagaattaaatgattataaactaaggaaaaggaagacttttgaagataatataagaaaaaacaggactgtgattagtaactggataaaatacgcacaatgggaagaaagcctaaaggagattcaaagggctcgatccatatacgagcgtgctttagatgtagactaccgaaatattacactctggctgaaatacgcagaaatggaaatgaagaatcgccaagtcaaccatgctcgaaatatctgggaccgggccataacaacgctgcctcgagttaatcagttctggtacaagtacacgtacatggaggaaatgttgggaaacgttgccggtgcccggcaggtgtttgagcgctggatggagtggcagcctgaggagcaagcctggcactcctacatcaactttgagctgagatacaaagaggtggatcgggcccgcaccatttatgagcgatttgtcctcgtgcaccctgatgttaagaactggatcaagtatgcccgctttgaagaaaaacatgcttattttgcccatgcacggaaagtgtatgagagagctgtggaattctttggagatgaacatatggatgagcacctttatgttgcctttgccaagtttgaagaaaatcagaaagagtttgaaagggtacgagtgatttacaagtatgccctggacagaatttcaaaacaagatgcccaagaactctttaaaaattataccatctttgagaagaagtttggtgataggcggggtattgaagatatcattgtgagcaaacggagattccagtacgaagaagaagtgaaggcgaatccacacaattatgatgcatggtttgattacttgcgcttggtagaaagtgacgcagaagctgaagccgtgagagaagtctatgaaagggccattgccaatgtcccacccattcaggagaagaggcactggaagcgctacatttatctttggatcaactatgcactctatgaagaattggaggcaaaggatcctgagaggacaagacaggtgtatcaagcctctttggaactaattcctcacaaaaagttcacatttgccaaaatgtggatactgtatgcacagtttgaaatacgacagaagaatctgtcattagccagaagagcattgggaacttccataggcaaatgtccaaagaacaaattatttaaagtttacatagaattggagctacagcttcgagaatttgacagatgccggaagctttatgaaaagttcctggaatttggacctgaaaattgtacctcatggattaaattcgctgaattagagacaatccttggtgatattgacagagcacgggcaatctatgaattagccatcagtcagccacgtttagacatgccagaggtgctttggaaatcatatattgattttgaaattgagcaggaagaaacagaaagaacacgaaacctttaccggcggttgcttcaacggacgcagcatgtcaaggtatggatcagctttgctcagtttgagttgtcttcaggaaaagaaggaagtttgactaaatgcagacaaatttatgaagaagctaacaaaaccatgcgaaactgtgaagaaaaggaagagagacttatgctgctggaatcttggcgaagttttgaagaagaatttggaacagcttcagataaggagagagtagacaaactcatgccagagaaagtcaagaagagaagaaaggtccagactgatgatgggtctgatgcaggctgggaagaatactttgattacatctttccagaagatgctgccaaccaacctaacctcaaactcctggccatggccaaactgtggaagaaacagcagcaggaaaaggaggatgctgagcaccatccagatgaggacgtcgatgagagtgaatcctgatctttttttcatagacaaatgttttgttatttttataaattaattgtttggaactcttgtgactcctggaagttcttatatatttcaccagtaagaaattgattggtatctttgatggctactttttaagttattttttaaatgctcttgggttagctaggggtagggattgcaagtaaaggacttttttaactgctggatttgtttttccaactgagtccaaacttttctaatgtctgtccacatcatgcattaggaaatgtaattaaggtaacattctacagttacttttcatgtcatacccataaagatagtttatgcattcatctgaaatgtgtaactttttcatgtcttcagagtcacagacttgagttcatttcccagctctgccactcatgattatataacttaattttcattttcctcattcacaaaatgggccaatagtttgacagctcattttgaagattacattataaaaggaatatacctggtgggtgcatagtaagtgctcagtaaattgtttgttctaagccacttttaaaaatggtttcattccttgtagaattgaatgcgagtggattaataatttaccttactttcttactagtgtccagttatattgttttttagaacaacacttggaaaataatttgcagtgattatatttctgaacaaggttcagaaaacattgtttactaagaatttagtctaataatttcagttaggcgctcatcagttctccagagtggttgagtttgtaataccttgtttaaagaataatggcttgttcacgtgtgtgctatgaaaaatgatgtcccatgttcacataaatttgggaaattctggactaagacttaagtctcgttaatcaaatctctttatagttaggcttctgtacattatgtatctccagtagcaatgttgccatattatttatttcccaaacttagtggacaatggagtcatttctacctagagtaccagtaaacatctcccagtgtgctatagtagaaaatgtctactcctcactgctgacatgttaaacttactcttggtttagagcatgtgtagaaacacctaaggtagctctatgctaaataatgaagagtagcacaagaatgaatgtatttgctgatacgttgctcacattctcaagcaaaaattcaactgcattaaccgatctgagagttttcctttaacctggactgtgtttctcaagcacattttttctttgttcactgcccaaggactagaactgtatttttaaggttgttttcccctaaaaggacctttagtaagcaaatttattattaaatgtgcacatcttattcacccaagggaataaaagctacttcgtaatgttgttactaaattttatcttgaaaataaataacagtgtttgaggacagaagaaactaggactgttgttgagataaaatctgttttcagcctgactgctttagtcactggacgagcatcagctactgcggtgtcagatcacttctcgagtagaggtctgcctagtgagtgagcaggagaacatcatcttaatagcctttggctcacccagagtcagggagagatgaaaataataggtcagaatgcaagtgacttaatcacagtcttcctagaattatctgtttgtttatgttgcatgaatgcataagaaaaaaattctgtcatgttcccaaggtagaattgtaataagcatgtgccagtgtgaaagctggaaggaaaaaagctattctctaacaggagaacataaagattcatttctctcccaccctcaactccaccaaagtaaatcctttcgatagtaaaagtttaataatttcttgtgggtttttctttcgttaagtctttcactaactaactaactggatattttcacatattacagaggaagacactacacataaaatacatggttggcctatgatatagttatatggcctttctttaggaattatgttcttttccctctccaaaaaaaaaa

SEQ ID NO: 286440 - DNA, 4362 bp, Homo sapiens
agctgttccaaggattcaagctttggtcagtttgagcttgtcttcagagaaaagaaggaagtttgactaaatgcagacaaatttatgaagaagctaacaaaaccatgcgaaactgtgaagaagaggaagagagacttatgctgctggaatcttggcgaagttttgaagaagaatttggaacagcttcagataaggagagagtagacaaactcatgccagagaaagtcaagaagagaagaaaggtccagaccgatgatgggtctgatgcaggctgggaagaatactttgattacatctttccagaagatgctgccaaccaacctaacctcaaactcctggccatggccaaggtgaaaaacaaagccccggctgaggtacagataactgctgaacaactcttaagagaggctaaagaaagagaacttgagcttcttccacctccacctcaacagaagatcacagatgaagaagaattaaatgattataaactaaggaaaaggaagacttttgaagataatataagaaaaaacaggactgtgattagtaactggataaaatacgcacaatgggaagaaagcctaaaggagattcaaagggctcgatccatatacgagcgtgctttagatgtagactaccgaaatattacactctggctgaaatacgcagaaatggaaatgaagaatcgccaagtcaaccatgctcgaaatatctgggaccgggccataacaacgctgcctcgagttaatcagttctggtacaagtacacgtacatggaggaaatgttgggaaacgttgccggtgcccggcaggtgtttgagcgctggatggagtggcagcctgaggagcaagcctggcactcctacatcaactttgagctgagatacaaagaggtggatcgggcccgcaccatttatgagcgatttgtcctcgtgcaccctgatgttaagaactggatcaagtatgcccgctttgaagaaaaacatgcttattttgcccatgcacggaaagtgtatgagagagctgtggaattctttggagatgaacatatggatgagcacctttatgttgcctttgccaagtttgaagaaaatcagaaagagtttgaaagggtacgagtgatttacaagtatgccctggacagaatttcaaaacaagatgcccaagaactctttaaaaattataccatctttgagaagaagtttggtgataggcggggtattgaagatatcattgtgagcaaacggagattccagtacgaagaagaagtgaaggcgaatccacacaattatgatgcatggtttgattacttgcgcttggtagaaagtgacgcagaagctgaagccgtgagagaagtctatgaaagggccattgccaatgtcccacccattcaggagaagaggcactggaagcgctacatttatctttggatcaactatgcactctatgaagaattggaggcaaaggatcctgagaggacaagacaggtgtatcaagcctctttggaactaattcctcacaaaaagttcacatttgccaaaatgtggatactgtatgcacagtttgaaatacgacagaagaatctgtcattagccagaagagcattgggaacttccataggcaaatgtccaaagaacaaattatttaaagtttacatagaattggagctacagcttcgagaatttgacagatgccggaagctttatgaaaagttcctggaatttggacctgaaaattgtacctcatggattaaattcgctgaattagagacaatccttggtgatattgacagagcacgggcaatctatgaattagccatcagtcagccacgtttagacatgccagaggtgctttggaaatcatatattgattttgaaattgagcaggaagaaacagaaagaacacgaaacctttaccggcggttgcttcaacggacgcagcatgtcaaggtatggatcagctttgctcagtttgagttgtcttcaggaaaagaaggaagtttgactaaatgcagacaaatttatgaagaagctaacaaaaccatgcgaaactgtgaagaaaaggaagagagacttatgctgctggaatcttggcgaagttttgaagaagaatttggaacagcttcagataaggagagagtagacaaactcatgccagagaaagtcaagaagagaagaaaggtccagactgatgatgggtctgatgcaggctgggaagaatactttgattacatctttccagaagatgctgccaaccaacctaacctcaaactcctggccatggccaaactgtggaagaaacagcagcaggaaaaggaggatgctgagcaccatccagatgaggacgtcgatgagagtgaatcctgatctttttttcatagacaaatgttttgttatttttataaattaattgtttggaactcttgtgactcctggaagttcttatatatttcaccagtaagaaattgattggtatctttgatggctactttttaagttattttttaaatgctcttgggttagctaggggtagggattgcaagtaaaggacttttttaactgctggatttgtttttccaactgagtccaaacttttctaatgtctgtccacatcatgcattaggaaatgtaattaaggtaacattctacagttacttttcatgtcatacccataaagatagtttatgcattcatctgaaatgtgtaactttttcatgtcttcagagtcacagacttgagttcatttcccagctctgccactcatgattatataacttaattttcattttcctcattcacaaaatgggccaatagtttgacagctcattttgaagattacattataaaaggaatatacctggtgggtgcatagtaagtgctcagtaaattgtttgttctaagccacttttaaaaatggtttcattccttgtagaattgaatgcgagtggattaataatttaccttactttcttactagtgtccagttatattgttttttagaacaacacttggaaaataatttgcagtgattatatttctgaacaaggttcagaaaacattgtttactaagaatttagtctaataatttcagttaggcgctcatcagttctccagagtggttgagtttgtaataccttgtttaaagaataatggcttgttcacgtgtgtgctatgaaaaatgatgtcccatgttcacataaatttgggaaattctggactaagacttaagtctcgttaatcaaatctctttatagttaggcttctgtacattatgtatctccagtagcaatgttgccatattatttatttcccaaacttagtggacaatggagtcatttctacctagagtaccagtaaacatctcccagtgtgctatagtagaaaatgtctactcctcactgctgacatgttaaacttactcttggtttagagcatgtgtagaaacacctaaggtagctctatgctaaataatgaagagtagcacaagaatgaatgtatttgctgatacgttgctcacattctcaagcaaaaattcaactgcattaaccgatctgagagttttcctttaacctggactgtgtttctcaagcacattttttctttgttcactgcccaaggactagaactgtatttttaaggttgttttcccctaaaaggacctttagtaagcaaatttattattaaatgtgcacatcttattcacccaagggaataaaagctacttcgtaatgttgttactaaattttatcttgaaaataaataacagtgtttgaggacagaagaaactaggactgttgttgagataaaatctgttttcagcctgactgctttagtcactggacgagcatcagctactgcggtgtcagatcacttctcgagtagaggtctgcctagtgagtgagcaggagaacatcatcttaatagcctttggctcacccagagtcagggagagatgaaaataataggtcagaatgcaagtgacttaatcacagtcttcctagaattatctgtttgtttatgttgcatgaatgcataagaaaaaaattctgtcatgttcccaaggtagaattgtaataagcatgtgccagtgtgaaagctggaaggaaaaaagctattctctaacaggagaacataaagattcatttctctcccaccctcaactccaccaaagtaaatcctttcgatagtaaaagtttaataatttcttgtgggtttttctttcgttaagtctttcactaactaactaactggatattttcacatattacagaggaagacactacacataaaatacatggttggcctatgatatagttatatggcctttctttaggaattatgttcttttccctctccaaaaaaaaaa

SEQ ID NO: 286441 - DNA, 3392 bp, Homo sapiens
ctttccgacactctttgggaagagaatctctaatgacggcaacagtggagaacctaacgttccagaaggacactttgggaaatgctgttgacaaaaacaggcgccacggctcgacagagccactcgtcctcgcctggtcatcccagttccggaggctgacctggggatgcgccctggacgccctgcaccgcagtccttgcgtcgctgctagtcagcacggcgttacccacctcatccgcagctccaggacgccgcactccacgcgctgccgcaaggaggacgcgcagcctggtcaccatggaaacggtgccgcctccgtcacggctcaagcgagaggtcaaaggtcagtcctgcaagttccgcttccggttccgagatcctgtttgttttctgaaagctttgtggtttcggtgagctctcagagccgatttctagcgtccgtgccggggacaggtgtccagaggtcgactgctgcagacatggcggcctccaccgcggccgggaagcagcggattcccaaagtggccaaggtgaaaaacaaagccccggctgaggtacagataactgctgaacaactcttaagagaggctaaagaaagagaacttgagcttcttccacctccacctcaacagaagatcacagatgaagaagaattaaatgattataaactaaggaaaaggaagacttttgaagataatataagaaaaaacaggactgtgattagtaactggataaaatacgcacaatgggaagaaagcctaaaggagattcaaagggctcgatccatatacgagcgtgctttagatgtagactaccgaaatattacactctggctgaaatacgcagaaatggaaatgaagaatcgccaagtcaaccatgctcgaaatatctgggaccgggccataacaacgctgcctcgagttaatcagttctggtacaagtacacgtacatggaggaaatgttgggaaacgttgccggtgcccggcaggtgtttgagcgctggatggagtggcagcctgaggagcaagcctggcactcctacatcaactttgagctgagatacaaagaggtggatcgggcccgcaccatttatgagcgatttgtcctcgtgcaccctgatgttaagaactggatcaagtatgcccgctttgaagaaaaacatgcttattttgcccatgcacggaaagtgtatgagagagctgtggaattctttggagatgaacatatggatgagcacctttatgttgcctttgccaagtttgaagaaaatcagaaagagtttgaaagggtacgagtgatttacaagtatgccctggacagaatttcaaaacaagatgcccaagaactctttaaaaattataccatctttgagaagaagtttggtgataggcggggtattgaagatatcattgtgagcaaacggagattccagtacgaagaagaagtgaaggcgaatccacacaattatgatgcatggtttgattacttgcgcttggtagaaagtgacgcagaagctgaagccgtgagagaagtctatgaaagggccattgccaatgtcccacccattcaggagaagaggcactggaagcgctacatttatctttggatcaactatgcactctatgaagaattggaggcaaaggatcctgagaggacaagacaggtgtatcaagcctctttggaactaattcctcacaaaaagttcacatttgccaaaatgtggatactgtatgcacagtttgaaatacgacagaagaatctgtcattagccagaagagcattgggaacttccataggcaaatgtccaaagaacaaattatttaaagtttacatagaattggagctacagcttcgagaatttgacagatgccggaagctttatgaaaagttcctggaatttggacctgaaaattgtacctcatggattaaattcgctgaattagagacaatccttggtgatattgacagagcacgggcaatctatgaattagccatcagtcagccacgtttagacatgccagaggtgctttggaaatcatatattgattttgaaattgagcaggaagaaacagaaagaacacgaaacctttaccggcggttgcttcaacggacgcagcatgtcaaggtatggatcagctttgctcagtttgagttgtcttcaggaaaagaaggaagtttgactaaatgcagacaaatttatgaagaagctaacaaaaccatgcgaaactgtgaagaaaaggaagagagacttatgctgctggaatcttggcgaagttttgaagaagaatttggaacagcttcagataaggagagagtagacaaactcatgccagagaaagtcaagaagagaagaaaggtccagactgatgatgggtctgatgcaggctgggaagaatactttgattacatctttccagaagatgctgccaaccaacctaacctcaaactcctggccatggccaaactgtggaagaaacagcagcaggaaaaggaggatgctgagcaccatccagatgaggacgtcgatgagagtgaatcctgatctttttttcatagacaaatgttttgttatttttataaattaattgtttggaactcttgtgactcctggaagttcttatatatttcaccagtaagaaattgattggtatctttgatggctactttttaagttattttttaaatgctcttgggttagctaggggtagggattgcaagtaaaggacttttttaactgctggatttgtttttccaactgagtccaaacttttctaatgtctgtccacatcatgcattaggaaatgtaattaaggtaacattctacagttacttttcatgtcatacccataaagatagtttatgcattcatctgaaatgtgtaactttttcatgtcttcagagtcacagacttgagttcatttcccagctctgccactcatgattatataacttaattttcattttcctcattcacaaaatgggccaatagtttgacagctcattttgaagattacattataaaaggaatatacctggtgggtgcatagtaagtgctcagtaaattgtttgttctaagccacttttaaaaatggtttcattccttgtagaattgaatgcgagtggattaataatttaccttactttcttactagtgtccagttatattgttttttagaacaacacttggaaaataatttgcagtgattatatttctgaacaaggttcagaaaacattgtttactaagaatttagtctaataatttcagttaggcgctcatcagttctccagagtggttgagtttgtaataccttgtttaaagaataatggcttgttcacgtgtgtgctatgaaaaatgatgtcccatgttcacataaatttgggaaattctgg

SEQ ID NO: 286442 - DNA, 4310 bp, Homo sapiens
agctgttccaaggattcaagctttggtcagtttgagcttgtcttcagagaaaagaaggaagtttgactaaatgcagacaaatttatgaagaagctaacaaaaccatgcgaaactgtgaagaagaggaagagagacttatgctgctggaatcttggcgaagttttgaagaagaatttggaacagcttcagataaggagagagtagacaaactcatgccagagaaagtcaagaagagaagaaaggtccagaccgatgatgggtctgatgcaggctgggaagaatactttgattacatctttccagaagatgctgccaaccaacctaacctcaaactcctggccatggccaaggtgaaaaacaaagccccggctgaggtacagataactgctgaacaactcttaagagaggctaaagaaagagaacttgagcttcttccacctccacctcaacagaagatcacagatgaagaagaattaaatgattataaactaaggaaaaggaagacttttgaagataatataagaaaaaacaggactgtgattagtaactggataaaatacgcacaatgggaagaaagcctaaaggagattcaaagggctcgatccatatacgagcgtgctttagatgtagactaccgaaatattacactctggctgaaatacgcagaaatggaaatgaagaatcgccaagtcaaccatgctcgaaatatctgggaccgggccataacaacgctgcctcgagttaatcagttctggtacaagtacacgtacatggaggaaatgttgggaaacgttgccggtgcccggcaggtgtttgagcgctggatggagtggcagcctgaggagcaagcctggcactcctacatcaactttgagctgagatacaaagaggtggatcgggcccgcaccatttatgagcgatttgtcctcgtgcaccctgatgttaagaactggatcaagtatgcccgctttgaagattctttggagatgaacatatggatgagcacctttatgttgcctttgccaagtttgaagaaaatcagaaagagtttgaaagggtacgagtgatttacaagtatgccctggacagaatttcaaaacaagatgcccaagaactctttaaaaattataccatctttgagaagaagtttggtgataggcggggtattgaagatatcattgtgagcaaacggagattccagtacgaagaagaagtgaaggcgaatccacacaattatgatgcatggtttgattacttgcgcttggtagaaagtgacgcagaagctgaagccgtgagagaagtctatgaaagggccattgccaatgtcccacccattcaggagaagaggcactggaagcgctacatttatctttggatcaactatgcactctatgaagaattggaggcaaaggatcctgagaggacaagacaggtgtatcaagcctctttggaactaattcctcacaaaaagttcacatttgccaaaatgtggatactgtatgcacagtttgaaatacgacagaagaatctgtcattagccagaagagcattgggaacttccataggcaaatgtccaaagaacaaattatttaaagtttacatagaattggagctacagcttcgagaatttgacagatgccggaagctttatgaaaagttcctggaatttggacctgaaaattgtacctcatggattaaattcgctgaattagagacaatccttggtgatattgacagagcacgggcaatctatgaattagccatcagtcagccacgtttagacatgccagaggtgctttggaaatcatatattgattttgaaattgagcaggaagaaacagaaagaacacgaaacctttaccggcggttgcttcaacggacgcagcatgtcaaggtatggatcagctttgctcagtttgagttgtcttcaggaaaagaaggaagtttgactaaatgcagacaaatttatgaagaagctaacaaaaccatgcgaaactgtgaagaaaaggaagagagacttatgctgctggaatcttggcgaagttttgaagaagaatttggaacagcttcagataaggagagagtagacaaactcatgccagagaaagtcaagaagagaagaaaggtccagactgatgatgggtctgatgcaggctgggaagaatactttgattacatctttccagaagatgctgccaaccaacctaacctcaaactcctggccatggccaaactgtggaagaaacagcagcaggaaaaggaggatgctgagcaccatccagatgaggacgtcgatgagagtgaatcctgatctttttttcatagacaaatgttttgttatttttataaattaattgtttggaactcttgtgactcctggaagttcttatatatttcaccagtaagaaattgattggtatctttgatggctactttttaagttattttttaaatgctcttgggttagctaggggtagggattgcaagtaaaggacttttttaactgctggatttgtttttccaactgagtccaaacttttctaatgtctgtccacatcatgcattaggaaatgtaattaaggtaacattctacagttacttttcatgtcatacccataaagatagtttatgcattcatctgaaatgtgtaactttttcatgtcttcagagtcacagacttgagttcatttcccagctctgccactcatgattatataacttaattttcattttcctcattcacaaaatgggccaatagtttgacagctcattttgaagattacattataaaaggaatatacctggtgggtgcatagtaagtgctcagtaaattgtttgttctaagccacttttaaaaatggtttcattccttgtagaattgaatgcgagtggattaataatttaccttactttcttactagtgtccagttatattgttttttagaacaacacttggaaaataatttgcagtgattatatttctgaacaaggttcagaaaacattgtttactaagaatttagtctaataatttcagttaggcgctcatcagttctccagagtggttgagtttgtaataccttgtttaaagaataatggcttgttcacgtgtgtgctatgaaaaatgatgtcccatgttcacataaatttgggaaattctggactaagacttaagtctcgttaatcaaatctctttatagttaggcttctgtacattatgtatctccagtagcaatgttgccatattatttatttcccaaacttagtggacaatggagtcatttctacctagagtaccagtaaacatctcccagtgtgctatagtagaaaatgtctactcctcactgctgacatgttaaacttactcttggtttagagcatgtgtagaaacacctaaggtagctctatgctaaataatgaagagtagcacaagaatgaatgtatttgctgatacgttgctcacattctcaagcaaaaattcaactgcattaaccgatctgagagttttcctttaacctggactgtgtttctcaagcacattttttctttgttcactgcccaaggactagaactgtatttttaaggttgttttcccctaaaaggacctttagtaagcaaatttattattaaatgtgcacatcttattcacccaagggaataaaagctacttcgtaatgttgttactaaattttatcttgaaaataaataacagtgtttgaggacagaagaaactaggactgttgttgagataaaatctgttttcagcctgactgctttagtcactggacgagcatcagctactgcggtgtcagatcacttctcgagtagaggtctgcctagtgagtgagcaggagaacatcatcttaatagcctttggctcacccagagtcagggagagatgaaaataataggtcagaatgcaagtgacttaatcacagtcttcctagaattatctgtttgtttatgttgcatgaatgcataagaaaaaaattctgtcatgttcccaaggtagaattgtaataagcatgtgccagtgtgaaagctggaaggaaaaaagctattctctaacaggagaacataaagattcatttctctcccaccctcaactccaccaaagtaaatcctttcgatagtaaaagtttaataatttcttgtgggtttttctttcgttaagtctttcactaactaactaactggatattttcacatattacagaggaagacactacacataaaatacatggttggcctatgatatagttatatggcctttctttaggaattatgttcttttccctctccaaaaaaaaaa

SEQ ID NO: 286443 - DNA, 3962 bp, Homo sapiens
ttaattattagttcaagtattcatattttaatataattggtgctatttaatgaccagaccattattgaccgcttacggtgccatgttcttttggctagaaactgtgctaagggctttacatacattttctcatttaaagctggcagtaatccagtgaggctggcattatttttccctgtttacaaatgaaacagctgagacttagacgtctaagttcagtgactaatccaagatcacatggttggtaacctgggttgagatttttctttgcttccaactcgagtttatacccaccactaaaatcttaactaagcactggaggaaaatagagatgaacaggcgtggccctgctctcacagaagccactgtttaattctacacttttgtatgtgttttgttcccctagagttgtagtttgaatttttggagtttccaggctttggtatggttttggtgtttacttacttactatttttttaagccatgctgttttgcctgggatttccttaattcccttgcacttgtcctcgtgcaccctgatgttaagaactggatcaagtatgcccgctttgaagaaaaacatgcttattttgcccatgcacggaaagtgtatgagagagctgtggaattctttggagatgaacatatggatgagcacctttatgttgcctttgccaagtttgaagaaaatcagaaagagtttgaaagggtacgagtgatttacaagtatgccctggacagaatttcaaaacaagatgcccaagaactctttaaaaattataccatctttgagaagaagtttggtgataggcggggtattgaagatatcattgtgagcaaacggagattccagtacgaagaagaagtgaaggcgaatccacacaattatgatgcatggtttgattacttgcgcttggtagaaagtgacgcagaagctgaagccgtgagagaagtctatgaaagggccattgccaatgtcccacccattcaggagaagaggcactggaagcgctacatttatctttggatcaactatgcactctatgaagaattggaggcaaaggatcctgagaggacaagacaggtgtatcaagcctctttggaactaattcctcacaaaaagttcacatttgccaaaatgtggatactgtatgcacagtttgaaatacgacagaagaatctgtcattagccagaagagcattgggaacttccataggcaaatgtccaaagaacaaattatttaaagtttacatagaattggagctacagcttcgagaatttgacagatgccggaagctttatgaaaagttcctggaatttggacctgaaaattgtacctcatggattaaattcgctgaattagagacaatccttggtgatattgacagagcacgggcaatctatgaattagccatcagtcagccacgtttagacatgccagaggtgctttggaaatcatatattgattttgaaattgagcaggaagaaacagaaagaacacgaaacctttaccggcggttgcttcaacggacgcagcatgtcaaggtatggatcagctttgctcagtttgagttgtcttcaggaaaagaaggaagtttgactaaatgcagacaaatttatgaagaagctaacaaaaccatgcgaaactgtgaagaaaaggaagagagacttatgctgctggaatcttggcgaagttttgaagaagaatttggaacagcttcagataaggagagagtagacaaactcatgccagagaaagtcaagaagagaagaaaggtccagactgatgatgggtctgatgcaggctgggaagaatactttgattacatctttccagaagatgctgccaaccaacctaacctcaaactcctggccatggccaaactgtggaagaaacagcagcaggaaaaggaggatgctgagcaccatccagatgaggacgtcgatgagagtgaatcctgatctttttttcatagacaaatgttttgttatttttataaattaattgtttggaactcttgtgactcctggaagttcttatatatttcaccagtaagaaattgattggtatctttgatggctactttttaagttattttttaaatgctcttgggttagctaggggtagggattgcaagtaaaggacttttttaactgctggatttgtttttccaactgagtccaaacttttctaatgtctgtccacatcatgcattaggaaatgtaattaaggtaacattctacagttacttttcatgtcatacccataaagatagtttatgcattcatctgaaatgtgtaactttttcatgtcttcagagtcacagacttgagttcatttcccagctctgccactcatgattatataacttaattttcattttcctcattcacaaaatgggccaatagtttgacagctcattttgaagattacattataaaaggaatatacctggtgggtgcatagtaagtgctcagtaaattgtttgttctaagccacttttaaaaatggtttcattccttgtagaattgaatgcgagtggattaataatttaccttactttcttactagtgtccagttatattgttttttagaacaacacttggaaaataatttgcagtgattatatttctgaacaaggttcagaaaacattgtttactaagaatttagtctaataatttcagttaggcgctcatcagttctccagagtggttgagtttgtaataccttgtttaaagaataatggcttgttcacgtgtgtgctatgaaaaatgatgtcccatgttcacataaatttgggaaattctggactaagacttaagtctcgttaatcaaatctctttatagttaggcttctgtacattatgtatctccagtagcaatgttgccatattatttatttcccaaacttagtggacaatggagtcatttctacctagagtaccagtaaacatctcccagtgtgctatagtagaaaatgtctactcctcactgctgacatgttaaacttactcttggtttagagcatgtgtagaaacacctaaggtagctctatgctaaataatgaagagtagcacaagaatgaatgtatttgctgatacgttgctcacattctcaagcaaaaattcaactgcattaaccgatctgagagttttcctttaacctggactgtgtttctcaagcacattttttctttgttcactgcccaaggactagaactgtatttttaaggttgttttcccctaaaaggacctttagtaagcaaatttattattaaatgtgcacatcttattcacccaagggaataaaagctacttcgtaatgttgttactaaattttatcttgaaaataaataacagtgtttgaggacagaagaaactaggactgttgttgagataaaatctgttttcagcctgactgctttagtcactggacgagcatcagctactgcggtgtcagatcacttctcgagtagaggtctgcctagtgagtgagcaggagaacatcatcttaatagcctttggctcacccagagtcagggagagatgaaaataataggtcagaatgcaagtgacttaatcacagtcttcctagaattatctgtttgtttatgttgcatgaatgcataagaaaaaaattctgtcatgttcccaaggtagaattgtaataagcatgtgccagtgtgaaagctggaaggaaaaaagctattctctaacaggagaacataaagattcatttctctcccaccctcaactccaccaaagtaaatcctttcgatagtaaaagtttaataatttcttgtgggtttttctttcgttaagtctttcactaactaactaactggatattttcacatattacagaggaagacactacacataaaatacatggttggcctatgatatagttatatggcctttctttaggaattatgttcttttccctctccaaaaaaaaaa

SEQ ID NO: 286444 - DNA, 2793 bp, Homo sapiens
agctgttccaaggattcaagctttggtcagtttgagcttgtcttcagagaaaagaaggaagtttgactaaatgcagacaaatttatgaagaagctaacaaaaccatgcgaaactgtgaagaagaggaagagagacttatgctgctggaatcttggcgaagttttgaagaagaatttggaacagcttcagataaggagagagtagacaaactcatgccagagaaagtcaagaagagaagaaaggtccagaccgatgatgggtctgatgcaggctgggaagaatactttgattacatctttccagaagatgctgccaaccaacctaacctcaaactcctggccatggccaagctgtggaagaaacagcagcatgtcaaggtatggatcagctttgctcagtttgagttgtcttcaggaaaagaaggaagtttgactaaatgcagacaaatttatgaagaagctaacaaaaccatgcgaaactgtgaagaaaaggaagagagacttatgctgctggaatcttggcgaagttttgaagaagaatttggaacagcttcagataaggagagagtagacaaactcatgccagagaaagtcaagaagagaagaaaggtccagactgatgatgggtctgatgcaggctgggaagaatactttgattacatctttccagaagatgctgccaaccaacctaacctcaaactcctggccatggccaaactgtggaagaaacagcagcaggaaaaggaggatgctgagcaccatccagatgaggacgtcgatgagagtgaatcctgatctttttttcatagacaaatgttttgttatttttataaattaattgtttggaactcttgtgactcctggaagttcttatatatttcaccagtaagaaattgattggtatctttgatggctactttttaagttattttttaaatgctcttgggttagctaggggtagggattgcaagtaaaggacttttttaactgctggatttgtttttccaactgagtccaaacttttctaatgtctgtccacatcatgcattaggaaatgtaattaaggtaacattctacagttacttttcatgtcatacccataaagatagtttatgcattcatctgaaatgtgtaactttttcatgtcttcagagtcacagacttgagttcatttcccagctctgccactcatgattatataacttaattttcattttcctcattcacaaaatgggccaatagtttgacagctcattttgaagattacattataaaaggaatatacctggtgggtgcatagtaagtgctcagtaaattgtttgttctaagccacttttaaaaatggtttcattccttgtagaattgaatgcgagtggattaataatttaccttactttcttactagtgtccagttatattgttttttagaacaacacttggaaaataatttgcagtgattatatttctgaacaaggttcagaaaacattgtttactaagaatttagtctaataatttcagttaggcgctcatcagttctccagagtggttgagtttgtaataccttgtttaaagaataatggcttgttcacgtgtgtgctatgaaaaatgatgtcccatgttcacataaatttgggaaattctggactaagacttaagtctcgttaatcaaatctctttatagttaggcttctgtacattatgtatctccagtagcaatgttgccatattatttatttcccaaacttagtggacaatggagtcatttctacctagagtaccagtaaacatctcccagtgtgctatagtagaaaatgtctactcctcactgctgacatgttaaacttactcttggtttagagcatgtgtagaaacacctaaggtagctctatgctaaataatgaagagtagcacaagaatgaatgtatttgctgatacgttgctcacattctcaagcaaaaattcaactgcattaaccgatctgagagttttcctttaacctggactgtgtttctcaagcacattttttctttgttcactgcccaaggactagaactgtatttttaaggttgttttcccctaaaaggacctttagtaagcaaatttattattaaatgtgcacatcttattcacccaagggaataaaagctacttcgtaatgttgttactaaattttatcttgaaaataaataacagtgtttgaggacagaagaaactaggactgttgttgagataaaatctgttttcagcctgactgctttagtcactggacgagcatcagctactgcggtgtcagatcacttctcgagtagaggtctgcctagtgagtgagcaggagaacatcatcttaatagcctttggctcacccagagtcagggagagatgaaaataataggtcagaatgcaagtgacttaatcacagtcttcctagaattatctgtttgtttatgttgcatgaatgcataagaaaaaaattctgtcatgttcccaaggtagaattgtaataagcatgtgccagtgtgaaagctggaaggaaaaaagctattctctaacaggagaacataaagattcatttctctcccaccctcaactccaccaaagtaaatcctttcgatagtaaaagtttaataatttcttgtgggtttttctttcgttaagtctttcactaactaactaactggatattttcacatattacagaggaagacactacacataaaatacatggttggcctatgatatagttatatggcctttctttaggaattatgttcttttccctctccaaaaaaaaaa

SEQ ID NO: 286445 - DNA, 2595 bp, Homo sapiens
ctttccgacactctttgggaagagaatctctaatgacggcaacagtggagaacctaacgttccagaaggacactttgggaaatgctgttgacaaaaacaggcgccacggctcgacagagccactcgtcctcgcctggtcatcccagttccggaggctgacctggggatgcgccctggacgccctgcaccgcagtccttgcgtcgctgctagtcagcacggcgttacccacctcatccgcagctccaggacgccgcactccacgcgctgccgcaaggaggacgcgcagcctggtcaccatggaaacggtgccgcctccgtcacggctcaagcgagaggtcaaaggtcagtcctgcaagttccgcttccggttccgagatcctgtttgttttctgaaagctttgtggtttcggtgagctctcagagccgatttctagcgtccgtgccggggacaggtgtccagaggtcgactgctgcagacatggcggcctccaccgcggccgggaagcagcggattcccaaagtggccaaggtgaaaaacaaagccccggctgaggtacagataactgctgaacaactcttaagagaggctaaagaaagagaacttgagcttcttccacctccacctcaacagaagatcacagatgaagaagaattaaatgattataaactaaggaaaaggaagacttttgaagataatataagaaaaaacaggactgtgattagtaactggataaaatacgcacaatgggaagaaagcctaaaggagattcaaagggctcgatccatatacgagcgtgctttagatgtagactaccgaaatattacactctggctgaaatacgcagaaatggaaatgaagaatcgccaagtcaaccatgctcgaaatatctgggaccgggccataacaacgctgcctcgagttaatcagttctggtacaagtacacgtacatggaggaaatgttgggaaacgttgccggtgcccggcaggtgtttgagcgctggatggagtggcagcctgaggagcaagcctggcactcctacatcaactttgagctgagatacaaagaggtggatcgggcccgcaccatttatgagcgatttgtcctcgtgcaccctgatgttaagaactggatcaagtatgcccgctttgaagaaaaacatgcttattttgcccatgcacggaaagtgtatgagagagctgtggaattctttggagatgaacatatggatgagcacctttatgttgcctttgccaagtttgaagaaaatcagaaagagtttgaaagggtacgagtgatttacaagtatgccctggacagaatttcaaaacaagatgcccaagaactctttaaaaattataccatctttgagaagaagtttggtgataggcggggtattgaagatatcattgtgagcaaacggagattccagtacgaagaagaagtgaaggcgaatccacacaattatgatgcatggtttgattacttgcgcttggtagaaagtgacgcagaagctgaagccgtgagagaagtctatgaaagggccattgccaatgtcccacccattcaggagaagaggcactggaagcgctacatttatctttggatcaactatgcactctatgaagaattggaggcaaaggatcctgagaggacaagacaggtgtatcaagcctctttggaactaattcctcacaaaaagttcacatttgccaaaatgtggatactgtatgcacagtttgaaatacgacagaagaatctgtcattagccagaagagcattgggaacttccataggcaaatgtccaaagaacaaattatttaaagtttacatagaattggagctacagcttcgagaatttgacagatgccggaagctttatgaaaagttcctggaatttggacctgaaaattgtacctcatggattaaattcgctgaattagagacaatccttggtgatattgacagagcacgggcaatctatgaattagccatcagtcagccacgtttagacatgccagaggtgctttggaaatcatatattgattttgaaattgagcaggaagaaacagaaagaacacgaaacctttaccggcggttgcttcaacggacgcagcatgtcaaggtatggatcagctttgctcagtttgagttgtcttcaggaaaagaaggaagtttgactaaatgcagacaaatttatgaagaagctaacaaaaccatgcgaaactgtgaagaaaaggaagagagacttatgctgctggaatcttggcgaagttttgaagaagaatttggaacagcttcagataaggagagagtagacaaactcatgccagagaaagtcaagaagagaagaaaggtccagactgatgatgggtctgatgcaggctgggaagaatactttgattacatctttccagaagatgctgccaaccaacctaacctcaaactcctggccatggccaaactgtggaagaaacagcagcaggaaaaggaggatgctgagcaccatccagatgaggacgtcgatgagagtgaatcctgatctttttttcatagacaaatgttttgttatttttataaattaattgtttgga

SEQ ID NO: 286446 - DNA, 2351 bp, Homo sapiens
  misc_feature (2298)..(2298): n is a, c, g, or t
ctttccgacactctttgggaagagaatctctaatgacggcaacagtggagaacctaacgttccagaaggacactttgggaaatgctgttgacaaaaacaggcgccacggctcgacagagccactcgtcctcgcctggtcatcccagttccggaggctgacctggggatgcgccctggacgccctgcaccgcagtccttgcgtcgctgctagtcagcacggcgttacccacctcatccgcagctccaggacgccgcactccacgcgctgccgcaaggaggacgcgcagcctggtcaccatggaaacggtgccgcctccgtcacggctcaagcgagaggtcaaaggtcagtcctgcaagttccgcttccggttccgagatcctgtttgttttctgaaagctttgtggtttcggtgagctctcagagccgatttctagcgtccgtgccggggacaggtgtccagaggtcgactgctgcagacatggcggcctccaccgcggccgggaagcagcggattcccaaagtggccaaggtgaaaaacaaagccccggctgaggtacagataactgctgaacaactcttaagagaggctaaagaaagagaacttgagcttcttccacctccacctcaacagaagatcacagatgaagaagaattaaatgattataaactaaggaaaaggaagacttttgaagataatataagaaaaaacaggactgtgattagtaactggataaaatacgcacaatgggaagaaagcctaaaggagattcaaagggctcgatccatatacgagcgtgctttagatgtagactaccgaaatattacactctggctgaaatacgcagaaatggaaatgaagaatcgccaagtcaaccatgctcgaaatatctgggaccgggccataacaacgctgcctcgagttaatcagttctggtacaagtacacgtacatggaggaaatgttgggaaacgttgccggtgcccggcaggtgtttgagcgctggatggagtggcagcctgaggagcaagcctggcactcctacatcaactttgagctgagatacaaagaggtggatcgggcccgcaccatttatgagcgatttgtcctcgtgcaccctgatgttaagaactggatcaagtatgcccgctttgaagaaaaacatgcttattttgcccatgcacggaaagtgtatgagagagctgtggaattctttggagatgaacatatggatgagcacctttatgttgcctttgccaagtttgaagaaaatcagaaagagtttgaaagggtacgagtgatttacaagtatgccctggacagaatttcaaaacaagatgcccaagaactctttaaaaattataccatctttgagaagaagtttggtgataggcggggtattgaagatatcattgtgagcaaacggagattccagtacgaagaagaagtgaaggcgaatccacacaattatgatgcatggtttgattacttgcgcttggtagaaagtgacgcagaagctgaagccgtgagagaagtctatgaaagggccattgccaatgtcccacccattcaggagaagaggcactggaagcgctacatttatctttggatcaactatgcactctatgaagaattggaggcaaaggatcctgagaggacaagacaggtgtatcaagcctctttggaactaattcctcacaaaaagttcacatttgccaaaatgtggatactgtatgcacagtttgaaatacgacagaagaatctgtcattagccagaagagcattgggaacttccataggcaaatgtccaaagaacaaattatttaaagtttacatagaattggagctacagcttcgagaatttgacagatgccggaagctttatgaaaagttcctggaatttggacctgaaaattgtacctcatggattaaattcgctgaattagagacaatccttggtgatattgacagagcacgggcaatctatgaattagccatcagtcagccacgtttagacatgccagaggtgctttggaaatcatatattgattttgaaattgagcaggaagaaacagaaagaacacgaaacctttaccggcggttgcttcaacggacgcagcatgtcaaggtatggatcagctttgctcagtttgagttgtcttcaggaaaagaaggaagtttgactaaatgcagacaaatttatgaagaagctaacaaaaccatgcgaaactgtgaagaaaaggaagagagactgtttgaggttaatagattttagagagtccattgaagaagggaattgncccgggattgagaacaaaaaatcctcagggacatttagatttagtggacgagt

SEQ ID NO: 286447 - DNA, 1473 bp, Homo sapiens
  misc_feature (1417)..(1417): n is a, c, g, or t
  misc_feature (1450)..(1450): n is a, c, g, or t
  misc_feature (1458)..(1458): n is a, c, g, or t
ctttccgacactctttgggaagagaatctctaatgacggcaacagtggagaacctaacgttccagaaggacactttgggaaatgctgttgacaaaaacaggcgccacggctcgacagagccactcgtcctcgcctggtcatcccagttccggaggctgacctggggatgcgccctggacgccctgcaccgcagtccttgcgtcgctgctagtcagcacggcgttacccacctcatccgcagctccaggacgccgcactccacgcgctgccgcaaggaggacgcgcagcctggtcaccatggaaacggtgccgcctccgtcacggctcaagcgagaggtcaaaggtcagtcctgcaagttccgcttccggttccgagatcctgtttgttttctgaaagctttgtggtttcggtgagctctcagagccgatttctagcgtccgtgccggggacaggtgtccagaggtcgactgctgcagacatggcggcctccaccgcggccgggaagcagcggattcccaaagtggccaaggtgaaaaacaaagccccggctgaggtacagataactgctgaacaactcttaagagaggctaaagaaagagaacttgagcttcttccacctccacctcaacagaagatcacagatgaagaagaattaaatgattataaactaaggaaaaggaagacttttgaagataatataagaaaaaacaggactgtgattagtaactggataaaatacgcacaatgggaagaaagcctaaaggagattcaaagggctcgatccatatacgagcgtgctttagatgtagactaccgaaatattacactctggctgaaatacgcagaaatggaaatgaagaatcgccaagtcaaccatgctcgaaatatctgggaccgggccataacaacgctgcctcgagttaatcagttctggtacaagtacacgtacatggaggaaatgttgggaaacgttgccggtgcccggcaggtgtttgagcgctggatggagtggcagcctgaggagcaagcctggcactcctacatcaactttgagctgagatacaaagaggtggatcgggcccgcaccatttatgagcgatttgtcctcgtgcaccctgatgttaagaactggatcaagtatgcccgctttgaagaaaaacatgcttattttgcccatgcacggaaagtgtatgagagagctgtggaattctttggagatgaacatatggatgagcacctttatgttgcctttgccaagtttgaagaaaatcagaaagagtttgaaagggtacgagtgatttacaagtatgccctggacagaatttcaaaacaagatgcccaagaactctttaaaaattataccatctttgagaagaagtttggtgataggcgggggtttttaaaaatttctttgtnaagccaaaccggaaaattccccgtttccaaaanaaaaaaantttaaagggcgaaat

SEQ ID NO: 286448 - DNA, 1097 bp, Homo sapiens
  misc_feature (686)..(686): n is a, c, g, or t
  misc_feature (689)..(689): n is a, c, g, or t
  misc_feature (691)..(691): n is a, c, g, or t
ctttccgacactctttgggaagagaatctctaatgacggcaacagtggagaacctaacgttccagaaggacactttgggaaatgctgttgacaaaaacaggcgccacggctcgacagagccactcgtcctcgcctggtcatcccagttccggaggctgacctggggatgcgccctggacgccctgcaccgcagtccttgcgtcgctgctagtcagcacggcgttacccacctcatccgcagctccaggacgccgcactccacgcgctgccgcaaggaggacgcgcagcctggtcaccatggaaacggtgccgcctccgtcacggctcaagcgagaggtcaaaggtcagtcctgcaagttccgcttccggttccgagatcctgtttgttttctgaaagctttgtggtttcggtgagctctcagagccgatttctagcgtccgtgccggggacaggtgtccagaggtcgactgctgcagacatggcggcctccaccgcggccgggaagcagcggattcccaaagtggccaaggtgaaaaacaaagccccggctgaggtacagataactgctgaacaactcttaagagaggctaaagaaagagaacttgagcttcttccacctccacctcaacagaagatcacagatgaagaagaattaaatgattataaactaaggaaaaggaagaanaananaaaaaaaaaaaaaaaaacaccgcgcgaaagttttctctctctctctctctctctcgccccccgggggggccccaaaaggggggggccccccgcgcgggggtctccggaaaaaggaggccaccttgtgagtgacacagtgggatttctcgcggaaagcccctgcactgtggggggccccgtgcggagccccgcgggggggcctctctttcttatgagagagctggggtgccccctatactctccggcggggggggccatacagaaaaccctcgtggcccctgggtatctaggaatttcgtgggggcactatacccctcgggggtgtggggggccaccagctctttaacagcggggctctctagagagcacgtgggaacacaacgctctcgggggtcgtgtcccccga

SEQ ID NO: 286449 - DNA, 717 bp, Homo sapiens
cagagccactcgtcctcgcctggtcatcccagttccggaggctgacctggggatgcgccctggacgccctgcaccgcagtccttgcgtcgctgctagtcagcacggcgttacccacctcatccgcagctccaggacgccgcactccacgcgctgccgcaaggaggacgcgcagcctggtcaccatggaaacggtgccgcctccgtcacggctcaagcgagaggtcaaaggtcagtcctgcaagttccgcttccggttccgagatcctgtttgttttctgaaagctttgtggtttcggtgagctctcagagccgatttctagcgtccgtgccggggacaggtgtccagaggtcgactgctgcagacatggcggcctccaccgcggccgggaagcagcggattcccaaagtggccaaggtaggcgatcgcgaggggccttgtaggaggtggcctaggaaaggggcatccctcagccctgagggtgcccgggttgggagagagtgttcccgccggggagaaggctcaccctgagagatggagaggaagggcagctggtggtggggcgcgggctcttgtcatcgcggagcacgacccgcgttggcgtggccttcgttctggggtggttttgctggggagtggagtggggtggttcggtgaagatttactgagccaggcactgcactgggcgctgggaagctacgctcgtacgctggccaca

SEQ ID NO: 286450 - DNA, 535 bp, Homo sapiens
gagttacttttcagaatagaggtaggacattctgcccatatacaagcatgcctacaaaacaaagtctgttctgagcagaggctaccgtgccatacagtacagtacagtatctggatcatggttctcaggagaggttaccatgccatgcagtacaatatagtatctggatcatggtatgtgggtttctaacttttgtgaaatgaatgtggtctttgcttgtaaataagcagagtacattcctcttactctgaagttttagagaaatcgaattaccaatggctttggttaatttaaattaattttaattcaatttaatttggatgaggcttttaagctagatatttttgtgcttttgttttctagttcacatttgccaaaatgtggatactgtatgcacagtttgaaatacgacagaagaatctgtcattagccagaagagcattggtaagtaaagaaaggatcaagatgtctcatcaagttctatgagaaagaaattaaaatcttggtgcttggaagttgtacagttcctacttta

SEQ ID NO: 286451 - DNA, 2507 bp, Homo sapiens
gagcaggagccgcccccagccaagctgctttcagcacagcgtgggcccccagcaccttggtgcggggtgcggcccctcggaggagggctgtcaggtgaagcctcgtgtgagggggtgcctcaggaaccctgaagctgggctgagccatgatgctgctgccagaacccctgcagagggcctggtttcaggagactcagagtcctctgtgaaaaagcccttggagagcgccccagcagggctgcacttggctcctgtgaggaaggggctcaggggtctgggcccctccgcctgggccgggctgggagccaggcgggcggctgggctgcagcaatggaccgtgagctggcccagcccgcgtccgtgctgagcctgcctgtcgtctgtggccatgcccatcatgggctcctcggtgtacatcacggtggagctggccattgctgtgctggccatcctgggcaatgtgctggtgtgctgggccgtgtggctcaacagcaacctgcagaacgtcaccaactactttgtggtgtcactggcggcggccgacatcgcagtgggtgtgctcgccatcccctttgccatcaccatcagcaccgggttctgcgctgcctgccacggctgcctcttcattgcctgcttcgtcctggtcctcacgcagagctccatcttcagtctcctggccatcgccattgaccgctacattgccatccgcatcccgctccggtacaatggcttggtgaccggcacgagggctaagggcatcattgccatctgctgggtgctgtcgtttgccatcggcctgactcccatgctaggttggaacaactgcggtcagccaaaggagggcaagaaccactcccagggctgcggggagggccaagtggcctgtctctttgaggatgtggtccccatgaactacatggtgtacttcaacttctttgcctgtgtgctggtgcccctgctgctcatgctgggtgtctatttgcggatcttcctggcggcgcgacgacagctgaagcagatggagagccagcctctgccgggggagcgggcacggtccacactgcagaaggaggtccatgctgccaagtcactggccatcattgtggggctctttgccctctgctggctgcccctacacatcatcaactgcttcactttcttctgccccgactgcagccacgcccctctctggctcatgtacctggccatcgtcctctcccacaccaattcggttgtgaatcccttcatctacgcctaccgtatccgcgagttccgccagaccttccgcaagatcattcgcagccacgtcctgaggcagcaagaacctttcaaggcagctggcaccagtgcccgggtcttggcagctcatggcagtgacggagagcaggtcagcctccgtctcaacggccacccgccaggagtgtgggccaacggcagtgctccccaccctgagcggaggcccaatggctatgccctggggctggtgagtggagggagtgcccaagagtcccaggggaacacgggcctcccagacgtggagctccttagccatgagctcaagggagtgtgcccagagccccctggcctagatgaccccctggcccaggatggagcaggagtgtcctgatgattcatggagtttgccccttcctaagggaaggagatctttatctttctggttggcttgaccagtcacgttgggagaagagagagagtgccaggagaccctgagggcagccggttcctactttggactgagagaagggagccccaggctggagcagcatgaggcccagcaagaagggcttgggttctgaggaagcagatgtttcatgctgtgaggccttgcaccaggtgggggccacagcaccagcagcatctttgctgggcagggcccagccctccactgcagaagcatctggaagcaccaccttgtctccacagagcagcttgggcacagcagactggcctggccctgagactggggagtggctccaacagcctcctgccacccacacaccactctccctagactctcctagggttcaggagctgctgggcccagaggtgacatttgactttttttccaggaaaaatgtaagtgtgaggaaaccctttttattttattacctttcactctctggctgctgggtctgccgtcggtcctgctgctaacctggcaccagagcctctgcccggggagcctcaggcagtcctctcctgctgtcacagctgccatccacttctcagtcccagggccatctcttggagtgacaaagctgggatcaaggacagggagttgtaacagagcagtgccagagcatgggcccaggtcccaggggagaggttggggctggcaggccactggcatgtgctgagtagcgcagagctacccagtgagaggccttgtctaactgcctttccttctaaagggaatgtttttttctgagataaaataaaaacgagccacatcgtgttttaagcttgtccaaatgagaaaagcgtct

SEQ ID NO: 286452 - DNA, 3012 bp, Homo sapiens
  misc_feature (130)..(130): n is a, c, g, or t
catcacctttttttaagtagtaagaataaagccactgtatgattctcttaatagctatacattaatcctgtttttagtgctgactgggccagccttccgggaactggagtctgtctctttcagtgctttnttgttttttgttggttttttcgagacggggtcgatcacggctcaccacagccttaacctccagggctccagcaatcctcccacctcagcctcctgagtagctgggaccacaggtgtgtgccaccatctccagcagtttgtttatttattttttctttttttttttttggtagaaatgggcttttcgccatgttgcccaagctggtcttgcacttctgggctgaagcaatcctctcgccttggcctcccagagccttgggattacagaatcatgggtgagagctggcatggcccctagaggtcatttggggtccagctgcctcaccgtatcaatgaggaaactgaggcccagaaaagaaaagcatttttgcccagagtccctcagaaaaaaacagaccacatctgatccttggccctgagtccagagtgggaggcaccgtgacaacaatgcgcagagcagggaatgcagggagccatggatagtgctggggtgcctcaggaaccctgaagctgggctgagccatgatgctgctgccagaacccctgcagagggcctggtttcaggagactcagagtcctctgtgaaaaagcccttggagagcgccccagcagggctgcacttggctcctgtgaggaaggggctcaggggtctgggcccctccgcctgggccgggctgggagccaggcgggcggctgggctgcagcaatggaccgtgagctggcccagcccgcgtccgtgctgagcctgcctgtcgtctgtggccatgcccatcatgggctcctcggtgtacatcacggtggagctggccattgctgtgctggccatcctgggcaatgtgctggtgtgctgggccgtgtggctcaacagcaacctgcagaacgtcaccaactactttgtggtgtcactggcggcggccgacatcgcagtgggtgtgctcgccatcccctttgccatcaccatcagcaccgggttctgcgctgcctgccacggctgcctcttcattgcctgcttcgtcctggtcctcacgcagagctccatcttcagtctcctggccatcgccattgaccgctacattgccatccgcatcccgctccggtacaatggcttggtgaccggcacgagggctaagggcatcattgccatctgctgggtgctgtcgtttgccatcggcctgactcccatgctaggttggaacaactgcggtcagccaaaggagggcaagaaccactcccagggctgcggggagggccaagtggcctgtctctttgaggatgtggtccccatgaactacatggtgtacttcaacttctttgcctgtgtgctggtgcccctgctgctcatgctgggtgtctatttgcggatcttcctggcggcgcgacgacagctgaagcagatggagagccagcctctgccgggggagcgggcacggtccacactgcagaaggaggtccatgctgccaagtcactggccatcattgtggggctctttgccctctgctggctgcccctacacatcatcaactgcttcactttcttctgccccgactgcagccacgcccctctctggctcatgtacctggccatcgtcctctcccacaccaattcggttgtgaatcccttcatctacgcctaccgtatccgcgagttccgccagaccttccgcaagatcattcgcagccacgtcctgaggcagcaagaacctttcaaggcagctggcaccagtgcccgggtcttggcagctcatggcagtgacggagagcaggtcagcctccgtctcaacggccacccgccaggagtgtgggccaacggcagtgctccccaccctgagcggaggcccaatggctatgccctggggctggtgagtggagggagtgcccaagagtcccaggggaacacgggcctcccagacgtggagctccttagccatgagctcaagggagtgtgcccagagccccctggcctagatgaccccctggcccaggatggagcaggagtgtcctgatgattcatggagtttgccccttcctaagggaaggagatctttatctttctggttggcttgaccagtcacgttgggagaagagagagagtgccaggagaccctgagggcagccggttcctactttggactgagagaagggagccccaggctggagcagcatgaggcccagcaagaagggcttgggttctgaggaagcagatgtttcatgctgtgaggccttgcaccaggtgggggccacagcaccagcagcatctttgctgggcagggcccagccctccactgcagaagcatctggaagcaccaccttgtctccacagagcagcttgggcacagcagactggcctggccctgagactggggagtggctccaacagcctcctgccacccacacaccactctccctagactctcctagggttcaggagctgctgggcccagaggtgacatttgactttttttccaggaaaaatgtaagtgtgaggaaaccctttttattttattacctttcactctctggctgctgggtctgccgtcggtcctgctgctaacctggcaccagagcctctgcccggggagcctcaggcagtcctctcctgctgtcacagctgccatccacttctcagtcccagggccatctcttggagtgacaaagctgggatcaaggacagggagttgtaacagagcagtgccagagcatgggcccaggtcccaggggagaggttggggctggcaggccactggcatgtgctgagtagcgcagagctacccagtgagaggccttgtctaactgcctttccttctaaagggaatgtttttttctgagataaaataaaaacgagccacatcgtgttttaagcttgtccaaatgagaaaagcgtct

SEQ ID NO: 286453 - DNA, 2600 bp, Homo sapiens
aattttcagctgttctttgctcaataataacttttttatcaccaagatatctctctaagtttttgacatattcctcatttgttttgataaaagttttcttattttcttagaaaaataagttactaaaagtcatatatcattgtatatcttcaaaatattgcttaaaactaggacttgtatttaaatgttttttcttcttaaagacaagtgcctcaggaaccctgaagctgggctgagccatgatgctgctgccagaacccctgcagagggcctggtttcaggagactcagagtcctctgtgaaaaagcccttggagagcgccccagcagggctgcacttggctcctgtgaggaaggggctcaggggtctgggcccctccgcctgggccgggctgggagccaggcgggcggctgggctgcagcaatggaccgtgagctggcccagcccgcgtccgtgctgagcctgcctgtcgtctgtggccatgcccatcatgggctcctcggtgtacatcacggtggagctggccattgctgtgctggccatcctgggcaatgtgctggtgtgctgggccgtgtggctcaacagcaacctgcagaacgtcaccaactactttgtggtgtcactggcggcggccgacatcgcagtgggtgtgctcgccatcccctttgccatcaccatcagcaccgggttctgcgctgcctgccacggctgcctcttcattgcctgcttcgtcctggtcctcacgcagagctccatcttcagtctcctggccatcgccattgaccgctacattgccatccgcatcccgctccggtacaatggcttggtgaccggcacgagggctaagggcatcattgccatctgctgggtgctgtcgtttgccatcggcctgactcccatgctaggttggaacaactgcggtcagccaaaggagggcaagaaccactcccagggctgcggggagggccaagtggcctgtctctttgaggatgtggtccccatgaactacatggtgtacttcaacttctttgcctgtgtgctggtgcccctgctgctcatgctgggtgtctatttgcggatcttcctggcggcgcgacgacagctgaagcagatggagagccagcctctgccgggggagcgggcacggtccacactgcagaaggaggtccatgctgccaagtcactggccatcattgtggggctctttgccctctgctggctgcccctacacatcatcaactgcttcactttcttctgccccgactgcagccacgcccctctctggctcatgtacctggccatcgtcctctcccacaccaattcggttgtgaatcccttcatctacgcctaccgtatccgcgagttccgccagaccttccgcaagatcattcgcagccacgtcctgaggcagcaagaacctttcaaggcagctggcaccagtgcccgggtcttggcagctcatggcagtgacggagagcaggtcagcctccgtctcaacggccacccgccaggagtgtgggccaacggcagtgctccccaccctgagcggaggcccaatggctatgccctggggctggtgagtggagggagtgcccaagagtcccaggggaacacgggcctcccagacgtggagctccttagccatgagctcaagggagtgtgcccagagccccctggcctagatgaccccctggcccaggatggagcaggagtgtcctgatgattcatggagtttgccccttcctaagggaaggagatctttatctttctggttggcttgaccagtcacgttgggagaagagagagagtgccaggagaccctgagggcagccggttcctactttggactgagagaagggagccccaggctggagcagcatgaggcccagcaagaagggcttgggttctgaggaagcagatgtttcatgctgtgaggccttgcaccaggtgggggccacagcaccagcagcatctttgctgggcagggcccagccctccactgcagaagcatctggaagcaccaccttgtctccacagagcagcttgggcacagcagactggcctggccctgagactggggagtggctccaacagcctcctgccacccacacaccactctccctagactctcctagggttcaggagctgctgggcccagaggtgacatttgactttttttccaggaaaaatgtaagtgtgaggaaaccctttttattttattacctttcactctctggctgctgggtctgccgtcggtcctgctgctaacctggcaccagagcctctgcccggggagcctcaggcagtcctctcctgctgtcacagctgccatccacttctcagtcccagggccatctcttggagtgacaaagctgggatcaaggacagggagttgtaacagagcagtgccagagcatgggcccaggtcccaggggagaggttggggctggcaggccactggcatgtgctgagtagcgcagagctacccagtgagaggccttgtctaactgcctttccttctaaagggaatgtttttttctgagataaaataaaaacgagccacatcgtgttttaagcttgtccaaatgagaaaagcgtct

SEQ ID NO: 286454 - DNA, 2726 bp, Homo sapiens
agcgtggagtgtggcgctgaggaagcggcgggacggatgcgagcccgggaggagcgcgctggggggccgcaggcgggggatgtggcgcggtccaggcccgtcgcggcctcgtcctgacagggacacctgcgggatcgtccttccaggatcgcctgcgggcctcgcgggccgatgcctcgggtccccctccggcctcggtttctccgcgcagcggggcggggcgggggcagcgcgggtctcaaagctgcctgcagggggcgcccgtgagcggcgcggccggagccggagacccagcggccgccgagacagcgggagccggcgtgcgagcggcaggtgcctcaggaaccctgaagctgggctgagccatgatgctgctgccagaacccctgcagagggcctggtttcaggagactcagagtcctctgtgaaaaagcccttggagagcgccccagcagggctgcacttggctcctgtgaggaaggggctcaggggtctgggcccctccgcctgggccgggctgggagccaggcgggcggctgggctgcagcaatggaccgtgagctggcccagcccgcgtccgtgctgagcctgcctgtcgtctgtggccatgcccatcatgggctcctcggtgtacatcacggtggagctggccattgctgtgctggccatcctgggcaatgtgctggtgtgctgggccgtgtggctcaacagcaacctgcagaacgtcaccaactactttgtggtgtcactggcggcggccgacatcgcagtgggtgtgctcgccatcccctttgccatcaccatcagcaccgggttctgcgctgcctgccacggctgcctcttcattgcctgcttcgtcctggtcctcacgcagagctccatcttcagtctcctggccatcgccattgaccgctacattgccatccgcatcccgctccggtacaatggcttggtgaccggcacgagggctaagggcatcattgccatctgctgggtgctgtcgtttgccatcggcctgactcccatgctaggttggaacaactgcggtcagccaaaggagggcaagaaccactcccagggctgcggggagggccaagtggcctgtctctttgaggatgtggtccccatgaactacatggtgtacttcaacttctttgcctgtgtgctggtgcccctgctgctcatgctgggtgtctatttgcggatcttcctggcggcgcgacgacagctgaagcagatggagagccagcctctgccgggggagcgggcacggtccacactgcagaaggaggtccatgctgccaagtcactggccatcattgtggggctctttgccctctgctggctgcccctacacatcatcaactgcttcactttcttctgccccgactgcagccacgcccctctctggctcatgtacctggccatcgtcctctcccacaccaattcggttgtgaatcccttcatctacgcctaccgtatccgcgagttccgccagaccttccgcaagatcattcgcagccacgtcctgaggcagcaagaacctttcaaggcagctggcaccagtgcccgggtcttggcagctcatggcagtgacggagagcaggtcagcctccgtctcaacggccacccgccaggagtgtgggccaacggcagtgctccccaccctgagcggaggcccaatggctatgccctggggctggtgagtggagggagtgcccaagagtcccaggggaacacgggcctcccagacgtggagctccttagccatgagctcaagggagtgtgcccagagccccctggcctagatgaccccctggcccaggatggagcaggagtgtcctgatgattcatggagtttgccccttcctaagggaaggagatctttatctttctggttggcttgaccagtcacgttgggagaagagagagagtgccaggagaccctgagggcagccggttcctactttggactgagagaagggagccccaggctggagcagcatgaggcccagcaagaagggcttgggttctgaggaagcagatgtttcatgctgtgaggccttgcaccaggtgggggccacagcaccagcagcatctttgctgggcagggcccagccctccactgcagaagcatctggaagcaccaccttgtctccacagagcagcttgggcacagcagactggcctggccctgagactggggagtggctccaacagcctcctgccacccacacaccactctccctagactctcctagggttcaggagctgctgggcccagaggtgacatttgactttttttccaggaaaaatgtaagtgtgaggaaaccctttttattttattacctttcactctctggctgctgggtctgccgtcggtcctgctgctaacctggcaccagagcctctgcccggggagcctcaggcagtcctctcctgctgtcacagctgccatccacttctcagtcccagggccatctcttggagtgacaaagctgggatcaaggacagggagttgtaacagagcagtgccagagcatgggcccaggtcccaggggagaggttggggctggcaggccactggcatgtgctgagtagcgcagagctacccagtgagaggccttgtctaactgcctttccttctaaagggaatgtttttttctgagataaaataaaaacgagccacatcgtgttttaagcttgtccaaatgagaaaagcgtct

SEQ ID NO: 286455 - DNA, 2487 bp, Homo sapiens
gagcaggagccgcccccagccaagctgctttcagcacagcgtgggcccccagcaccttggtgcggggtgcggcccctcggaggagggctgtcaggtgcctcaggaaccctgaagctgggctgagccatgatgctgctgccagaacccctgcagagggcctggtttcaggagactcagagtcctctgtgaaaaagcccttggagagcgccccagcagggctgcacttggctcctgtgaggaaggggctcaggggtctgggcccctccgcctgggccgggctgggagccaggcgggcggctgggctgcagcaatggaccgtgagctggcccagcccgcgtccgtgctgagcctgcctgtcgtctgtggccatgcccatcatgggctcctcggtgtacatcacggtggagctggccattgctgtgctggccatcctgggcaatgtgctggtgtgctgggccgtgtggctcaacagcaacctgcagaacgtcaccaactactttgtggtgtcactggcggcggccgacatcgcagtgggtgtgctcgccatcccctttgccatcaccatcagcaccgggttctgcgctgcctgccacggctgcctcttcattgcctgcttcgtcctggtcctcacgcagagctccatcttcagtctcctggccatcgccattgaccgctacattgccatccgcatcccgctccggtacaatggcttggtgaccggcacgagggctaagggcatcattgccatctgctgggtgctgtcgtttgccatcggcctgactcccatgctaggttggaacaactgcggtcagccaaaggagggcaagaaccactcccagggctgcggggagggccaagtggcctgtctctttgaggatgtggtccccatgaactacatggtgtacttcaacttctttgcctgtgtgctggtgcccctgctgctcatgctgggtgtctatttgcggatcttcctggcggcgcgacgacagctgaagcagatggagagccagcctctgccgggggagcgggcacggtccacactgcagaaggaggtccatgctgccaagtcactggccatcattgtggggctctttgccctctgctggctgcccctacacatcatcaactgcttcactttcttctgccccgactgcagccacgcccctctctggctcatgtacctggccatcgtcctctcccacaccaattcggttgtgaatcccttcatctacgcctaccgtatccgcgagttccgccagaccttccgcaagatcattcgcagccacgtcctgaggcagcaagaacctttcaaggcagctggcaccagtgcccgggtcttggcagctcatggcagtgacggagagcaggtcagcctccgtctcaacggccacccgccaggagtgtgggccaacggcagtgctccccaccctgagcggaggcccaatggctatgccctggggctggtgagtggagggagtgcccaagagtcccaggggaacacgggcctcccagacgtggagctccttagccatgagctcaagggagtgtgcccagagccccctggcctagatgaccccctggcccaggatggagcaggagtgtcctgatgattcatggagtttgccccttcctaagggaaggagatctttatctttctggttggcttgaccagtcacgttgggagaagagagagagtgccaggagaccctgagggcagccggttcctactttggactgagagaagggagccccaggctggagcagcatgaggcccagcaagaagggcttgggttctgaggaagcagatgtttcatgctgtgaggccttgcaccaggtgggggccacagcaccagcagcatctttgctgggcagggcccagccctccactgcagaagcatctggaagcaccaccttgtctccacagagcagcttgggcacagcagactggcctggccctgagactggggagtggctccaacagcctcctgccacccacacaccactctccctagactctcctagggttcaggagctgctgggcccagaggtgacatttgactttttttccaggaaaaatgtaagtgtgaggaaaccctttttattttattacctttcactctctggctgctgggtctgccgtcggtcctgctgctaacctggcaccagagcctctgcccggggagcctcaggcagtcctctcctgctgtcacagctgccatccacttctcagtcccagggccatctcttggagtgacaaagctgggatcaaggacagggagttgtaacagagcagtgccagagcatgggcccaggtcccaggggagaggttggggctggcaggccactggcatgtgctgagtagcgcagagctacccagtgagaggccttgtctaactgcctttccttctaaagggaatgtttttttctgagataaaataaaaacgagccacatcgtgttttaagcttgtccaaatgagaaaagcgtct

SEQ ID NO: 286456 - DNA, 2425 bp, Homo sapiens
tgtcctttcacagggcggctggtgtcccttaggtgcctcaggaaccctgaagctgggctgagccatgatgctgctgccagaacccctgcagagggcctggtttcaggagactcagagtcctctgtgaaaaagcccttggagagcgccccagcagggctgcacttggctcctgtgaggaaggggctcaggggtctgggcccctccgcctgggccgggctgggagccaggcgggcggctgggctgcagcaatggaccgtgagctggcccagcccgcgtccgtgctgagcctgcctgtcgtctgtggccatgcccatcatgggctcctcggtgtacatcacggtggagctggccattgctgtgctggccatcctgggcaatgtgctggtgtgctgggccgtgtggctcaacagcaacctgcagaacgtcaccaactactttgtggtgtcactggcggcggccgacatcgcagtgggtgtgctcgccatcccctttgccatcaccatcagcaccgggttctgcgctgcctgccacggctgcctcttcattgcctgcttcgtcctggtcctcacgcagagctccatcttcagtctcctggccatcgccattgaccgctacattgccatccgcatcccgctccggtacaatggcttggtgaccggcacgagggctaagggcatcattgccatctgctgggtgctgtcgtttgccatcggcctgactcccatgctaggttggaacaactgcggtcagccaaaggagggcaagaaccactcccagggctgcggggagggccaagtggcctgtctctttgaggatgtggtccccatgaactacatggtgtacttcaacttctttgcctgtgtgctggtgcccctgctgctcatgctgggtgtctatttgcggatcttcctggcggcgcgacgacagctgaagcagatggagagccagcctctgccgggggagcgggcacggtccacactgcagaaggaggtccatgctgccaagtcactggccatcattgtggggctctttgccctctgctggctgcccctacacatcatcaactgcttcactttcttctgccccgactgcagccacgcccctctctggctcatgtacctggccatcgtcctctcccacaccaattcggttgtgaatcccttcatctacgcctaccgtatccgcgagttccgccagaccttccgcaagatcattcgcagccacgtcctgaggcagcaagaacctttcaaggcagctggcaccagtgcccgggtcttggcagctcatggcagtgacggagagcaggtcagcctccgtctcaacggccacccgccaggagtgtgggccaacggcagtgctccccaccctgagcggaggcccaatggctatgccctggggctggtgagtggagggagtgcccaagagtcccaggggaacacgggcctcccagacgtggagctccttagccatgagctcaagggagtgtgcccagagccccctggcctagatgaccccctggcccaggatggagcaggagtgtcctgatgattcatggagtttgccccttcctaagggaaggagatctttatctttctggttggcttgaccagtcacgttgggagaagagagagagtgccaggagaccctgagggcagccggttcctactttggactgagagaagggagccccaggctggagcagcatgaggcccagcaagaagggcttgggttctgaggaagcagatgtttcatgctgtgaggccttgcaccaggtgggggccacagcaccagcagcatctttgctgggcagggcccagccctccactgcagaagcatctggaagcaccaccttgtctccacagagcagcttgggcacagcagactggcctggccctgagactggggagtggctccaacagcctcctgccacccacacaccactctccctagactctcctagggttcaggagctgctgggcccagaggtgacatttgactttttttccaggaaaaatgtaagtgtgaggaaaccctttttattttattacctttcactctctggctgctgggtctgccgtcggtcctgctgctaacctggcaccagagcctctgcccggggagcctcaggcagtcctctcctgctgtcacagctgccatccacttctcagtcccagggccatctcttggagtgacaaagctgggatcaaggacagggagttgtaacagagcagtgccagagcatgggcccaggtcccaggggagaggttggggctggcaggccactggcatgtgctgagtagcgcagagctacccagtgagaggccttgtctaactgcctttccttctaaagggaatgtttttttctgagataaaataaaaacgagccacatcgtgttttaagcttgtccaaatgagaaaagcgtct

SEQ ID NO: 286457 - DNA, 2708 bp, Homo sapiens
ttttttttttattgtccattctttcatgaaatctaggccacctttcctacagggctgaggtctgcttactggctggcagatccagccatttcccgagtatgagactgggagtcggtaggcttggatttctgtctggctctcactcaggaagactgagtgatttcgggcagattactgtccccctggacctcagtatttccttgcaaatgttaagatggccatgtaaatgttaacaagtaattctctcatttctctccagagggctgtgggtgggtttggaggggagaaatggcatctcctttggcctgggacctcctcccctcttttaccctccatgctgcctctcctcaagggcttctggagtccccaagtcaaatggcaaatggggaagagaagacagggtatggagtacaagaggcctagatcccctataggtctgatctggctggtgctgcccctagccagtaaagccaccctccagaccccttcaagcctgttgtagccttaaccaagatcaaccaacatggaggtgactgatcttggttaaggctgcgaccaacatggaggtaattgatcttggttaaggctacgacacgtttccctttagagaaaaatcatgttttccccctcaaaaaatcatgcgttaatttcctccaaccaaactaagtcccaggactactccgaaaactactcaatgaccatctgggcatttgtacatgggtttccatttcttggatgcctgctctcctgttacctcccagaagcctgtgaaaaaggcaaggcatattacttccacttaacggaagaggatgctggggcgaggtggcaggaaatgactggtccaagaccttacagtcaggaaatgtggaaacgggtgctgctctggggttctgaactcttggccctgcttaaccctggcttctcagatctctgatgctggtctcttctccccaggtacaatggcttggtgaccggcacgagggctaagggcatcattgccatctgctgggtgctgtcgtttgccatcggcctgactcccatgctaggttggaacaactgcggtcagccaaaggagggcaagaaccactcccagggctgcggggagggccaagtggcctgtctctttgaggatgtggtccccatgaactacatggtgtacttcaacttctttgcctgtgtgctggtgcccctgctgctcatgctgggtgtctatttgcggatcttcctggcggcgcgacgacagctgaagcagatggagagccagcctctgccgggggagcgggcacggtccacactgcagaaggaggtccatgctgccaagtcatggctgcccctacacatcatcaactgcttcactttcttctgccccgactgcagccacgcccctctctggctcatgtacctggccatcgtcctctcccacaccaattcggttgtgaatcccttcatctacgcctaccgtatccgcgagttccgccagaccttccgcaagatcattcgcagccacgtcctgaggcagcaagaacctttcaaggcagctggcaccagtgcccgggtcttggcagctcatggcagtgacggagagcaggtcagcctccgtctcaacggccacccgccaggagtgtgggccaacggcagtgctccccaccctgagcggaggcccaatggctatgccctggggctggtgagtggagggagtgcccaagagtcccaggggaacacgggcctcccagacgtggagctccttagccatgagctcaagggagtgtgcccagagccccctggcctagatgaccccctggcccaggatggagcaggagtgtcctgatgattcatggagtttgccccttcctaagggaaggagatctttatctttctggttggcttgaccagtcacgttgggagaagagagagagtgccaggagaccctgagggcagccggttcctactttggactgagagaagggagccccaggctggagcagcatgaggcccagcaagaagggcttgggttctgaggaagcagatgtttcatgctgtgaggccttgcaccaggtgggggccacagcaccagcagcatctttgctgggcagggcccagccctccactgcagaagcatctggaagcaccaccttgtctccacagagcagcttgggcacagcagactggcctggccctgagactggggagtggctccaacagcctcctgccacccacacaccactctccctagactctcctagggttcaggagctgctgggcccagaggtgacatttgactttttttccaggaaaaatgtaagtgtgaggaaaccctttttattttattacctttcactctctggctgctgggtctgccgtcggtcctgctgctaacctggcaccagagcctctgcccggggagcctcaggcagtcctctcctgctgtcacagctgccatccacttctcagtcccagggccatctcttggagtgacaaagctgggatcaaggacagggagttgtaacagagcagtgccagagcatgggcccaggtcccaggggagaggttggggctggcaggccactggcatgtgctgagtagcgcagagctacccagtgagaggccttgtctaactgcctttccttctaaagggaatgtttttttctgagataaaataaaaacgagccacatcgtgttttaagcttgtccaaatgagaaaagcgtct

SEQ ID NO: 286458 - DNA, 2506 bp, Homo sapiens
ttttttttttattgtccattctttcatgaaatctaggccacctttcctacagggctgaggtctgcttactggctggcagatccagccatttcccgagtatgagactgggagtcggtaggcttggatttctgtctggctctcactcaggaagactgagtgatttcgggcagattactgtccccctggacctcagtatttccttgcaaatgttaagatggccatgtaaatgttaacaagtaattctctcatttctctccagagggctgtgggtgggtttggaggggagaaatggcatctcctttggcctgggacctcctcccctcttttaccctccatgctgcctctcctcaagggcttctggagtccccaagtcaaatggcaaatggggaagagaagacagggtatggagtacaagaggcctagatcccctataggtctgatctggctggtgctgcccctagccagtaaagccaccctccagaccccttcaagcctgttgtagccttaaccaagatcaaccaacatggaggtgactgatcttggttaaggctgcgaccaacatggaggtaattgatcttggttaaggctacgacacgtttccctttagagaaaaatcatgttttccccctcaaaaaatcatgcgttaatttcctccaaccaaactaagtcccaggactactccgaaaactactcaatgaccatctgggcatttgtacatgggtttccatttcttggatgcctgctctcctgttacctcccagaagcctgtgaaaaaggcaaggcatattacttccacttaacggaagaggatgctggggcgaggtggcaggaaatgactggtccaagaccttacagtcaggaaatgtggaaacgggtgctgctctggggttctgaactcttggccctgcttaaccctggcttctcagatctctgatgctggtctcttctccccaggtacaatggcttggtgaccggcacgagggctaagggcatcattgccatctgctgggtgctgtcgtttgccatcggcctgactcccatgctaggttggaacaactgcggtcagccaaaggagggcaagaaccactcccagggctgcggggagggccaagtggcctgtctctttgaggatgtggtccccatgaactacatggtgtacttcaacttctttgcctgtgtgctggtgcccctgctgctcatgctgggtgtctatttgcggatcttcctggcggcgcgacgacagctgaagcagatggagagccagcctctgccgggggagcgggcacggtccacactgcagaaggaggtccatgctgccaagtcatggctgcccctacacatcatcaactgcttcactttcttctgccccgactgcagccacgcccctctctggctcatgtacctggccatcgtcctctcccacaccaattcggttgtgaatcccttcatctacgcctaccgtatccgcgagttccgccagaccttccgcaagatcattcgcagccacgtcctgaggcagcaagaacctttcaaggcagctggcaccagtgcccgggtcttggcagctcatggcagtgacggagagcaggtcagcctccgtctcaacggccacccgccaggagtgtgggccaacggcagtgctccccaccctgagcggaggcccaatggctatgccctggggctggtgagtggagggagtgcccaagagtcccaggggaacacgggcctcccagacgtggagctccttagccatgagctcaagggagtgtgcccagagccccctggcctagatgaccccctggcccaggatggagcaggagtgtcctgatgattcatggagtttgccccttcctaagggaaggagatctttatctttctggttggcttgaccagtcacgttgggagaagagagagagtgccaggagaccctgagggcagccggttcctactttggactgagagaagggagccccaggctggagcagcatgaggcccagcaagaagggcttgggttctgaggaagcagatgtttcatgctgtgaggccttgcaccaggtgggggccacagcaccagcagcatctttgctgggcagggcccagccctccactgcagaagcatctggaagcaccaccttgtctccacagagcagcttgggcacagcagactggcctggccctgagactggggagtggctccaacagcctcaggcagtcctctcctgctgtcacagctgccatccacttctcagtcccagggccatctcttggagtgacaaagctgggatcaaggacagggagttgtaacagagcagtgccagagcatgggcccaggtcccaggggagaggttggggctggcaggccactggcatgtgctgagtagcgcagagctacccagtgagaggccttgtctaactgcctttccttctaaagggaatgtttttttctgagataaaataaaaacgagccacatcgtgttttaagcttgtccaaatgagaaaagcgtct

SEQ ID NO: 286459 - DNA, 1063 bp, Homo sapiens
agcgtggagtgtggcgctgaggaagcggcgggacggatgcgagcccgggaggagcgcgctggggggccgcaggcgggggatgtggcgcggtccaggcccgtcgcggcctcgtcctgacagggacacctgcgggatcgtccttccaggatcgcctgcgggcctcgcgggccgatgcctcgggtccccctccggcctcggtttctccgcgcagcggggcggggcgggggcagcgcgggtctcaaagctgcctgcagggggcgcccgtgagcggcgcggccggagccggagacccagcggccgccgagacagcgggagccggcgtgcgagcggcaggtgcctcaggaaccctgaagctgggctgagccatgatgctgctgccagaacccctgcagagggcctggtttcaggagactcagagtcctctgtgaaaaagcccttggagagcgccccagcagggctgcacttggctcctgtgaggaaggggctcaggggtctgggcccctccgcctgggccgggctgggagccaggcgggcggctgggctgcagcaatggaccgtgagctggcccagcccgcgtccgtgctgagcctgcctgtcgtctgtggccatgcccatcatgggctcctcggtgtacatcacggtggagctggccattgctgtgctggccatcctgggcaatgtgctggtgtgctgggccgtgtggctcaacagcaacctgcagaacgtcaccaactactttgtggtgtcactggcggcggccgacatcgcagtgggtgtgctcgccatcccctttgccatcaccatcagcaccgggttctgcgctgcctgccacggctgcctcttcattgcctgcttcgtcctggtcctcacgcagaagcatgggcccaggtcccaggggagaggttggggctggcaggccactggcatgtgctgagtagcgcagagctacccagtgagaggccttgtctaactgcctttccttctaaagggaatgtttttttctgagataaaataaaaacgagccacatcgtgttttaagcttgtccaaatgagaaaagcgtct

SEQ ID NO: 286460 - DNA, 818 bp, Homo sapiens
cgcgcctcgcggaggatgcctcccccacttgcaatgtgagtcctaagagccagaggtgggaggggctggctctcagttcccgcctcgcggtgtgtgcctgccccgctgcgatggaggtcctaagagcaagggggggaagaggggctggctctggtagattgcaaatgacctgctttttttctgatcccgagctgcgttcggacccctgtcggatagtaaatcccagtaaggtacctgccgtgggcagatctgagctttcttcttggacaccccatacccacagtcctccaggccacccttaagtacaatgttctcctacctaagaaggcatctggattttctctttccttggaaatagtaaagaactactctttgactgtttttgacctcacagtgaacctcaaatacactggaattcgcaataaatccagtatggtggttatagatgtaaaaatgctatcaggatttactccaaccatgtcatccattgaagagcttgaaaacaagggccaagtgatgaagactgaagtcaagaatgaccatgttcttttctacttggaaaatgtttttggtcgagcagacagtttcactttttctgctgagcagagcaaccttgtgttcaacattcagccagccccaggcatggtctacgattagtacgaaaaaggtggagaagcatttcttttaacaaactgattcttctgtatcaaacctggaaaaaaatcatgaaccatctgacatcgtgaacagtctgcagtgggctatggtttcttgacaagtcttatttccttatcatcccattaaatgttgtcattttg

SEQ ID NO: 286461 - DNA, 950 bp, Homo sapiens
  misc_feature (855)..(855): n is a, c, g, or t
  misc_feature (891)..(891): n is a, c, g, or t
  misc_feature (895)..(895): n is a, c, g, or t
  misc_feature (897)..(897): n is a, c, g, or t
  misc_feature (908)..(908): n is a, c, g, or t
  misc_feature (929)..(929): n is a, c, g, or t
  misc_feature (938)..(938): n is a, c, g, or t
  misc_feature (943)..(943): n is a, c, g, or t
cgcgcctcgcggaggatgcctcccccacttgcaatgtgagtcctaagagccagaggtgggaggggctggctctcagttcccgcctcgcggtgtgtgcctgccccgctgcgatggaggtcctaagagcaagggggggaagaggggctggctctggtagattgcaaatgacctgctttttttctgatcccgagctgcgttcggacccctgtcggatagtaaatcccagtaaggtacctgccgtgggcagatctgagctttcttcttggacaccccatacccacagtcctccaggccacccttaagtacaatgttctcctacctaagaaggcatctggattttctctttccttggaaatagtaaagaactactctttgactgtttttgacctcacagtgaacctcaaatacactggaattcgcaataaatccagtatggtggttatagatgtaaaaatgctatcaggatttactccaaccatgtcatccattgaagagcttgaaaacaagggccaagtgatgaagactgaagtcaagaatgaccatgttcttttctacttggaaaatgtttttggtcgagcagacagtttcactttttctgctgagcagagcaaccttgtgttcaacattcagccagccccaggcatggtctacgattagtacgaaaaaggtggagaagcatttcttttaacaaactgattcttctgtatcaaacctggaaaaaaatcatgaaccatctgacatcgtgaacagtctgcagtgggctatggtttcttgacaagtcttatttccttatcatcccattaaatgttgtcattttgaaaaaaaaaaaaaaaaaaaaaaaaaaaaaaaaaaaanaaaaaaaaaaaaaaaaaaaaaaaaaaaaaaaaaaanaaananaaaaaaaaaanaaaaaaaaaaaaaaaaaaaanagaaaaaangaaanaaagaaa

SEQ ID NO: 286462 - DNA, 760 bp, Homo sapiens
acctggacaatacacagtagatgtggaaggacgcggttgtacatttatccaggccacccttaagtacaatgttctcctacctaagaaggcatctggattttctctttccttggaaatagtaaagaactactctttgactgtttttgacctcacagtgaacctcaaatacactggaattcgcaataaatccagtatggtggttatagatgtaaaaatgctatcaggatttactccaaccatgtcatccattgaagagcttgaaaacaagggccaagtgatgaagactgaagtcaagaatgaccatgttcttttctacttggaaaatgtttttggtcgagcagacagtttcactttttctgctgagcagagcaaccttgtgttcaacattcagccagccccaggcatggtctacgattagtacgaaaaaggtaggcaagcaacagccatgccctaaggttattgaatgtggtgtttatatctaacattccctgagctactaaactttccaaaatcaacctctgtcttcacagagtaaacaataaatggcattactttgtgttctggtttctttatcccatgatgtgtcttctgactgaacccattttccagttaccagagtttttcaacaccagaatccttgcaatataacctgacagggctccacttgaacttgaaatacaagccacactaagcttccaggtctttttgttattgtcattgttgttcatgctaagactgactgttccaagctacttctgtg

SEQ ID NO: 286463 - DNA, 788 bp, Homo sapiens
tgccagaagtttttcctttaactcctgaaagccttcctgttgttgggatccccattccaaagcttcccggtccccgccccctttgtgacctcatacaaaggcttggctaatactgcaaagtttgggatccacagtctacaaaaccccacagctcctaagaattctctcacctgccttctgcccttaggctccggtagattgcaaacgacctgctttcttcctgatcccgggctgcgttcggacccctgtggtatagtaaatcccaagtaaggtacctgcggtcggcagatctgagctttcttcttggacacctaatacccagggtcctccaggccacccttaagtacaatgttctcctacctaagaaggcatctggattttctctttccttggaaatagtaaagaactactctttgactgtttttgacctcacagtgaacctcaaagtcttactttgtcacccaggctgcagtacagtggcacagtggcacaatctcagctcactgcaacttccagctcctgggttcaaaggattcttacggctcagcctcctgagtagctgggattagaggcgtgcaccaccacatctggctaatttttctatttttagtagagtcagagttttgccatattggccaggctggtcttgaactctgaccctcaagtgatccacccaccttggcctccagaagtgctgggattacaggtgtgagcaaccacgccctgatgaactatggaactcttaacttcataccccaatagtcttatccagaagcaggaaactgagc

SEQ ID NO: 286464 - DNA, 796 bp, Homo sapiens
tgccagaagtttttcctttaactcctgaaagccttcctgttgttgggatccccattccaaagcttcccggtccccgccccctttgtgacctcatacaaaggcttggctaatactgcaaagtttgggatccacagtctacaaaaccccacagctcctaagaattctctcacctgccttctgcccttaggctccggtagattgcaaacgacctgctttcttcctgatcccgggctgcgttcggacccctgtggtatagtaaatcccaagtaaggtacctgcggtcggcagatctgagctttcttcttggacacctaatacccagggtcctccaggtgggtcctaaggatcttaggattcgcgatgggggtcttagccagggggggaagaggggctggctctcagtccccgcctcgcggggggtgcctccccccctgcgatgggggtccgaagagcctgggggggaagaggggctggctctcatccccgcctctcagggggtgcctccaacccactgcgatgggggtccgaagagcctggggggggaagaggggcaggctctcagtccccgcttcgcggggggagcctccccacacagcgatgggggtcccaagagccaggggggaagtggggctggctctcagttcccgccttggggtgtgtgtctgccctgctgcgatgggggtcctaagagcaagcgggggaagaggggctggctccggtagattgcaaatgacctgctttctttctgatctcgagctgtgttcggacacctgtcggatagtaaatcccaagtaac

SEQ ID NO: 286465 - DNA, 879 bp, Homo sapiens
cgcgcctcgcggaggatgcctcccccacttgcaatgtgagtcctaagagccagaggtgggaggggctggctctcagttcccgcctcgcggtgtgtgcctgccccgctgcgatggaggtcctaagagcaagggggggaagaggggctggctctggtagattgcaaatgacctgctttttttctgatcccgagctgcgttcggacccctgtcggatagtaaatcccagtaaggtacctgccgtgggcagatctgagctttcttcttggacaccccatacccacagtcctccaggtacctgccgtgggcagatctgagctttcttcttggacaccccatacccacagtcctccaggccacccttaagtacaatgttctcctacctaagaaggcatctggattttctctttccttggaaatagtaaagaactactctttgactgtttttgacctcacagtgaacctcaaatacactggaattcgcaataaatccagtatggtggttatagatgtaaaaatgctatcaggatttactccaaccatgtcatccattgaagagcttgaaaacaagggccaagtgatgaagactgaagtcaagaatgaccatgttcttttctacttggaaaatgtttttggtcgagcagacagtttcactttttctgctgagcagagcaaccttgtgttcaacattcagccagccccaggcatggtctacgattagtacgaaaaaggtggagaagcatttcttttaacaaactgattcttctgtatcaaacctggaaaaaaatcatgaaccatctgacatcgtgaacagtctgcagtgggctatggtttcttgacaagtcttatttccttatcatcccattaaatgttgtcattttg

SEQ ID NO: 286466 - DNA, 579 bp, Homo sapiens
acctggacaatacacagtagatgtggaaggacgcggttgtacatttatccaggccacccttaagtacaatgttctcctacctaagaaggcatctggattttctctttccttggaaatagtaaagaactactctttgactgtttttgacctcacagtgaacctcaaatacactggaattcgcaataaatccagtatggtggttatagatgtaaaaatgctatcaggatttactccaaccatgtcatccattgaagagcttgaaaacaagggccaagtgatgaagactgaagtcaagaatgaccatgttcttttctacttggaaaatgtttttggtcgagcagacagtttcactttttctgctgagcagagcaaccttgtgttcaacattcagccagccccaggcatggtctacgattagtacgaaaaaggtggagaagcatttcttttaacaaactgattcttctgtatcaaacctggaaaaaaatcatgaaccatctgacatcgtgaacagtctgcagtgggctatggtttcttgacaagtcttatttccttatcatcccattaaatgttgtcattttg

SEQ ID NO: 286467 - DNA, 1297 bp, Homo sapiens
cgcgcctcgcggaggatgcctcccccacttgcaatgtgagtcctaagagccagaggtgggaggggctggctctcagttcccgcctcgcggtgtgtgcctgccccgctgcgatggaggtcctaagagcaagggggggaagaggggctggctctggtagattgcaaatgacctgctttttttctgatcccgagctgcgttcggacccctgtcggatagtaaatcccagtaaggtacctgccgtgggcagatctgagctttcttcttggacaccccatacccacagtcctccaggccacccttaagtacaatgttctcctacctaagaaggcatctggattttctctttccttggaaatagtaaagaactactctttgactgtttttgacctcacagtgaacctcaaatacactggaattcgcaataaatccagtatggtggttatagatgtaaaaatgctatcaggatttactccaaccatgtcatccattgaagagcttgaaaacaagggccaagtgatgaagactgaagtcaagaatgaccatgttcttttctacttggaaaatgtttttggtcgagcagacagtttcactttttctgctgagcagagcaaccttgtgttcaacattcagccagccccaggcatggtctacgattagtacgaaaaagaagaatatgccctagctttttaccacatcaacagtagttcagtttccgagtgagacaaagcaattactggaagaagtaaagaaattttattacgtcataaaccattgaaaacacatctagtaagaaaatgaaaacctgaataagataggacaatagttgaagaaagaaaagtctctggtacttcattagacttgtgtagctgtgtactgcatgagtaatctgataatcattaagattatattaatttctttaaaaatagctttaaagaattcacagctatatatgtaccttttataaatctctcatttttgttttgtaagttgacaggtcagtaaaaatttaggcatatatatttgtacatatgtgtgtatatgtatatacatgtctatgtgcctatatatgcatgtttttatttctaaatatctatttatatatacatacaaatgtgtttactgtttaaatgatgttttaaatcccaggtggagaagcatttcttttaacaaactgattcttctgtatcaaacctggaaaaaaatcatgaaccatctgacatcgtgaacagtctgcagtgggctatggtttcttgacaagtcttatttccttatcatcccattaaatgttgtcattttg

SEQ ID NO: 286468 - DNA, 995 bp, Homo sapiens
cgcgcctcgcggaggatgcctcccccacttgcaatgtgagtcctaagagccagaggtgggaggggctggctctcagttcccgcctcgcggtgtgtgcctgccccgctgcgatggaggtcctaagagcaagggggggaagaggggctggctctggtagattgcaaatgacctgctttttttctgatcccgagctgcgttcggacccctgtcggatagtaaatcccagtaaggtacctgccgtgggcagatctgagctttcttcttggacaccccatacccacagtcctccaggccacccttaagtacaatgttctcctacctaagaaggcatctggattttctctttccttggaaatagtaaagaactactctttgactgtttttgacctcacagtgaacctcaaatacactggaattcgcaataaatccagtatggtggttatagatgtaaaaatgctatcaggatttactccaaccatgtcatccattgaagagcttgaaaacaagggccaagtgatgaagactgaagtcaagaatgaccatgttcttttctacttggaaaatgtttttggtcgagcagacagtttcactttttctgctgagcagagcaaccttgtgttcaacattcagccagccccaggcatggtctacgattagtacgaaaaagaagaatatgccctagctttttaccacatcaacagtagttcagtttccgagtgagacaaagcaattactggaagaagtaaagaaattttattacgtcataaaccattgaaaacacatctagtaagaaaatgaaaacctgaataagataggacaatagttgaagaaagaaaagtctctggtggagaagcatttcttttaacaaactgattcttctgtatcaaacctggaaaaaaatcatgaaccatctgacatcgtgaacagtctgcagtgggctatggtttcttgacaagtcttatttccttatcatcccattaaatgttgtcattttg

SEQ ID NO: 286469 - DNA, 893 bp, Homo sapiens
cgcgcctcgcggaggatgcctcccccacttgcaatgtgagtcctaagagccagaggtgggaggggctggctctcagttcccgcctcgcggtgtgtgcctgccccgctgcgatggaggtcctaagagcaagggggggaagaggggctggctctggtagattgcaaatgacctgctttttttctgatcccgagctgcgttcggacccctgtcggatagtaaatcccagtaaggtacctgccgtgggcagatctgagctttcttcttggacaccccatacccacagtcctccaggccacccttaagtacaatgttctcctacctaagaaggcatctggattttctctttccttggaaatagtaaagaactactctttgactgtttttgacctcacagtgaacctcaaatacactggaattcgcaataaatccagtatggtggttatagatgtaaaaatgctatcaggatttactccaaccatgtcatccattgaagagcttgaaaacaagggccaagtgatgaagactgaagtcaagaatgaccatgttcttttctacttggaaaatgtttttggtcgagcagacagtttcactttttctgctgagcagagcaaccttgtgttcaacattcagccagccccaggcatggtctacgattagtacgaaaaagaagaatatgccctagctttttaccacatcaacagtagttcagtttccgagtgagacaaagcaattactggaagaagtggagaagcatttcttttaacaaactgattcttctgtatcaaacctggaaaaaaatcatgaaccatctgacatcgtgaacagtctgcagtgggctatggtttcttgacaagtcttatttccttatcatcccattaaatgttgtcattttg

SEQ ID NO: 286470 - DNA, 654 bp, Homo sapiens
acctggacaatacacagtagatgtggaaggacgcggttgtacatttatccaggccacccttaagtacaatgttctcctacctaagaaggcatctggattttctctttccttggaaatagtaaagaactactctttgactgtttttgacctcacagtgaacctcaaatacactggaattcgcaataaatccagtatggtggttatagatgtaaaaatgctatcaggatttactccaaccatgtcatccattgaagagcttgaaaacaagggccaagtgatgaagactgaagtcaagaatgaccatgttcttttctacttggaaaatgtttttggtcgagcagacagtttcactttttctgctgagcagagcaaccttgtgttcaacattcagccagccccaggcatggtctacgattagtacgaaaaagaagaatatgccctagctttttaccacatcaacagtagttcagtttccgagtgagacaaagcaattactggaagaagtggagaagcatttcttttaacaaactgattcttctgtatcaaacctggaaaaaaatcatgaaccatctgacatcgtgaacagtctgcagtgggctatggtttcttgacaagtcttatttccttatcatcccattaaatgttgtcattttg

SEQ ID NO: 286471 - DNA, 759 bp, Homo sapiens
tagcatatttctgcataatgtataaaatgggaaagtaattgtctctatttcaaaattattggaaggattagatctaatgtgcttatatcatctatttaataaaaatacatgttccctttattttttcagaagaatatgccctagctttttaccacatcaacagtagttcagtttccgagtgagacaaagcaattactggaagaagtaaagaaattttattacgtcataaaccattgaaaacacatctagtaagaaaatgaaaacctgaataagataggacaatagttgaagaaagaaaagtctctggtacttcattagacttgtgtagctgtgtactgcatgagtaatctgataatcattaagattatattaatttctttaaaaatagctttaaagaattcacagctatatatgtaccttttataaatctctcatttttgttttgtaagttgacaggtcagtaaaaatttaggcatatatatttgtacatatgtgtgtatatgtatatacatgtctatgtgcctatatatgcatgtttttatttctaaatatctatttatatatacatacaaatgtgtttactgtttaaatgatgttttaaatcccaggtggagaagcatttcttttaacaaactgattcttctgtatcaaacctggaaaaaaatcatgaaccatctgacatcgtgaacagtctgcagtgggctatggtttcttgacaagtcttatttccttatcatcccattaaatgttgtcattttg

SEQ ID NO: 286472 - DNA, 1177 bp, Homo sapiens
tggggcaggagcttctttgtttgaatttgctcctgagaggatgaggcctcctagagcactggctcctggacagcaacctcctttggtgccttgtgaccagggccctgatggttcattagatggagccttcgagtcttagggagttgccgcagggtccccacagcggctcccgacggttgtgaaccagcatccatcctccacggattccggcaacccgcctggccctggacgtgtctcaactggcccgcgtgaggggccgccccggaaatgacgcgctgccccgctggccaagcggaagtggagatggcggagctgtacgtgaagccgggcaacaaggaacgcggctggaacgacccgccgcagttctcatacgggctgcagacccaggccggcggacccaggcgctcgctgcttaccaagagggtagccgcaccccaggatggatcccccagagtccccgcatcagagacttctcctgggcctcccccaatggggcctccacctccttcaagtaaggctcccaggtccccacctgtggggagtggtcctgcctctggcgtggagcccacaagtttcccagtcgagtctgaggctcgactgatggaggatgtgctgagacctttggaacaggcattggaagactgccgtggccacacaaggaagcaggtatgtgatgacatcagccgacgcctggcactgctgcaggaacagtgggctggaggaaagttgtcaatacctgtaaagaagagaatggctctactggtgcaagagctttcaagccaccggtgggacgcagcagatgacatccaccgctccctcatggttgaccatgtgactgaggtcagtcagtggatggtaggagttaaaagattaattgcagaaaagaggagtctgttttcagaggaggcagccaatgaagagaaatctgcagccacagctgagaagaaccataccataccaggcttccagcaggcttcataatcctcggttccccagactcaccggacaccatctcctatgccttggagaccttctgtcacttggctcccttcttaccaccaccaagactgtcccactgggcctgacccacctatgagggaagaagtcccacctgggccagagggagttcatgtgttactcataacatgcatttcaataaaaacatctctgcggtggg

SEQ ID NO: 286473 - DNA, 1775 bp, Homo sapiens
tggggcaggagcttctttgtttgaatttgctcctgagaggatgaggcctcctagagcactggctcctggacagcaacctcctttggtgccttgtgaccagggccctgatggttcattagatggagccttcgagtcttagggagttgccgcagggtccccacagcggctcccgacggttgtgaaccagcatccatcctccacggattccggcaacccgcctggccctggacgtgtctcaactggcccgcgtgaggggccgccccggaaatgacgcgctgccccgctggccaagcggaagtggagatggcggagctgtacgtgaagccgggtgagcgcagccggcgggctagggcactaggttgtcgccccggcctaggctgggggcggttgcggcgcttagtatggaccctctgtctcccccagccccagtataagctaacagtggagttccgggctcgcttcacacatccctcgcctccgcaggcaacaaggaacgcggctggaacgacccgccgcagttctcatacgggctgcagacccaggccggcggacccaggcgctcgctgcttaccaagagggtagccgcaccccaggatggatcccccagagtccccgcatcagagacttctcctgggcctcccccaatggggcctccacctccttcaagtaaggctcccaggtccccacctgtggggagtggtcctgcctctggcgtggagcccacaagtttcccagtcgagtctgaggctcgactgatggaggatgtgctgagacctttggaacaggcattggaagactgccgtggccacacaaggaagcaggtatgtgatgacatcagccgacgcctggcactgctgcaggaacagtgggctggaggaaagttgtcaatacctgtaaagaagagaatggctctactggtgcaagagctttcaagccaccggtgggacgcagcagatgacatccaccgctccctcatggttgaccatgtgactgaggtcagtcagtggatggtaggagttaaaagattaattgcagaaaagaggagtctgttttcagaggaggcagccaatgaagagaaatctgcagccacagctgagaagaaccataccataccaggcttccagcaggcttcataatcctcggttccccagactcaccggacaccatctcctatgccttggagaccttctgtcacttggctcccttcttaccaccaccaagactgtcccactgggcctgacccacctatgagggaagaagtcccacctgggccagagggagttcatgtgttactcataacatgcatttcaataaaaacatctctgcggtgggccttgggtaggagagatgaacccttccggtgccaagctagtcccctctggtgtcctcgactgccctgctccctgtgtatctgcaaacctctgttctcccttctccattcatcaggaagggatctgctgggtaaagtcagactactgcctaccactttttcccaaagtagactgaaagcacatcctgtgctgggcggagcagctgtgtttggatggtttcatttcagcatgagaacagactcaaatagaacggggagacttttccctcaacaaaaggaaagacagtcctatttgcactgtatcacccttgagatactactgttacagagattagaaccacattgagtggggttttctgtgtaaatcgaaggagaaaaagaccagattactgagattggggattgtaactctgacttgccaaacaaactgctgcctcattttggg

SEQ ID NO: 286474 - DNA, 1620 bp, Homo sapiens
tggggcaggagcttctttgtttgaatttgctcctgagaggatgaggcctcctagagcactggctcctggacagcaacctcctttggtgccttgtgaccagggccctgatggttcattagatggagccttcgagtcttagggagttgccgcagggtccccacagcggctcccgacggttgtgaaccagcatccatcctccacggattccggcaacccgcctggccctggacgtgtctcaactggcccgcgtgaggggccgccccggaaatgacgcgctgccccgctggccaagcggaagtggagatggcggagctgtacgtgaagccgggcaacaaggaacgcggctggaacgacccgccgcagttctcatacgggctgcagacccaggccggcggacccaggcgctcgctgcttaccaagagggtagccgcaccccaggatggatcccccagagtccccgcatcagagacttctcctgggcctcccccaatggggcctccacctccttcaagtaaggctcccaggtccccacctgtggggagtggtcctgcctctggcgtggagcccacaagtttcccagtcgagtctgaggctcgactgatggaggatgtgctgagacctttggaacaggcattggaagactgccgtggccacacaaggaagcaggtatgtgatgacatcagccgacgcctggcactgctgcaggaacagtgggctggaggaaagttgtcaatacctgtaaagaagagaatggctctactggtgcaagagctttcaagccaccggtgggacgcagcagatgacatccaccgctccctcatggttgaccatgtgactgaggtcagtcagtggatggtaggagttaaaagattaattgcagaaaagaggagtctgttttcagaggaggcagccaatgaagagaaatctgcagccacagctgagaagaaccataccataccaggcttccagcaggcttcataatcctcggttccccagactcaccggacaccatctcctatgccttggagaccttctgtcacttggctcccttcttaccaccaccaagactgtcccactgggcctgacccacctatgagggaagaagtcccacctgggccagagggagttcatgtgttactcataacatgcatttcaataaaaacatctctgcggtgggccttgggtaggagagatgaacccttccggtgccaagctagtcccctctggtgtcctcgactgccctgctccctgtgtatctgcaaacctctgttctcccttctccattcatcaggaagggatctgctgggtaaagtcagactactgcctaccactttttcccaaagtagactgaaagcacatcctgtgctgggcggagcagctgtgtttggatggtttcatttcagcatgagaacagactcaaatagaacggggagacttttccctcaacaaaaggaaagacagtcctatttgcactgtatcacccttgagatactactgttacagagattagaaccacattgagtggggttttctgtgtaaatcgaaggagaaaaagaccagattactgagattggggattgtaactctgacttgccaaacaaactgctgcctcattttggg

SEQ ID NO: 286475 - DNA, 1447 bp, Homo sapiens
tggggcaggagcttctttgtttgaatttgctcctgagaggatgaggcctcctagagcactggctcctggacagcaacctcctttggtgccttgtgaccagggccctgatggttcattagatggagccttcgagtcttagggagttgccgcagggtccccacagcggctcccgacggttgtgaaccagcatccatcctccacggattccggcaacccgcctggccctggacgtgtctcaactggcccgcgtgaggggccgccccggaaatgacgcgctgccccgctggccaagcggaagtggagatggcggagctgtacgtgaagccgggcaacaaggaacgcggctggaacgacccgccgcagttctcatacgggctgcagacccaggccggcggacccaggcgctcgctgcttaccaagagggtagccgcaccccaggatggatcccccagagtccccgcatcagagacttctcctgggcctcccccaatggggcctccacctccttcaagtaaggctcccaggtccccacctgtggggagtggtcctgcctctggcgtggagcccacaagtttcccagtcgagtctgaggctcgactgatggaggatgtgctgagacctttggaacaggcattggaagactgccgtggccacacaaggaagcaggtatgtgatgacatcagccgacgcctggcactgctgcaggaacagtgggctggaggaaagttgtcaatacctgtaaagaagagaatggctctactggtgcaagagctttcaagccaccggtgggacgcagcagatgacatccaccgctccctcatggttgaccatgtgactgaggtcagtcagtggatggtaggagttaaaagattaattgcagaaaagaggagtctgttttcagaggaggcagccaatgaagagaaatctgcagccacagctgagaagaaccataccataccaggcttccagcaggcttcataatcctcggttccccagactcaccggacaccatctcctatgccttggagaccttctgtcacttggctcccttcttaccaccaccaagactgtcccactgggcctgacccacctatgagggaagaagtcccacctgggccagagggagttcatgtgttactcataacatgcatttcaataaaaacatctctgcggtgggccttgggtaggagagatgaacccttccggtgccaagctagtcccctctggtgtcctcgactgccctgctccctgtgtatctgcaaacctctgttctcccttctccattcatcaggaagggatctgctgggtaaagtcagactactgcctaccactttttcccaaagtagactgaaagcacatcctgtgctgggcggagcagctgtgtttggatggtttcatttcagcatgagaacagactcaggtggtgtgggtaccgagctgaagtcaa

SEQ ID NO: 286476 - DNA, 1332 bp, Homo sapiens
tggggcaggagcttctttgtttgaatttgctcctgagaggatgaggcctcctagagcactggctcctggacagcaacctcctttggtgccttgtgaccagggccctgatggttcattagatggagccttcgagtcttagggagttgccgcagggtccccacagcggctcccgacggttgtgaaccagcatccatcctccacggattccggcaacccgcctggccctggacgtgtctcaactggcccgcgtgaggggccgccccggaaatgacgcgctgccccgctggccaagcggaagtggagatggcggagctgtacgtgaagccgggtgagcgcagccggcgggctagggcactaggttgtcgccccggcctaggctgggggcggttgcggcgcttagtatggaccctctgtctcccccagccccagtataagctaacagtggagttccgggctcgcttcacacatccctcgcctccgcaggcaacaaggaacgcggctggaacgacccgccgcagttctcatacgggctgcagacccaggccggcggacccaggcgctcgctgcttaccaagagggtagccgcaccccaggatggatcccccagagtccccgcatcagagacttctcctgggcctcccccaatggggcctccacctccttcaagtaaggctcccaggtccccacctgtggggagtggtcctgcctctggcgtggagcccacaagtttcccagtcgagtctgaggctcgactgatggaggatgtgctgagacctttggaacaggcattggaagactgccgtggccacacaaggaagcaggtatgtgatgacatcagccgacgcctggcactgctgcaggaacagtgggctggaggaaagttgtcaatacctgtaaagaagagaatggctctactggtgcaagagctttcaagccaccggtgggacgcagcagatgacatccaccgctccctcatggttgaccatgtgactgaggtcagtcagtggatggtaggagttaaaagattaattgcagaaaagaggagtctgttttcagaggaggcagccaatgaagagaaatctgcagccacagctgagaagaaccataccataccaggcttccagcaggcttcataatcctcggttccccagactcaccggacaccatctcctatgccttggagaccttctgtcacttggctcccttcttaccaccaccaagactgtcccactgggcctgacccacctatgagggaagaagtcccacctgggccagagggagttcatgtgttactcataacatgcatttcaataaaaacatctctgcggtggg

SEQ ID NO: 286477 - DNA, 887 bp, Homo sapiens
gcccccgggtgtcgatcggccgagggtacgtgaagcgggcaacaaggaacgcggctggaacgacccgccgcagttctcatacgggctgcagacccaggccggcggacccaggcgctcgctgcttaccaagagggtagccgcaccccaggatggatcccccagagtccccgcatcagagacttctcctgggcctcccccaatggggcctccacctccttcaagtaaggctcccaggtccccacctgtggggagtggtcctgcctctggcgtggagcccacaagtttcccagtcgagtctgaggctcgactgatggaggatgtgctgagacctttggaacaggcattggaagactgccgtggccacacaaggaagcaggtatgtgatgacatcagccgacgcctggcactgctgcaggaacagtgggctggaggaaagttgtcaatacctgtaaagaagagaatggctctactggtgcaagagctttcaagccaccggtgggacgcagcagatgacatccaccgctccctcatggttgaccatgtgactgaggtcagtcagtggatggtaggagttaaaagattaattgcagaaaagaggagtctgttttcagaggaggcagccaatgaagagaaatctgcagccacagctgagaagaaccataccataccaggcttccagcaggcttcataatcctcggttccccagactcaccggacaccatctcctatgccttggagaccttctgtcacttggctcccttcttaccaccaccaagactgtcccactgggcctgacccacctatgagggaagaagtcccacctgggccagagggagttcatgtgttactcataacatgcatttcaataaaaacatctctgcggtggg

SEQ ID NO: 286478 - DNA, 897 bp, Homo sapiens
  misc_feature (30)..(30): n is a, c, g, or t
aacaacatatgtactagtacgagtcccggntgtcatttcggtccaggggcctagcgctgtctgtaatcgattccgtgcgccagttctcatacgggctgcagacccaggccggcggacccaggcgctcgctgcttaccaagagggtagccgcaccccaggatggatcccccagagtccccgcatcagagacttctcctgggcctcccccaatggggcctccacctccttcaagtaaggctcccaggtccccacctgtggggagtggtcctgcctctggcgtggagcccacaagtttcccagtcgagtctgaggctcgactgatggaggatgtgctgagacctttggaacaggcattggaagactgccgtggccacacaaggaagcaggtatgtgatgacatcagccgacgcctggcactgctgcaggaacagtgggctggaggaaagttgtcaatacctgtaaagaagagaatggctctactggtgcaagagctttcaagccaccggtgggacgcagcagatgacatccaccgctccctcatggttgaccatgtgactgaggtcagtcagtggatggtaggagttaaaagattaattgcagaaaagaggagtctgttttcagaggaggcagccaatgaagagaaatctgcagccacagctgagaagaaccataccataccaggcttccagcaggcttcataatcctcggttccccagactcaccggacaccatctcctatgccttggagaccttctgtcacttggctcccttcttaccaccaccaagactgtcccactgggcctgacccacctatgagggaagaagtcccacctgggccagagggagttcatgtgttactcataacatgcatttcaataaaaacatctctgcggtggg

SEQ ID NO: 286479 - DNA, 1330 bp, Homo sapiens
gcccccgggtgtcgatcggccgagggtacgtgaagcgggcaacaaggaacgcggctggaacgacccgccgcagttctcatacgggctgcagacccaggccggcggacccaggcgctcgctgcttaccaagagggtagccgcaccccaggatggatcccccagagtccccgcatcagagacttctcctgggcctcccccaatggggcctccacctccttcaagtaaggctcccaggtccccacctgtggggagtggtcctgcctctggcgtggagcccacaagtttcccagtcgagtctgaggctcgactgatggaggatgtgctgagacctttggaacaggcattggaagactgccgtggccacacaaggaagcaggtatgtgatgacatcagccgacgcctggcactgctgcaggaacagtgggctggaggaaagttgtcaatacctgtaaagaagagaatggctctactggtgcaagagctttcaagccaccggtgggacgcagcagatgacatccaccgctccctcatggttgaccatgtgactgaggtcagtcagtggatggtaggagttaaaagattaattgcagaaaagaggagtctgttttcagaggaggcagccaatgaagagaaatctgcagccacagctgagaagaaccataccataccaggcttccagcaggcttcataatcctcggttccccagactcaccggacaccatctcctatgccttggagaccttctgtcacttggctcccttcttaccaccaccaagactgtcccactgggcctgacccacctatgagggaagaagtcccacctgggccagagggagttcatgtgttactcataacatgcatttcaataaaaacatctctgcggtgggccttgggtaggagagatgaacccttccggtgccaagctagtcccctctggtgtcctcgactgccctgctccctgtgtatctgcaaacctctgttctcccttctccattcatcaggaagggatctgctgggtaaagtcagactactgcctaccactttttcccaaagtagactgaaagcacatcctgtgctgggcggagcagctgtgtttggatggtttcatttcagcatgagaacagactcaaatagaacggggagacttttccctcaacaaaaggaaagacagtcctatttgcactgtatcacccttgagatactactgttacagagattagaaccacattgagtggggttttctgtgtaaatcgaaggagaaaaagaccagattactgagattggggattgtaactctgacttgccaaacaaactgctgcctcattttggg

SEQ ID NO: 286480 - DNA, 439 bp, Homo sapiens
gaggatcttggaaggcatcctggtggtgatgagctttcaagccaccggtgggacgcagcagatgacatccaccgctccctcatggttgaccatgtgactgaggtcagtcagtggatggtaggagttaaaagattaattgcagaaaagaggagtctgttttcagaggaggcagccaatgaagagaaatctgcagccacagctgagaagaaccataccataccaggcttccagcaggcttcataatcctcggttccccagactcaccggacaccatctcctatgccttggagaccttctgtcacttggctcccttcttaccaccaccaagactgtcccactgggcctgacccacctatgagggaagaagtcccacctgggccagagggagttcatgtgttactcataacatgcatttcaataaaaacatctctgcggtggg

SEQ ID NO: 286481 - DNA, 1317 bp, Homo sapiens
tggggcaggagcttctttgtttgaatttgctcctgagaggatgaggcctcctagagcactggctcctggacagcaacctcctttggtgccttgtgaccagggccctgatggttcattagatggagccttcgagtcttagggagttgccgcagggtccccacagcggctcccgacggttgtgaaccagcatccatcctccacggattccggcaacccgcctggccctggacgtgtctcaactggcccgcgtgaggggccgccccggaaatgacgcgctgccccgctggccaagcggaagtggagatggcggagctgtacgtgaagccgggtgagcgcagccggcgggctagggcactaggttgtcgccccggcctaggctgggggcggttgcggcgcttagtatggaccctctgtctcccccagccccagtataagctaacagtggagttccgggctcgcttcacacatccctcgcctccgcaggcaacaaggaacgcggctggaacgacccgccgcagttctcatacgggctgcagacccaggccggcggacccaggcgctcgctgcttaccaagagggtagccgcaccccaggatggatcccccagagtccccgcatcagagacttctcctgggcctcccccaatggggcctccacctccttcaagtaaggctcccaggtccccacctgtggggagtggtcctgcctctggcgtggagcccacaagtttcccagtcgagtctgaggctcgactgatggaggatgtgctgagacctttggaacaggcattggaagactgccgtggccacacaaggaagcaggtatgtgatgacatcagccgacgcctggcactgctgcaggaacagtgggctggaggaaagttgtcaatacctgtaaagaagagaatggctctactggtgcaagagctttcaagccaccggtgggacgcagcagatgacatccaccgctccctcatggttgaccatgtgactgaggaactaagttttaatggcaaacctacagcttacttaagatatccctccagagagagagcaaggcaattgtacctgacacagcattgacaccaaatgaccagattccactgtgtccaacgggagcgacaaaactggtccccgccggggcttgtgcaacagaccctccttgccgaattcgggccagtctctctgttccaattgggggaggtatctttcgatcttgactggcactgactccttttggttggcccaacgttggtggggcagaagtggctgaaagaggtgaagatgatcccgaagaaacagatggaataggagagtc

SEQ ID NO: 286482 - DNA, 956 bp, Homo sapiens
tggggcaggagcttctttgtttgaatttgctcctgagaggatgaggcctcctagagcactggctcctggacagcaacctcctttggtgccttgtgaccagggccctgatggttcattagatggagccttcgagtcttagggagttgccgcagggtccccacagcggctcccgacggttgtgaaccagcatccatcctccacggattccggcaacccgcctggccctggacgtgtctcaactggcccgcgtgaggggccgccccggaaatgacgcgctgccccgctggccaagcggaagtggagatggcggagctgtacgtgaagccgggcaacaaggaacgcggctggaacgacccgccgcagttctcatacgggctgcagacccaggccggcggacccaggcgctcgctgcttaccaagagggtagccgcaccccaggatggatcccccagagaagcaggtatgtgatgacatcagccgacgcctggcactgctgcaggaacagtgggctggaggaaagttgtcaatacctgtaaagaagagaatggctctactggtgcaagagctttcaagccaccggtgggacgcagcagatgacatccaccgctccctcatggttgaccatgtgactgaggaactaagttttaatggcaaacctacagcttacttaagatatccctccagagagagagcaaggcaattgtacctgacacagcattgacaccaaatgaccagattccactgtgtccaacgggagcgacaaaactggtccccgccggggcttgtgcaacagaccctccttgccgaattcgggccagtctctctgttccaattgggggaggtatctttcgatcttgactggcactgactccttttggttggcccaacgttggtggggcagaagtggctgaaagaggtgaagatgatcccgaagaaacagatggaataggagagtc

SEQ ID NO: 286483 - DNA, 314 bp, Homo sapiens
attacaggtgtgagccatcacacccggccacctggtttacttttctaatctttagtgcctagcatattgtctggcgtagagtggggacttcataaatgcatatttttgaatgaataagttgtctcagagagtagcccttcttagaaggggtgaatttagagttaagcttcttacccatttaagccatgttgcttgatcctgctgtaccttttcagtccccgcatcagagacttctcctgggcctcccccaatggggcctccacctccttcaagtaaggctcccaggtccccacctgtggggagtggtcctgcct

SEQ ID NO: 286484 - DNA, 3054 bp, Homo sapiens
gcttcatatcccactacagtagctttttggacagaagctggtggtgggttttttgttttgttttgtattttttagctgccatcattaaaactcactaccttttttttttcctctgcacaggctgctttgattatgcaggttctacaactgactgcagaccagattgccatgttgcctcctgagcaaaggcagagtatcctgattttaaaggaacaaatacagaaatccactggagcaccttgataggttttcaaaaatacctggcaagaaatctggaaattctataattttgttgaaatattgaaaaaagatgacctgcatcctaacccttgaatgactcaaatcagtgccaggtggaggactcccatcaccttctctcagaacaaaatcacttcattttattgtcttagtttgtatattttctgtgacttgaaataaactttgaacacaattttagtacactgcaaattgatacacatgacctttttgcttttaaaaagcttaacactaagggtgaaaccttagatgtgttttctacccttactgcagtattgtactttaacatattgccatagttttgtttttaagttaaccacttattcttcttgatgatatttgagaatttctcagaagcaatgttttctggaacttggtttttgtttagtttgcttccagtaagaattattataaggctttgccctctgaaaatattctagcacttcggagtcttctaggagaaaatatcacatgcttagagctataaaatggtcagaaggctaacagagcaaagagcctagcacagctgtgtgtttagtttagaaaaatccaaatatcaaaatgcatttgtttcaatagcaggtctgaacatgtataattcagagttaagacaaaaattgttttagcactggtttgagtgtgtcagcaacacaagagactgttgacatttacttgtgtgttcttaaacttatcagtctaggcagtcaactttgaaagtttaaaaagccactgatttttcacatgctcaagatgaaataaaaacagaaatcaaatgaacaaaatacatttcatcctatcttccaggcagtccctaacctgcagccctaccctgtaactacgtttattctgggaacttacaacacagaaaaccctaaaacttgtacattcttctcattttaagtggaccaaatgtagagcacagtcagattgctcattaggtctgctcctgcctgcttccttgcggataggtatgaacataattagtgccattagctctaatctatgggtcttattgcctagtatttctctctctcgccgcgccgccgcctcctcctctccccccaccccaaccccatctctctcgtagtggcattaaggaggaacatggtttctctctatcaggccaacctcaagaggttaagagttgccttaataatcagtaaagttctactggaactacttttgagccaatttatattcttggaattctatcccctgggttaggattatggtcaggtgaattaaaagcctggcataggcttagagaatgtaatagcatattgcttacatgtcaagcaaaagaatgcaaagataatcaactttttgagtgacaatgaaattgagggattttctactcatataaacatttataagaaatttgttgattaaggtatttcatattacaactttgcaagaaaaacttgctcaaagcaggtgaggagctttctgtgtatcctgctcatccccagttcaacttggatgttggctatgcataggatttattatattcattaccatgaatataatcacgaatttatgcctactcccataaatattcaagccttgggatattgattttggcagccatcatatcttgaagtgagtgtgtcaatatatttagacatggagaccaagagtgatgcctttctcattaggaactcgttgtaagtttcaagattccaaatcaaggtcattgaagatgaagttgtcatttggtcagtagttgtctaataagaatcatgtcttcaaggtttcattgtgcattttcccaaagccttattaaacctgaattagctgaaatccgggtgaacaaattggcaacagcagtggtatccctccctatgtaaacaaccatcagtattgttttactgttgtaataaatgaaacatgattagccaccatgagttcatgacctacctttattgtgctcagactagtgacaaaaaaaaaccaaaaacagttttatccctcaagccgtagaggttcctaaactattagaaacaaccatttgttcattcgtggtcacttaatggtagaaaaaatagataatataatgctaattcagtacaaccattcttctaatctataatgagttgaattgtctgggcacaatgaagtgtgaggtttctctcttaagagccctgggcttctctccttctagggattcactgtgacgactaacatcccagagccagtgtggtccttgtaggccgaggttgggtagatggcagaaataaaaagcattctgatagagaatgaaggcattttgcttatgttattagctgaatgattccttagcgatataggtaggagtccacaaaaatctatgaaaattataaattgttattttttaaactagacattaataaactcccttaatagtgataaagagctcctcttgactaaataagtcatcctaacatggagttcaagttttcacaatcgcttttaacagaataatacaagatgacagtatagctgacttgcaattataatacaatttcaattacaatgagcatactttctagattttctttcccaaatggagagcccaaaaagaagtaacaaaagactcattcatcaagtgaagaagaaaatcctttattttttgatgagcaaaaataataaattgctgttcacactggataagaccatatcaaaagtgacagtaaacatgtacactgttggtgttatatggggatggggttctcggtaattttgtttattatttatgtttattattatgttttatcattaattattcaataaatttttatt

SEQ ID NO: 286485 - DNA, 1983 bp, Homo sapiens
gcaccggaagccgactcaacagagctatggcgggtttgactgtgagagacccagcggtggatcgttctctacgttctgtgttcgtggggaacattccttatgaagctactgaagagcagttgaaggacatcttttctgaggttggacctgttgttagtttcagattggtatacgatagagagacaggaaagccaaagggttatggcttctgtgaataccaagaccaagagacagcacttagtgccatgcggaacctgaatgggcgcgaattcagtgggagagcacttcgagtggacaatgctgccagtgaaaagaacaaagaagagctgaagagccttggcactggtgcccctgtcattgagtcaccttatggagagaccatcagtcctgaggatgcccctgagtccattagcaaagcagttgccagccttccaccagagcagatgtttgagctgatgaaacaaatgaagctctgtgtccagaatagtccccaggaggcacggaacatgttacttcagaaccctcaactggcttatgctttgctgcaagcacaggtagtgatgagaattgtggatccggaaattgccctgaaaattctgcatcgccagacaaatatcccaacgctgattgcaggcaaccctcagccagtccatggtgctgggcctggctcaggatccaatgtgtcaatgaaccagcagaatcctcaggcccctcaggcccagtctttgggtggaatgcatgtcaatggcgcacctcctctgatgcaagcttctatgcagggtggagttccagcaccagggcaaatgccagctgctgtcacaggacctggccctggttccttagctcctggaggaggaatgcaggctcaggttggaatgccaggaagtggaccagtgtccatggaacgggggcaagtgccgatgcaagaccccagagcagctatgcagcggggatccttgcctgcgaatgtcccaacccctcgaggcttgttaggagatgctccgaatgatccacggggaggcactttactttctgtaactggagaggtagagcctagaggttacttgggaccacctcatcagggtccacccatgcaccatgtccctggccatgagagccgaggaccacccccacatgaactgaggggagggccattacccgagcccagacctctaatggcagaaccaagaggacccatgctagatcagaggggtccacccttggatggcagaggtggaagggatccccgaggaatagatgcacgagggatggaggcccgagccatggaggcaagagggttagatgccagaggattagaggcccgtgcaatggaggcccgtgcgatggaagctcgtgcaatggaggcccgagcgatggaggcccgtgcaatggaagtccgagggatggaggccagaggcatggataccagaggcccagtgcctggccccagaggacctatacctagtggaatgcagggtcccagtccaattaacatgggggcggttgtcccccagggatccagacaggtcccagtcatgcagggaacaggaatgcaaggagcaagtatacagggtggaagccagcctggcggctttagtcccgggcagaaccaagtcactccacaggatcatgagaaggctgctttgattatgcaggttctacaactgactgcagaccagattgccatgttgcctcctgagcaaaggcagagtatcctgattttaaaggaacaaatacagaaatccactggagcaccttgataggttttcaaaaatacctggcaagaaatctggaaattctataattttgttgaaatattgaaaaaagatgacctgcatcctaacccttgaatgactcaaatcagtgccaggtggaggactcccatcaccttctctcagaacaaaatcacttcattttattgtcttagtttgtatattttctgtgacttgaaataaactttgaacacaattttagtacactgca

SEQ ID NO: 286486 - DNA, 466 bp, Homo sapiens
gcttcatatcccactacagtagctttttggacagaagctggtggtgggttttttgttttgttttgtattttttagctgccatcattaaaactcactaccttttttttttcctctgcacaggctgctttgattatgcaggttctacaactgactgcagaccagattgccatgttgcctcctgagcaaaggcagagtatcctgattttaaaggaacaaatacagaaatccactggagcaccttgataggttttcaaaaatacctggcaagaaatctggaaattctataattttgttgaaatattgaaaaaagatgacctgcatcctaacccttgaatgactcaaatcagtgccaggtggaggactcccatcaccttctctcagaacaaaatcacttcattttattgtcttagtttgtatattttctgtgacttgaaataaactttgaacacaattttagtacactgca

SEQ ID NO: 286487 - DNA, 4571 bp, Homo sapiens
gcaccggaagccgactcaacagagctatggcgggtttgactgtgagagacccagcggtggatcgttctctacgttctgtgttcgtggggaacattccttatgaagctactgaagagcagttgaaggacatcttttctgaggttggacctgttgttagtttcagattggtatacgatagagagacaggaaagccaaagggttatggcttctgtgaataccaagaccaagagacagcacttagtgccatgcggaacctgaatgggcgcgaattcagtgggagagcacttcgagtggacaatgctgccagtgaaaagaacaaagaagagctgaagagccttggcactggtgcccctgtcattgagtcaccttatggagagaccatcagtcctgaggatgcccctgagtccattagcaaagcagttgccagccttccaccagagcagatgtttgagctgatgaaacaaatgaagctctgtgtccagaatagtccccaggaggcacggaacatgttacttcagaaccctcaactggcttatgctttgctgcaagcacaggtagtgatgagaattgtggatccggaaattgccctgaaaattctgcatcgccagacaaatatcccaacgctgattgcaggcaaccctcagccagtccatggtgctgggcctggctcaggatccaatgtgtcaatgaaccagcagaatcctcaggcccctcaggcccagtctttgggtggaatgcatgtcaatggcgcacctcctctgatgcaagcttctatgcagggtggagttccagcaccagggcaaatgccagctgctgtcacaggacctggccctggttccttagctcctggaggaggaatgcaggctcaggttggaatgccaggaagtggaccagtgtccatggaacgggggcaagtgccgatgcaagaccccagagcagctatgcagcggggatccttgcctgcgaatgtcccaacccctcgaggcttgttaggagatgctccgaatgatccacggggaggcactttactttctgtaactggagaggtagagcctagaggttacttgggaccacctcatcagggtccacccatgcaccatgtccctggccatgagagccgaggaccacccccacatgaactgaggggagggccattacccgagcccagacctctaatggcagaaccaagaggacccatgctagatcagaggggtccacccttggatggcagaggtggaagggatccccgaggaatagatgcacgagggatggaggcccgagccatggaggcaagagggttagatgccagaggattagaggcccgtgcaatggaggcccgtgcgatggaagctcgtgcaatggaggcccgagcgatggaggcccgtgcaatggaagtccgagggatggaggccagaggcatggataccagaggcccagtgcctggccccagaggacctatacctagtggaatgcagggtcccagtccaattaacatgggggcggttgtcccccagggatccagacaggtcccagtcatgcagggaacaggaatgcaaggagcaagtatacagggtggaagccagcctggcggctttagtcccgggcagaaccaagtcactccacaggatcatgagaaggctgctttgattatgcaggttctacaactgactgcagaccagattgccatgttgcctcctgagcaaaggcagagtatcctgattttaaaggaacaaatacagaaatccactggagcaccttgataggttttcaaaaatacctggcaagaaatctggaaattctataattttgttgaaatattgaaaaaagatgacctgcatcctaacccttgaatgactcaaatcagtgccaggtggaggactcccatcaccttctctcagaacaaaatcacttcattttattgtcttagtttgtatattttctgtgacttgaaataaactttgaacacaattttagtacactgcaaattgatacacatgacctttttgcttttaaaaagcttaacactaagggtgaaaccttagatgtgttttctacccttactgcagtattgtactttaacatattgccatagttttgtttttaagttaaccacttattcttcttgatgatatttgagaatttctcagaagcaatgttttctggaacttggtttttgtttagtttgcttccagtaagaattattataaggctttgccctctgaaaatattctagcacttcggagtcttctaggagaaaatatcacatgcttagagctataaaatggtcagaaggctaacagagcaaagagcctagcacagctgtgtgtttagtttagaaaaatccaaatatcaaaatgcatttgtttcaatagcaggtctgaacatgtataattcagagttaagacaaaaattgttttagcactggtttgagtgtgtcagcaacacaagagactgttgacatttacttgtgtgttcttaaacttatcagtctaggcagtcaactttgaaagtttaaaaagccactgatttttcacatgctcaagatgaaataaaaacagaaatcaaatgaacaaaatacatttcatcctatcttccaggcagtccctaacctgcagccctaccctgtaactacgtttattctgggaacttacaacacagaaaaccctaaaacttgtacattcttctcattttaagtggaccaaatgtagagcacagtcagattgctcattaggtctgctcctgcctgcttccttgcggataggtatgaacataattagtgccattagctctaatctatgggtcttattgcctagtatttctctctctcgccgcgccgccgcctcctcctctccccccaccccaaccccatctctctcgtagtggcattaaggaggaacatggtttctctctatcaggccaacctcaagaggttaagagttgccttaataatcagtaaagttctactggaactacttttgagccaatttatattcttggaattctatcccctgggttaggattatggtcaggtgaattaaaagcctggcataggcttagagaatgtaatagcatattgcttacatgtcaagcaaaagaatgcaaagataatcaactttttgagtgacaatgaaattgagggattttctactcatataaacatttataagaaatttgttgattaaggtatttcatattacaactttgcaagaaaaacttgctcaaagcaggtgaggagctttctgtgtatcctgctcatccccagttcaacttggatgttggctatgcataggatttattatattcattaccatgaatataatcacgaatttatgcctactcccataaatattcaagccttgggatattgattttggcagccatcatatcttgaagtgagtgtgtcaatatatttagacatggagaccaagagtgatgcctttctcattaggaactcgttgtaagtttcaagattccaaatcaaggtcattgaagatgaagttgtcatttggtcagtagttgtctaataagaatcatgtcttcaaggtttcattgtgcattttcccaaagccttattaaacctgaattagctgaaatccgggtgaacaaattggcaacagcagtggtatccctccctatgtaaacaaccatcagtattgttttactgttgtaataaatgaaacatgattagccaccatgagttcatgacctacctttattgtgctcagactagtgacaaaaaaaaaccaaaaacagttttatccctcaagccgtagaggttcctaaactattagaaacaaccatttgttcattcgtggtcacttaatggtagaaaaaatagataatataatgctaattcagtacaaccattcttctaatctataatgagttgaattgtctgggcacaatgaagtgtgaggtttctctcttaagagccctgggcttctctccttctagggattcactgtgacgactaacatcccagagccagtgtggtccttgtaggccgaggttgggtagatggcagaaataaaaagcattctgatagagaatgaaggcattttgcttatgttattagctgaatgattccttagcgatataggtaggagtccacaaaaatctatgaaaattataaattgttattttttaaactagacattaataaactcccttaatagtgataaagagctcctcttgactaaataagtcatcctaacatggagttcaagttttcacaatcgcttttaacagaataatacaagatgacagtatagctgacttgcaattataatacaatttcaattacaatgagcatactttctagattttctttcccaaatggagagcccaaaaagaagtaacaaaagactcattcatcaagtgaagaagaaaatcctttattttttgatgagcaaaaataataaattgctgttcacactggataagaccatatcaaaagtgacagtaaacatgtacactgttggtgttatatggggatggggttctcggtaattttgtttattatttatgtttattattatgttttatcattaattattcaataaatttttatt

SEQ ID NO: 286488 - DNA, 2650 bp, Homo sapiens
gcaccggaagccgactcaacagagctatggcgggtttgactgtgagagacccagcggtggatcgttctctacgttctgtgttcgtggggaacattccttatgaagctactgaagagcagttgaaggacatcttttctgaggttggacctgttgttagtttcagattggtatacgatagagagacaggaaagccaaagggttatggcttctgtgaataccaagaccaagagacagcacttagtgccatgcggaacctgaatgggcgcgaattcagtgggagagcacttcgagtggacaatgctgccagtgaaaagaacaaagaagagctgaagagccttggcactggtgcccctgtcattgagtcaccttatggagagaccatcagtcctgaggatgcccctgagtccattagcaaagcagttgccagccttccaccagagcagatgtttgagctgatgaaacaaatgaagctctgtgtccagaatagtccccaggaggcacggaacatgttacttcagaaccctcaactggcttatgctttgctgcaagcacaggtagtgatgagaattgtggatccggaaattgccctgaaaattctgcatcgccagacaaatatcccaacgctgattgcaggcaaccctcagccagtccatggtgctgggcctggctcaggatccaatgtgtcaatgaaccagcagaatcctcaggcccctcaggcccagtctttgggtggaatgcatgtcaatggcgcacctcctctgatgcaagcttctatgcagggtggagttccagcaccagggcaaatgccagctgctgtcacaggacctggccctggttccttagctcctggaggaggaatgcaggctcaggttggaatgccaggaagtggaccagtgtccatggaacgggggcaagtgccgatgcaagaccccagagcagctatgcagcggggatccttgcctgcgaatgtcccaacccctcgaggcttgttaggagatgctccgaatgatccacggggaggcactttactttctgtaactggagaggtagagcctagaggttacttgggaccacctcatcagggtccacccatgcaccatgtccctggccatgagagccgaggaccacccccacatgaactgaggggagggccattacccgagcccagacctctaatggcagaaccaagaggacccatgctagatcagaggggtccacccttggatggcagaggtggaagggatccccgaggaatagatgcacgagggatggaggcccgagccatggaggcaagagggttagatgccagaggattagaggcccgtgcaatggaggcccgtgcgatggaagctcgtgcaatggaggcccgagcgatggaggcccgtgcaatggaagtccgagggatggaggccagaggcatggataccagaggcccagtgcctggccccagaggacctatacctagtggaatgcagggtcccagtccaattaacatgggggcggttgtcccccagggatccagacaggtcccagtcatgcagggaacaggaatgcaaggagcaagtatacagggtggaagccagcctggcggctttagtcccgggcagaaccaagtcactccacaggatcatgagaaggctgctttgattatgcaggttctacaactgactgcagaccagattgccatgttgcctcctgagcaaaggcagagtatcctgattttaaaggaacaaatacagaaatccactggagcaccttgataggtgagcaaacttaatccccatctgagtaggactagctccttgtctattctgggtatatacttttaaccttaaccaacaagattgttctctcagcggccctcaatccactcagctagactcttctttacccttcagtaggtcagctcctgtagggatagagtaaggctatacaatgtttgttcagttgttgaattgcttataatctttcctaatgacaaaggtaatgtatgatcagtttaacaaaagtaatcatatacagaaatgtagaaggtgaaaggtaaaaagccctgtttcctcaatctcattccccagacaaaacctctaaatatagtttggtgtgtatccttctacaatcaattgtattattttattccaaactgtcctgtcaaaatggaaaaatacaaagcatttcaataaaatgtgtaaatattttgtttcttgtatttattttatagggaatattttgatgttgaactatagtagcacataatttaaggtagtaaatgtccgtcatcaccatcagtttctatatattttggagatcgctgtaccccgctacccttatttttcttgctcatcatttaggcagaaagaatccaggggccaagcacagtggctgagccctgtaatctcagctttggcaggctgaggtggaaggattacttgagaccaggagttcaagaccagcctaagcaacatagtgagaccccatctttacaaaaattttttaaaaaattagccaggcatggtgagatgcgcctatagttccagctacttgtgaggccgaggtgggaggactggttgagtccaggaggtcagggctgcagtaagccatgattatgccactgcactctagcctgggtcacagagtgagactctgtgtcaaa

SEQ ID NO: 286489 - DNA, 4605 bp, Homo sapiens
atctcatgaatcgctaccggagccgctgacggttcggacgtgcagttctccctgcttatcctgtagggcgtccaacctggtggactcatgagcaaagagatattcccattctgccgagtggggaacattccttatgaagctactgaagagcagttgaaggacatcttttctgaggttggacctgttgttagtttcagattggtatacgatagagagacaggaaagccaaagggttatggcttctgtgaataccaagaccaagagacagcacttagtgccatgcggaacctgaatgggcgcgaattcagtgggagagcacttcgagtggacaatgctgccagtgaaaagaacaaagaagagctgaagagccttggcactggtgcccctgtcattgagtcaccttatggagagaccatcagtcctgaggatgcccctgagtccattagcaaagcagttgccagccttccaccagagcagatgtttgagctgatgaaacaaatgaagctctgtgtccagaatagtccccaggaggcacggaacatgttacttcagaaccctcaactggcttatgctttgctgcaagcacaggtagtgatgagaattgtggatccggaaattgccctgaaaattctgcatcgccagacaaatatcccaacgctgattgcaggcaaccctcagccagtccatggtgctgggcctggctcaggatccaatgtgtcaatgaaccagcagaatcctcaggcccctcaggcccagtctttgggtggaatgcatgtcaatggcgcacctcctctgatgcaagcttctatgcagggtggagttccagcaccagggcaaatgccagctgctgtcacaggacctggccctggttccttagctcctggaggaggaatgcaggctcaggttggaatgccaggaagtggaccagtgtccatggaacgggggcaagtgccgatgcaagaccccagagcagctatgcagcggggatccttgcctgcgaatgtcccaacccctcgaggcttgttaggagatgctccgaatgatccacggggaggcactttactttctgtaactggagaggtagagcctagaggttacttgggaccacctcatcagggtccacccatgcaccatgtccctggccatgagagccgaggaccacccccacatgaactgaggggagggccattacccgagcccagacctctaatggcagaaccaagaggacccatgctagatcagaggggtccacccttggatggcagaggtggaagggatccccgaggaatagatgcacgagggatggaggcccgagccatggaggcaagagggttagatgccagaggattagaggcccgtgcaatggaggcccgtgcgatggaagctcgtgcaatggaggcccgagcgatggaggcccgtgcaatggaagtccgagggatggaggccagaggcatggataccagaggcccagtgcctggccccagaggacctatacctagtggaatgcagggtcccagtccaattaacatgggggcggttgtcccccagggatccagacaggtcccagtcatgcagggaacaggaatgcaaggagcaagtatacagggtggaagccagcctggcggctttagtcccgggcagaaccaagtcactccacaggatcatgagaaggctgctttgattatgcaggttctacaactgactgcagaccagattgccatgttgcctcctgagcaaaggcagagtatcctgattttaaaggaacaaatacagaaatccactggagcaccttgataggttttcaaaaatacctggcaagaaatctggaaattctataattttgttgaaatattgaaaaaagatgacctgcatcctaacccttgaatgactcaaatcagtgccaggtggaggactcccatcaccttctctcagaacaaaatcacttcattttattgtcttagtttgtatattttctgtgacttgaaataaactttgaacacaattttagtacactgcaaattgatacacatgacctttttgcttttaaaaagcttaacactaagggtgaaaccttagatgtgttttctacccttactgcagtattgtactttaacatattgccatagttttgtttttaagttaaccacttattcttcttgatgatatttgagaatttctcagaagcaatgttttctggaacttggtttttgtttagtttgcttccagtaagaattattataaggctttgccctctgaaaatattctagcacttcggagtcttctaggagaaaatatcacatgcttagagctataaaatggtcagaaggctaacagagcaaagagcctagcacagctgtgtgtttagtttagaaaaatccaaatatcaaaatgcatttgtttcaatagcaggtctgaacatgtataattcagagttaagacaaaaattgttttagcactggtttgagtgtgtcagcaacacaagagactgttgacatttacttgtgtgttcttaaacttatcagtctaggcagtcaactttgaaagtttaaaaagccactgatttttcacatgctcaagatgaaataaaaacagaaatcaaatgaacaaaatacatttcatcctatcttccaggcagtccctaacctgcagccctaccctgtaactacgtttattctgggaacttacaacacagaaaaccctaaaacttgtacattcttctcattttaagtggaccaaatgtagagcacagtcagattgctcattaggtctgctcctgcctgcttccttgcggataggtatgaacataattagtgccattagctctaatctatgggtcttattgcctagtatttctctctctcgccgcgccgccgcctcctcctctccccccaccccaaccccatctctctcgtagtggcattaaggaggaacatggtttctctctatcaggccaacctcaagaggttaagagttgccttaataatcagtaaagttctactggaactacttttgagccaatttatattcttggaattctatcccctgggttaggattatggtcaggtgaattaaaagcctggcataggcttagagaatgtaatagcatattgcttacatgtcaagcaaaagaatgcaaagataatcaactttttgagtgacaatgaaattgagggattttctactcatataaacatttataagaaatttgttgattaaggtatttcatattacaactttgcaagaaaaacttgctcaaagcaggtgaggagctttctgtgtatcctgctcatccccagttcaacttggatgttggctatgcataggatttattatattcattaccatgaatataatcacgaatttatgcctactcccataaatattcaagccttgggatattgattttggcagccatcatatcttgaagtgagtgtgtcaatatatttagacatggagaccaagagtgatgcctttctcattaggaactcgttgtaagtttcaagattccaaatcaaggtcattgaagatgaagttgtcatttggtcagtagttgtctaataagaatcatgtcttcaaggtttcattgtgcattttcccaaagccttattaaacctgaattagctgaaatccgggtgaacaaattggcaacagcagtggtatccctccctatgtaaacaaccatcagtattgttttactgttgtaataaatgaaacatgattagccaccatgagttcatgacctacctttattgtgctcagactagtgacaaaaaaaaaccaaaaacagttttatccctcaagccgtagaggttcctaaactattagaaacaaccatttgttcattcgtggtcacttaatggtagaaaaaatagataatataatgctaattcagtacaaccattcttctaatctataatgagttgaattgtctgggcacaatgaagtgtgaggtttctctcttaagagccctgggcttctctccttctagggattcactgtgacgactaacatcccagagccagtgtggtccttgtaggccgaggttgggtagatggcagaaataaaaagcattctgatagagaatgaaggcattttgcttatgttattagctgaatgattccttagcgatataggtaggagtccacaaaaatctatgaaaattataaattgttattttttaaactagacattaataaactcccttaatagtgataaagagctcctcttgactaaataagtcatcctaacatggagttcaagttttcacaatcgcttttaacagaataatacaagatgacagtatagctgacttgcaattataatacaatttcaattacaatgagcatactttctagattttctttcccaaatggagagcccaaaaagaagtaacaaaagactcattcatcaagtgaagaagaaaatcctttattttttgatgagcaaaaataataaattgctgttcacactggataagaccatatcaaaagtgacagtaaacatgtacactgttggtgttatatggggatggggttctcggtaattttgtttattatttatgtttattattatgttttatcattaattattcaataaatttttatt

SEQ ID NO: 286490 - DNA, 927 bp, Homo sapiens
gcaccggaagccgactcaacagagctatggcgggtttgactgtgagagacccagcggtggatcgttctctacgttctgtgttcgtggggaacattccttatgaagctactgaagagcagttgaaggacatcttttctgaggttggacctgttgttagtttcagattggtatacgatagagagacaggaaagccaaagggttatggcttctgtgaataccaagaccaagagacagcacttagtgccatgcggaacctgaatgggcgcgaattcagtgggagagcacttcgagtggacaatgctgccagtgaaaagaacaaagaagagctgaagagccttggcactggtgcccctgtcattgagtcaccttatggagagaccatcagtcctgaggatgcccctgagtccattagcaaagcagttgccagccttccaccagagcagatgtttgagctgatgaaacaaatgaaggtcccagtcatgcagggaacaggaatgcaaggagcaagtatacagggtggaagccagcctggcggctttagtcccgggcagaaccaagtcactccacaggatcatgagaaggctgctttgattatgcaggttctacaactgactgcagaccagattgccatgttgcctcctgagcaaaggcagagtatcctgattttaaaggaacaaatacagaaatccactggagcaccttgataggttttcaaaaatacctggcaagaaatctggaaattctataattttgttgaaatattgaaaaaagatgacctgcatcctaacccttgaatgactcaaatcagtgccaggtggaggactcccatcaccttctctcagaacaaaatcacttcattttattgtcttagtttgtatattttctgtgacttgaaataaactttgaacacaattttagtacactgca

SEQ ID NO: 286491 - DNA, 1990 bp, Homo sapiens
gcaccggaagccgactcaacagagctatggcgggtttgactgtgagagacccagcggtggatcgttctctacgttctgtgttcgtggggaacattccttatgaagctactgaagagcagttgaaggacatcttttctgaggttggacctgttgttagtttcagattggtatacgatagagagacaggaaagccaaagggttatggcttctgtgaataccaagaccaagagacagcacttagtgccatgcggaacctgaatgggcgcgaattcagtgggagagcacttcgagtggacaatgctgccagtgaaaagaacaaagaagagctgaagagccttggcactggtgcccctgtcattgagtcaccttatggagagaccatcagtcctgaggatgcccctgagtccattagcaaagcagttgccagccttccaccagagcagatgtttgagctgatgaaacaaatgaagctctgtgtccagaatagtccccaggaggcacggaacatgttacttcagaaccctcaactggcttatgctttgctgcaagcacaggtagtgatgagaattgtggatccggaaattgccctgccagtccatggtgctgggcctggctcaggatccaatgtgtcaatgaaccagcagaatcctcaggcccctcaggcccagtctttggcccgtgcgatggaagctcgtgcaatggaggcccgagcgatggaggcccgtgcaatggaagtccgagggatggaggccagaggcatggataccagaggcccagtgcctggccccagaggacctatacctagtggaatgcagggtcccagtccaattaacatgggggcggttgtcccccagggatccagacaggtcccagtcatgcagggaacaggaatgcaaggagcaagtatacagggtggaagccagcctggcggctttagtcccgggcagaaccaagtcactccacaggatcatgagaaggctgctttgattatgcaggttctacaactgactgcagaccagattgccatgttgcctcctgagcaaaggcagagtatcctgattttaaaggaacaaatacagaaatccactggagcaccttgataggtgagcaaacttaatccccatctgagtaggactagctccttgtctattctgggtatatacttttaaccttaaccaacaagattgttctctcagcggccctcaatccactcagctagactcttctttacccttcagtaggtcagctcctgtagggatagagtaaggctatacaatgtttgttcagttgttgaattgcttataatctttcctaatgacaaaggtaatgtatgatcagtttaacaaaagtaatcatatacagaaatgtagaaggtgaaaggtaaaaagccctgtttcctcaatctcattccccagacaaaacctctaaatatagtttggtgtgtatccttctacaatcaattgtattattttattccaaactgtcctgtcaaaatggaaaaatacaaagcatttcaataaaatgtgtaaatattttgtttcttgtatttattttatagggaatattttgatgttgaactatagtagcacataatttaaggtagtaaatgtccgtcatcaccatcagtttctatatattttggagatcgctgtaccccgctacccttatttttcttgctcatcatttaggcagaaagaatccaggggccaagcacagtggctgagccctgtaatctcagctttggcaggctgaggtggaaggattacttgagaccaggagttcaagaccagcctaagcaacatagtgagaccccatctttacaaaaattttttaaaaaattagccaggcatggtgagatgcgcctatagttccagctacttgtgaggccgaggtgggaggactggttgagtccaggaggtcagggctgcagtaagccatgattatgccactgcactctagcctgggtcacagagtgagactctgtgtcaaa

SEQ ID NO: 286492 - DNA, 483 bp, Homo sapiens
aggccccggggcaaatggagggcggcgtgcgctgtgcttatcggcccctaacggggccggagccgaggctcatggtgcagggagattcgcccgccgccgccagcagctctgtcttggcattgcgctgcctacagcctacccggccgtcaccgaacgcgggagcgccggggatctgggcggaggagccaggagaggcggggaggcacggggtgtgaagtgcggcctgtatagcaaccggcgcacggcgccttccgcgggttgtgacctttgaagagaaatgccgtagaagcatggacgtggcttttcaccaaggttattcactaatttaagtgttttttttaattttattttattttattttattttttgagacaggtactcactctgtctcccaggccggagtgcaattatctgtacaattgataatctataagatggtccaacctgcgtaacagagtgagattccgtctcaaaaaaaaaaaa

SEQ ID NO: 286493 - DNA, 449 bp, Homo sapiens
gtactccaaataccattatagctagtcaaacttcataaataaaactgaaagtcatagagagtcagagatggctactccttctggttctgaatgtatgtacctgtcaacaaaagaaagccatctccatgtttccagagtcatgatgaaatcacatttcaaagttgtttcaacaggtgccttatgtcaaatgcctcttcctataaaagaaactgctgagttgttctaaacagtgcatgaaaatagcaagtgggctgagtgagcaatcacagtgaggtcctgagcacggtgtaaaaaaccccagattcagattcagcttcctccagagagcggggttacctcccaccatgcttgagggacagccctcccataattagactctactcacagtctcagcctgaagtgtgactagcttaaactagtgactgtaggaattgagcccctgtagggag

SEQ ID NO: 286494 - DNA, 1149 bp, Homo sapiens
tagggtacagtatagatgaagtgccttcctatctaggtaatccaagcagtagaacttgtagaagagctcagattcctatgaaaagctcctacactagagctgataaatcagaaaattgggtcagtctaggaatattcaatatatatgtaaagtcttattttttgaaaagtattgatttttttaaagtttcattaatctgttgaatagatttcattaccttggagataactttactaatcttatgtctgtcagtcttaaaagcatttagtgaaatattctggtattcaaaagtaacccacaaagtatttttctcgtagggagtatttaaaaaagaggatgatattgatctgcttggtgaagagttcaggaaagtatatcaacaaaggagtgaaatttgtgaagagaaatgatatcatcaaaattgggtaaagcatagattttttgtatgttaccactagatgtcagcataacttttgttttacagttcagtggcattaggtatccattgtctgtttggattttgtaaatcatcactgaatttcataacttgtaaacaattatcagatacaaattaattttaatcaagctgttatttttgtactgataatttcaaaatccgatttctacaacactacagagcactgtttgcatccccatcctcaagacagtatatttaccttgactaatacagaactctaccccaaagtgaactgccttctgtctgtgtttacgaactttacttacttgatttagccagggaaataaatatttggaattttcttttaaagcatcttttttggtctactgtaagggaggagaattataaatgaaaagagtcaagaattttattatctgatgtgcttaattgtcacgctaagaacttaaaaaacaactcaaaaagagctaatagctaatctcctaaatctaaaaagggaattctttgaaattattttgctttcataatcaaatatattacttatgaagaataaaaataattcaaaccactacaataagtaaaatgggtatccatcacatactgtcatagagactaactgaagtagatcacttatgaatttccccattcaagtgctttcataaattcctcctcagtgaaagatagcatcttggcagcttcaatatgcatctgtt

SEQ ID NO: 286495 - DNA, 311 bp, Homo sapiens
tggaaaaacttattgaagagcgtcgccaacaattccttgcagacaaagtaagaaaaagttgtggggtttttttggtcattatcattaaacagcaatagctcatctatcatccactaaacatttactgagaagctttatatgccagacaatgttagtatgtttactaatatatatataaattttctgaccatttttgcttctagaaaatatttattgatgctttctatgtgctaaacactggttggtattgagaacataaaaggtaaataaaactaagtccatgtcacttatgaatttatggtcttggttaa

SEQ ID NO: 286496 - DNA, 338 bp, Homo sapiens
ccctaaaggcatccattaaatataatgaattatttctcctatggatctaaaataatacccgctgtattccctctttgagtaaattaaaaatacagttactcagttttctgtgaggttttcattctcttatggtcctaacatttaaatttgtttttgtttttttaaacagcattgagcttagagaattggagaagaaattaaaagcagcttacatgaataaagaaagggcagctcagattgctgaaaaggatgccattaaatatgaacaaatggtaatcatgtttctggtcattatgtttttagcttcatttagaaaataaaaattagacttgtttctt

SEQ ID NO: 286497 - DNA, 2392 bp, Homo sapiens
acttttggtcgagcggagggcgcgcagctccaccgttgccaagacgccgcgtaaacacccgagcgcgcgcagccaggtgcgctccttggggctgctggctgctgcgtttgcggcgggaggtggtggccgcggtcccacgagagggggtatttttcgtcagccaagatgggttccaaaaggagaaatttgagctgtagtgaaaggcatcagaaattagtagatgaaaactactgcaaaaaattacatgtccaagctctaaaaaacgtcaacagtcaaatcaggaatcaaatggtgcagaatgaaaatgataaccgtgttcagcgcaagcaatttctcagattattacaaaatgaacaatttgagttggatatggaagaggccattcaaaaggcagaagaaaacaagagattgaaagaactccagctcaaacaagaagaaaaactggctatggaattggcaaaactgaaacatgaaagtctaaaggacgaaaagatgaggcaacaagtaagagaaaacagcattgagcttagagaattggagaagaaattaaaagcagcttacatgaataaagaaagggcagctcagattgctgaaaaggatgccattaaatatgaacaaatgaaacgtgatgctgaaatagccaaaaccatgatggaagaacacaagagaataataaaggaagagaatgctgcagaagacaaacgaaacaaagcgaaagcacagtactatcttgacttagagaaacaacttgaagaacaagaaaaaaaaaagcaggaagcttatgagcagctgctaaaagagaaactcatgattgatgaaattgttaggaagatctatgaagaagatcagttggaaaaacaacaaaagttagaaaaaatgaatgcaatgcgaaggtatatagaagagtttcagaaagagcaggctctctggagaaaaaagaaacgtgaggagatggaagaagaaaacagaaaaatcatagagtttgctaacatgcagcagcaaagagaagaagatcggatggcaaaagttcaagaaaatgaggagaaaaggctacagcttcagaatgcgttgacacagaaattagaagaaatgctgcggcaacgtgaagatttggaacaagtgcgacaagaattataccaggaagaacaagctgaaatatataagagcaagctaaaagaagaagcagaaaagaaattgagaaagcaaaaagagatgaagcaagattttgaagaacaaatggccttgaaggaattagtgctacaggctgcaaaagaggaagaggagaactttagaaaaactatgctagctaaatttgctgaggatgatcgaatagaattaatgaatgctcagaaacaaagaatgaagcagctggaacacaggagggctgtggaaaaacttattgaagagcgtcgccaacaattccttgcagacaaacaacgtgaactagaagagtggcagttgcagcaaaggcggcaaggatttattaatgcaattattgaagaagaaaggctaaaacttcttaaagagcatgctacaaacttactaggctatctccctaaaggagtatttaaaaaagaggatgatattgatctgcttggtgaagagttcaggaaagtatatcaacaaaggagtgaaatttgtgaagagaaatgatatcatcaaaattgggtaaagcatagattttttgtatgttaccactagatgtcagcataacttttgttttacagttcagtggcattaggtatccattgtctgtttggattttgtaaatcatcactgaatttcataacttgtaaacaattatcagatacaaattaattttaatcaagctgttatttttgtactgataatttcaaaatccgatttctacaacactacagagcactgtttgcatccccatcctcaagacagtatatttaccttgactaatacagaactctaccccaaagtgaactgccttctgtctgtgtttacgaactttacttacttgatttagccagggaaataaatatttggaattttcttttaaagcatcttttttggtctactgtaagggaggagaattataaatgaaaagagtcaagaattttattatctgatgtgcttaattgtcacgctaagaacttaaaaaacaactcaaaaagagctaatagctaatctcctaaatctaaaaagggaattctttgaaattattttgctttcataatcaaatatattacttatgaagaataaaaataattcaaaccactacaataagtaaaatgggtatccatcacatactgtcatagagactaactgaagtagatcacttatgaatttccccattcaagtgctttcataaattcctcctcagtgaaagatagcatcttggcagcttcaatatgcatctgtt

SEQ ID NO: 286498 - DNA, 383 bp, Homo sapiens
gtcagttctcactatgtcccctcagctcccatctctgtatagcctggtgtttcctaggttatgattgtcgagtgaggattattataatattggaataaagagtaattgctacaaactaaggattaatgatattcatatataatcatatctaagatctatatctagtataactattcttattttatttattttattatactagaacagctcgtgccctcggtttcttgcctcggcacctgggtggcttgccacccacagccatcctagtgggtataaagtggtatttattcattatcagtagttacttacaaaaagaaaatcctgcgcagaccgaccctattcccccaaacacactctttgtttctccccagctgaaacagaac

SEQ ID NO: 286499 - DNA, 570 bp, Homo sapiens
agtcccaacaacataaagatgaaaagagaaggggagaaaaagttttaagggactattatagaaagtataaaatgtttgttagaatcaaatggtgagtaggagatctggaaaacagaaggattcagttgatgtgattaaaaaaagattttgttaaattgattattataaagggatgaacagtgagatgtgggtgttttgtagaaattattattttttaatatggagttaaagagctttctcccaaataccgagaaaagaaaaaaactacttactgattttaaaaactacttttatgatttaaaataatacatattaatcccactttttaaagacaacttaaattttgtgaaatttctttagcaaatttacccttttttcctttgggctacttctagcctaaccccataataacaaggtagctttaatccataaagttctaatatcaagaagtaaccagattttcctataaaacatccttttgcttctctctctccaaacttactctctatcactacccccaaggtctctttgttttagatatgcttgacatttaggacgggtacgtgtggg

SEQ ID NO: 286500 - DNA, 501 bp, Homo sapiens
tctcagaggaggttcaaattgtaatttgtcaactgcaaaatatataacagattttcagcaatgggcatgattttgtccataactggaaaataaaaattattcagaaattacaaaccaagggaattccatcgaaaccagaaaagcaacccctattttaaaagtattctgatatgttgaagtatgtagccttagtctgaaattttattattctacaaaacatacaagaacacgcagcacaaccctccaaaaccaccaatggaaaatgtaaaccaaacacatacaatttatttctgaagctgtccgttcagctctggcattcctgtttgtagatctaatggtatgacgaatgattgcatggggctgtgaatataagcataatatatatactttaacaaatttcaatgagaaagttaaaaggtcaaactttcttatcatttattgataaatatgaatatctactagtaaattataggataaacataaaacaaatacaatgaacgc

SEQ ID NO: 286501 - DNA, 542 bp, Homo sapiens
  misc_feature (502)..(502): n is a, c, g, or t
  misc_feature (534)..(534): n is a, c, g, or t
  misc_feature (538)..(538): n is a, c, g, or t
tctcagaggaggttcaaattgtaatttgtcaactgcaaaatatataacagattttcagcaatgggcatgattttgtccataactggaaaataaaaattattcagaaattacaaaccaagggaattccatcgaaaccagaaaagcaacccctattttaaaagtattctgatatgttgaagtatgtagccttagtctgaaattttattattctacaaaacatacaagaacacgcagcacaaccctccaaaaccaccaatggaaaatgtaaaccaaacacatacaatttatttctgaagctgtccgttcagctctggcattcctgtttgtagatctaatggtatgacgaatgattgcatggggctgtgaatataagcataatatatatactttaacaaatttcaatgagaaagttaaaaggtcaaactttcttatcatttattgataaatatgaatatctactagtaaattataggataaacataaaacaaatacaatgaacgcntggcctcgttggcctcagcggggagtctgcgncgtntcaa

SEQ ID NO: 286502 - DNA, 219 bp, Homo sapiens
  misc_feature (179)..(179): n is a, c, g, or t
  misc_feature (211)..(211): n is a, c, g, or t
  misc_feature (215)..(215): n is a, c, g, or t
atttcacagagaagactcttcggtattccaccatgggatggtaaagatctggctgccaggattcagtaagaaaaggaggattctggctttcttatccatcatgtaaatgtcccctgttttgaggatggttcccctgtcatctactgtatcccgtattcttaacatagccaaaataaacntggcctcgttggcctcagcggggagtctgcgncgtntcaa

SEQ ID NO: 286503 - DNA, 1094 bp, Homo sapiens
  misc_feature (28)..(28): n is a, c, g, or t
gcgggtggctgcggagccaggcgcggcncgagggatggtggacagcgtgtaccggacccgctccctgggggtggcggccgaagggctcccggaccagtacgcggacggggaggcggcgcgcgtgtggcagctgtatatcggagacacccgcagccgcaccgccgagtacaaggcatggctgcttgggctgctgcgccagcacggctgccagcgggtgctcgacgtagcctgtggcactggggtggactccattatgctggtggaagagggcttcagtgtgacgagtgtggatgccagtgacaagatgctgaagtatgcacttaaggagcgctggaaccggcggcacgagcccgccttcgacaagtgggtcatcgaagaagccaactggatgactctggacaaagatgtgccccagtcagcagagggtggctttgatgctgtcatctgccttggaaacagtttcgctcacttgccagactgcaaaggggaccagagtgagcaccggctggcgctgaaaaacattgcgagcatggtgcgggcagggggcctactggtcattgatcatcgcaactacgaccacatcctcagtacaggctgtgcacccccagggaagaacatctactataagagtgacttgaccaaggacgtcacaacatcagtgctgatagtgaacaacaaggcccacatggtgaccctggactatacggtgcaggtgccgggggctggccaggatggctctcctggcttgagtaagttccggctctcctactacccacactgtctggcatccttcacggagctgctccaagcagccttcggaggtaagtgccagcacagcgtcctgggcgacttcaagccttacaagccaggccaaacctacattccctgctacttcatccacgtgctcaagaggacagactgagtgtggcctcagctcccacaagcctctgcccaggcactgctaggctctgtctggaagatggggaccagcagccccacaccagggccagcctctagagcagactacagctggggtgcagggatgtgggttccacagacggaagggtaaacaatatagtctttttcagttcctg

SEQ ID NO: 286504 - DNA, 693 bp, Homo sapiens
  misc_feature (28)..(28): n is a, c, g, or t
  misc_feature (487)..(487): n is a, c, g, or t
  misc_feature (541)..(542): n is a, c, g, or t
  misc_feature (625)..(625): n is a, c, g, or t
gcgggtggctgcggagccaggcgcggcncgagggatggtggacagcgtgtaccggacccgctccctgggggtggcggccgaagggctcccggaccagtacgcggacggggaggcggcgcgcgtgtggcagctgtatatcggagacacccgcagccgcaccgccgagtacaaggcatggctgcttgggctgctgcgccagcacggctgccagcgggtgctcgacgtagcctgtggcactggggtggactccattatgctggtggaagagggcttcagtgtgacgagtgtggatgccagtgacaagatgctgaagtatgcacttaaggagcgctggaaccggcggcacgagcccgccttcgacaagtgggtcatcgaagaagccaactggatgactctggacaaagatgtgccccagtcagcagagggtggctttgatgctgtcatctgccttggaaacagtttcgctcacttgccagactgcaaaggngaccagagtgagcaccggctggcgctgcgacacatctcagtcaggctgtgaccnncaggagacattacttagagtgactgacaggacgacacatagtctgtaggacacaggccaatgtgactgacttcgtcagtccgngctgcagatgcttctgctgagaagtcgttctatacctgctgatctacgactgtcagagctcgagggcc

SEQ ID NO: 286505 - DNA, 1610 bp, Homo sapiens
  misc_feature (28)..(28): n is a, c, g, or t
gcgggtggctgcggagccaggcgcggcncgagggatggtggacagcgtgtaccggacccgctccctgggggtggcggccgaagggctcccggaccagtacgcggacggggaggcggcgcgcgtgtggcagctgtatatcggagacacccgcagccgcaccgccgagtacaaggcatggctgcttgggctgctgcgccagcacggctgccagcgggtgctcgacgtagcctgtggcactggggtggactccattatgctggtggaagagggcttcagtgtgacgagtgtggatgccagtgacaagatgctgaagtatgcacttaaggagcgctggaaccggcggcacgagcccgccttcgacaagtgggtcatcgaagaagccaactggatgactctggacaaagatgtgccccagtcagcagagggtggctttgatgctgtcatctgccttggaaacagtttcgctcacttgccagactgcaaaggggaccagagtgagcaccggctggcgctgaaaaacattgcgagcatggtgcgggcagggggcctactggtcattgatcatcgcaactacgaccacatcctcagtacaggctgtgcacccccagggaagaacatctactataagagtgacttgaccaaggacgtcacaacatcagtgctgatagtgaacaacaaggcccacatggtgaccctggactatacggtgcaggtgccgggggctggccaggatggctctcctggcttgagtaagttccggctctcctactacccacactgtctggcatccttcacggagctgctccaagcagccttcggaggtaagtgccagcacagcgtcctgggcgacttcaagccttacaagccaggccaaacctacattccctgctacttcatccacgtgctcaagaggacagactgagtgtggcctcagctcccacaagcctctgcccaggcactgctaggctctgtctggaagatggggaccagcagccccacaccagggccagcctctagagcagactacagctggggtgcagggatgtgggttccacagacggaagggtaaacaatatagtctttttcagttcctgaaaaaaaaagaaaaacaagaaaaaacaaaagcactcaaagaaaaaaaaaaaaaaaaaaaaggggggggggccctaaagaaaaaatctccccggggggggccccacaagttatgggggccagaccccggattttgtggtgtgaacaaaggggggccccatatagagggaggggttaatataacacaccagcggcacccgagaggcgcgcacggagtaacaaacacagcgccggagagggcgggaaaaaacgctggccacgcacgcgggcggaactgctggggaggcggaagaccaccatacaagccgcggaggggggggggaccacccaaaatgtgggcgaccccaagacatcaccacaaggaatataaggaccgcagggaggacccatacacaacattacaacgggctggtacacggtggaccacaacgcggaaaatattagcgccgcgcagagaacagtatggccaaaccaggcaccagtcattcagacaacttattacacgggcggggagcaaa

SEQ ID NO: 286506 - DNA, 1556 bp, Homo sapiens
  misc_feature (28)..(28): n is a, c, g, or t
gcgggtggctgcggagccaggcgcggcncgagggatggtggacagcgtgtaccggacccgctccctgggggtggcggccgaagggctcccggaccagtacgcggacggggaggcggcgcgcgtgtggcagctgtatatcggagacacccgcagccgcaccgccgagtacaaggcatggctgcttgggctgctgcgccagcacggctgccagcgggtgctcgacgtagcctgtggcactggggtggactccattatgctggtggaagagggcttcagtgtgacgagtgtggatgccagtgacaagatgctgaagtatgcacttaaggagcgctggaaccggcggcacgagcccgccttcgacaagtgggtcatcgaagaagccaactggatgactctggacaaagatgtgccccagtcagcagagggtggctttgatgctgtcatctgccttggaaacagtttcgctcacttgccagactgcaaaggggaccagagtgagcaccggctggcgctgaactacgaccacatcctcagtacaggctgtgcacccccagggaagaacatctactataagagtgacttgaccaaggacgtcacaacatcagtgctgatagtgaacaacaaggcccacatggtgaccctggactatacggtgcaggtgccgggggctggccaggatggctctcctggcttgagtaagttccggctctcctactacccacactgtctggcatccttcacggagctgctccaagcagccttcggaggtaagtgccagcacagcgtcctgggcgacttcaagccttacaagccaggccaaacctacattccctgctacttcatccacgtgctcaagaggacagactgagtgtggcctcagctcccacaagcctctgcccaggcactgctaggctctgtctggaagatggggaccagcagccccacaccagggccagcctctagagcagactacagctggggtgcagggatgtgggttccacagacggaagggtaaacaatatagtctttttcagttcctgaaaaaaaaagaaaaacaagaaaaaacaaaagcactcaaagaaaaaaaaaaaaaaaaaaaaggggggggggccctaaagaaaaaatctccccggggggggccccacaagttatgggggccagaccccggattttgtggtgtgaacaaaggggggccccatatagagggaggggttaatataacacaccagcggcacccgagaggcgcgcacggagtaacaaacacagcgccggagagggcgggaaaaaacgctggccacgcacgcgggcggaactgctggggaggcggaagaccaccatacaagccgcggaggggggggggaccacccaaaatgtgggcgaccccaagacatcaccacaaggaatataaggaccgcagggaggacccatacacaacattacaacgggctggtacacggtggaccacaacgcggaaaatattagcgccgcgcagagaacagtatggccaaaccaggcaccagtcattcagacaacttattacacgggcggggagcaaa

SEQ ID NO: 286507 - DNA, 397 bp, Homo sapiens
  misc_feature (137)..(137): n is a, c, g, or t
agactcgggcgcccggcccaaagcccggcaggggcgtgtccgcgcgctcacctgctattggccaggtggggctgtcggctgccagcagtgcttatgctttaagtgcggagcgggtggctgcggagccaggcgcggcncgagggatggtggacagcgtgtaccggacccgctccctgggggtggcggccgaagggctcccggaccagtacgcggacggggaggcggcgcgcgtgtggcagctgtatatcggagacacccgcagccgcaccgccgagtacaaggcatggctgcttgggctgctgcgccagcacggctgccagcgggtgctcgacgtagcctgtggcactgggtgagcccaggccggggccgggggcgttgcatgagatcggggtctgtc

SEQ ID NO: 286508 - DNA, 751 bp, Homo sapiens
ttcttactgatatcaagacatttttatttattaaacatgttgtcaaacagaaaacaaaaggtccaggtagctctttctttgggcccttggcaatgaatgttgccaccactgttctgggtgcagaggggaaatggaaggcaaggacagcagagccagcacttgaccaggggcccgctggttacggacgacggaaaattgactgatccaagtggacaggtaagccattttcacaagcaacaacaacgtttctgaaccccgctgtggctcggtactggcatggaggccagggggaccctccatgtagcttgcaagtggtgacctggaaagaagacttgcttattcttaggttttctctgtgagggtttccattcttgttttcacagatggccttgatgctgcgcttgttgccatgaataaatgtgttgatgtctttgcagggtgaggtcaggccccgtctcctcatgatgctttcacagtatctgtcatcccggccctgtggtttggcatcatagtgctgggtcaggaagtgtgtgtacctggagttatcctgagccagggtcggtggggtcagacccagacccagcacgaagaccaacaacaaaacgcccaggcccatcaccatctcttccaacacaggctcccaggaggaagaatcttacaaaaatctggcagtttcccttcaacgggagatgggttccagctgtttgttcctggagatgggttccagttgtgtgaacctggactcgtgccg

SEQ ID NO: 286509 - DNA, 698 bp, Homo sapiens
ttcttactgatatcaagacatttttatttattaaacatgttgtcaaacagaaaacaaaaggtccaggtagctctttctttgggcccttggcaatgaatgttgccaccactgttctgggtgcagaggggaaatggaaggcaaggacagcagagccagcacttgaccaggggcccgctggttacggacgacggaaaattgactgatccaagtggacaggtaagccattttcacaagcaacaacaacgtttctgaaccccgctgtggctcggtactggcatggaggccagggggaccctccatctgtgagggtttccattcttgttttcacagatggccttgatgctgcgcttgttgccatgaataaatgtgttgatgtctttgcagggtgaggtcaggccccgtctcctcatgatgctttcacagtatctgtcatcccggccctgtggtttggcatcatagtgctgggtcaggaagtgtgtgtacctggagttatcctgagccagggtcggtggggtcagacccagacccagcacgaagaccaacaacaaaacgcccaggcccatcaccatctcttccaacacaggctcccaggaggaagaatcttacaaaaatctggcagtttcccttcaacgggagatgggttccagctgtttgttcctggagatgggttccagttgtgtgaacctggactcgtgccg

SEQ ID NO: 286510 - DNA, 961 bp, Homo sapiens
tccggcagaacagctgacaccaccaactttaaagagcccaactgatgaactgatcagcatgagaatactgttttttcatctctctgtcccatgacttcactctgcattcttcaaccaattagtgatctcttatttccacctactccaaatccttaaaaacaacagcctcaaactctttgaggaaatggatttgaggtttccttccatcttttggttcagcagccctgcaattaaacctctttctctgctgcaacccagtgtcttggcatattgacatgctgtgcacatcaggcaaaagacctattaccattacatgaggacccctccggagggagataatggtgggggcatttctgggaggctctgctttagtcagggtgcacgtgttgccgcaggaatcgctggtacatgccatcctggccataggagggctggaccagccccagccccagcagggtcagcagcaaaagcagaagcaatgaatgggtcctctgcagagccatcagtatcttagaggtgcctagaaaagaaagcaaggggcaggagaaataagagagaagttgctgtggccagtacaatgacacagggcagggactgactgcgtggctgccaggtttgtgtggacagagtataaaaagagagaaaagggtgaggtcaggccccgtctcctcatgatgctttcacagtatctgtcatcccggccctgtggtttggcatcatagtgctgggtcaggaagtgtgtgtacctggagttatcctgagccagggtcggtggggtcagacccagacccagcacgaagaccaacaacaaaacgcccaggcccatcaccatctcttccaacacaggctcccaggaggaagaatcttacaaaaatctggcagtttcccttcaacgggagatgggttccagctgtttgttcctggagatgggttccagttgtgtgaacctggactcgtgccg

SEQ ID NO: 286511 - DNA, 391 bp, Homo sapiens
tgatggggtcttgttacattgcccaggctggagtacagtggctgttcataggcatgattatagtctcctagagccctgagctcctgggctcaagtgatcctcatgcctcagcctcctgagtagctgcgactatggccacaggttctgcgcctggctatagtgacgtttctgaaggatagtgcataatcataactcaatgaagacatatctgcaaggagctatgatgtaccatggtctggttacttgaagttttgtataaagcataatctaatgccatgattgattgatagtgtttggagagattctgtggatgttttttaaaaatacaaggttccacttgcagtttaattttcccatagataacagttataaacttgggacaaaatctgaa

SEQ ID NO: 286512 - DNA, 283 bp, Homo sapiens
attgtgtggatgttaatgtatttcttgaactgttaaagtttaattgtaaggagtccaatctgttgagtgaaaatatgacagattgataatggcatcaatgatagatcttgtagttataatcctacttttatgtgtttgttcatgcctgttgatccatctgaaaggttttgttgagctacttcattcccgctcctcctgtgttgaagccaagttgtacttcagttgaactctgtacagaatgattttaggctgaccaataattttttctgttccctaggactca

SEQ ID NO: 286513 - DNA, 504 bp, Homo sapiens
tcccggattcaggcaattcttgtgtctcagcctcctaagaagctgagattacagcaactccaaaatggaagtactattgttatctccgtttacaaattaggaaactgaggcacagatatgctcttgggtacttgtcagcagcagttgttctacaaatgagcgtcttagcctctggattactgcccaatgaggaaagctatgaaatgcatggataacttgctaatcagtatttgccatatgtgctagcagcatcagcatcagttgggagattatggtggcctccatgtcagacctcctaaatcggaatatcagagaaggtggcccaggttaccatgcttcatctgccaatgcattgaaaacttggaatgtaaattaattcaaccattgtggaagatggtgtagtgattcctcaaagacctagaagcagaaatatcatttgatccagaaatcccattactgtgtatacacccaaaggaatataaaccattctattacaaagataaa

SEQ ID NO: 286514 - DNA, 533 bp, Homo sapiens
tcccggattcaggcaattcttgtgtctcagcctcctaagaagctgagattacagcaactccaaaatggaagtactattgttatctccgtttacaaattaggaaactgaggcacagatatgctcttgggtacttgtcagcagcagttgttctacaagctaaatatctggatatcttaaatctcagatgagcgtcttagcctctggattactgcccaatgaggaaagctatgaaatgcatggataacttgctaatcagtatttgccatatgtgctagcagcatcagcatcagttgggagattatggtggcctccatgtcagacctcctaaatcggaatatcagagaaggtggcccaggttaccatgcttcatctgccaatgcattgaaaacttggaatgtaaattaattcaaccattgtggaagatggtgtagtgattcctcaaagacctagaagcagaaatatcatttgatccagaaatcccattactgtgtatacacccaaaggaatataaaccattctattacaaagataaa

SEQ ID NO: 286515 - DNA, 301 bp, Homo sapiens
ctttaaacttgctcgcagttctggaaaacaatcaactccggtttccacagccagttagaggagtaagctgaacaccgctgaaccaggagtcaacggtctttacttgcccttggtatttccccagtgactcagaatgttgtgggatgtcagtattccaggaaaagcaaaaagtgaggggttgagaggatgttttgagaataaataagtttggagaatggtgactctctgttcctatcttggtgactcataatgcacatgaacttggtagaattttgagaaataacagagtagaaagatagca

SEQ ID NO: 286516 - DNA, 372 bp, Homo sapiens
aactcgggtttggttcgtcctccaaacacgtgaacacgtgttgagcactgactgtgaattcggcagctgtgatgggggctgaactcagggccaaggagccaggctccactccactgtgacaccaggtgtggggctcgggctggagtgcagcagtgtgatcatggctcactgtggcctctacctcctgggaccaagcaatcctcctgtatcagcctctggagtagctgggattacaggcatgcaccaccacacctggctaattatttagttttggtagagatggggtctcactatgttgcccagacttccctctgtcaatgacagacataattcaatcattcattcattcaataaatatttattgagcaccta

SEQ ID NO: 286517 - DNA, 608 bp, Homo sapiens
  misc_feature (96)..(96): n is a, c, g, or t
  misc_feature (101)..(101): n is a, c, g, or t
  misc_feature (107)..(107): n is a, c, g, or t
ggagagcggcgcccagcatgacggcgatggcggcgcgcgggctgaggacagagagaagccggtgctggagtgcaatgactcgacctcggttcaccnacaancccccnacctcctgggttcaagtaattctcctgcctcagcctcccaagtagctgggattacaggcatctgccaccatgaccagctaattttgtatttgtagcagacacggtgtttctctatgttggccaggctcgtctcaaactcctgacctcaggtgatccgcccaccttggcctcccaaagtgctgggattacaggcgtgagccaccgcgccctgcctgctttttattttttaagagactgggtctggctattttgcccaggctggtgttgaactcctggactcaagtgatcctcctgcctcagcctccccagtagctgggactacaggttgcgacaccaacccaggctgtggcagttatttaacagtgtttctctccagaaacatgttcaaaccattactgaaggtgaaaagcaaaagaaggggatttaattttgtgtctctcttaccactgtaaatgtggctacataacatctcagagaataaacaatcttgatgaaccatca

SEQ ID NO: 286518 - DNA, 880 bp, Homo sapiens
gattcaggaaacatctggcaaagatgatataagtgcctgttaagcagaaatgtaaagtcaggagagaatgactttagataagaaacacagaaaagccctgcaagccactttcctatgcagtcacctgttgactgagcaagtaagaactggatgaatccgctttttctaacagcattcttaagagtctacactcacttctgccatttcctaaaaactcagccataacattatggactggaggtggtgggagaaacagctcgatttgtggtacagacgttgttgggggcaccactctgtgtggcagctgcagctgacagctccaaggcactttccatattaactcatttattcctcacgacaggtacttctttgatagtgcctccatgcatgcagaagatgacgtggagagctccgcgcggcacagggcaggaagctggtgtgcactctcatggatccgaagccaacacacgcctctcaactgaggactctgcccctctggcattcttccagccaccagccctgggggccaggagccactgagtgggtcacacagccttagagggcaacgagggcaggagctcgccctggcggtccccatgcagacaagaggtacacactccctggcatgcagagccacccaactgggtttcactgaagggtgaggggcggggtgtctaccgtgctttccaaataccgctcagtcacccagagcttgaaacttacaatgagccaccccatcccagccacaaatctaaaggggttcacttgtttcaaaatcaacttgtttgtggttaaaagtcagtcccagctctacagtggctggagcggcacgtgtgagaagccggcttgcgctgtgaggctcacaagccctgggtgacca

SEQ ID NO: 286519 - DNA, 397 bp, Homo sapiens
ttctcgccggtcctgcgggtcgctgctcggctgtgggttagcagcaccctgagcggagcggaagagctgcccgccgccgcgtaaccccgaggccgagactcctggcctggcctccttgggcccacgacgcctgccccgcggagcggacccatgggcctgaggtttgtgtgcggggcctcaggcgagcggtgtgtcctggaaccctggctgcacccacagatacagccactcctgggcccatgtggatgtaaccttcgagtgccggaatgcctcgtctccatggagaccaaactcaagggcctgactggcccagtctaccgagaccatgagacctgctgtgcccctcggccaggccaacccaaattcttttaaataaaaggcacaagccacagccaca

SEQ ID NO: 286520 - DNA, 4491 bp, Homo sapiens
  misc_feature (1999)..(1999): n is a, c, g, or t
  misc_feature (4466)..(4466): n is a, c, g, or t
ttctcgccggtcctgcgggtcgctgctcggctgtgggttagcagcaccctgagcggagcggaagagctgcccgccgccgcgtaaccccgaggccgagactcctggcctggcctccttgggcccacgacgcctgccccgcggagcggacccatgggcctgaggtttgtgtgcggggcctcaggcgagcgctggcgcagcctgtcccccatcgtctgcgccctgcgggcctggccctccccgtggaaggaccgcgggcttcggggccccacgctggggggctgactcctgccacacacacagcggtggccgcgggcctggggcggcagcacagccattctgctcgggctgcgtgagctgaccccgctctctgtgcacctacttttgctgcgtttggtgctgagcctgaagtcccaggacaggcggctgagggggaaagatggtgtgaattgggtgggcagagacaactgaaagccacaggacccggttggcacctttttggccgcctgcgcctttgcctgcagccccgctccctgggtcacccgaaggaggagctggcgctctttccgggcgcagaagcacccgacccacgctggaggaaacggtccctctgggcaggagaagctttgggcctggctggagcacactcacggaaccacgccaacgcctggcctgtagccagctcccacctcccctcccaccttctaaaatgcttgcggatctcacgtggccgaccctaaccagatacacatggggaaaggaatcaggtggcacacataccgcctttactccatagagaacttccaattgtgggtaagaacaaagccccacctctgcctaatagatgcagttttccacctgcagccaaaaagacaacctgttattagcttttttcccagaggacaggcatctctatgaaactgccattgcaaaatttgccgacagtgagataaccagctccattttgcttctaacctccatgccctccttgtttactgctgcacgcaggttgaactgtgggaggaacttagtttaaaacaaagatgataacagccctttcccaaaggaaacctttcctggggattagcctgcttttgtgggaccaacagattagccacaagattagaaactacggttgaagagtcacgcagcgggaggctacaggattctgaccctccccaaactgctcctggcgataacatcaccatcgtaaagcctaagatcagcacttggtgggtcacctggcaccacccaggctcatctgatgttgtggcacccaggaactgactcagtgcgaaaacagcttcgactccctgtgatttcatctctgacctgaccaatgggtacttctgactcactggctgccccccacccaccagcttatctttaaaaactccaaaccccagatgctcagggagaccgagtaataataaaactccagtctcccacacagctagctctgcgtgaattaccttttctctgttgcaaatgccctttcttgataaattggctgtctaggtaacagggaaggtgaacccactgggcagttacacttttatccacccttccagctggatcacgcgccctcttcaatgacatgacacgcagctagagtgtatgagcttgctgccggcaccttccgtcctggatcgcatagcaaggcctcaatggacagccaggtgcctggtccggtcccacttttttttctgtcctgttctcgtttcctctttgcttggccaaagagggttgggccagggtcctgagtgcaagggcttggcttggtgaattaaagtggcagtagccgtgtggcagagaaaatttgtagatgggtgaaatcctgggcctacacagtgacaaagtgtatatagacagccagcctagttggtggatgtgacaaccccagactcttctagatttgtggatccgtgcacctgccagacctgtctctgagccatctggggaggctgggtaagatttcccccgtcagggcctgagcctcatntccaagctgctggcttcagcccagctgccaccagcgctgtctctgtcttgcgctttccagagagagactgactcattttgagctccaggcctaccaggcagcccaaccgcggcagtaactgcctctcacactgaggatggctcatgctctggtccagccatggcttgaacacctcccaacaagaacaaagccagactcattctccctagcatcttcttccttgctcaaagatcccacaccccgttagaagctggaactgggtccttgtcaccttcctcacctccccagtcgtagtctggttaatccttacatctcaccacggtcaccgtggctagatgtgacctccgcgatgcttcaggcacgtactagggcagcctgggcagggctggtcactgtgatctcatgaggtgtgaacttgaccccggccttctttcctgggatgccggctaaggacacaagttcagtgtttgccctggcttgtagcccagcgggggctccgtcatcccctggggaatgcctcggcctgcaagaccgcataccgcattggaacagggaaaccacctacttcagcacctccctcagcaaggtggcaggtcccaacaagccttgcaccacgaggaagtggcagtggcattcgggatatggctccctggccagcttgtgaagttcaaggggctcgttacttcttacagctcacagtccctcccgggtccagcacacctgagggctgacctccctcttgattagtgcaggggaaaagcactttaaaaagctgtgtcatgcgtaacttgcacatcttctgattctgacctgaaactgcatcccaggtcggcacagacgcaacccagtctcctcccacctccgagagtgcagtgtcctgaatggagaaccccagcacccagaagcatccactgaaggacgtaagtaggacaaggccaactgtggctgttccagcagagggactgtgggtgatgtttcccttctctgatttctaaaatatctgcaaacttgtttcatttataattgaaaatataatttgcataacaacagtaaattctacacatgaaggcaaacgtccgtggttgacagaaattacactggccagaatccccagtccccatgaggcttgtccagacgcagtgaaccagtcgcagctgataacacacagaccattcccgatcccagaggtgcatttcaggattcattctatttcatcagagacggggtcttcctgtgttgcccaggctggtctcgaactcctgggctgaagcaatcttcctgccttggcctcccagagggttggaattgcagatgtgaggtacttctttgatagtgcctccatgcatgcagaagatgacgtggagagctccgcgcggcacagggcaggaagctggtgtgcactctcatggatccgaagccaacacacgcctctcaactgaggactctgcccctctggcattcttccagccaccagccctgggggccaggagccactgagtgggtcacacagccttagagggcaacgagggcaggagctcgccctggcggtccccatgcagacaagagggtcactggcttccttgctttgctcttcctggacatcttcctcgacattcatctttccatcctaccaagagcgtggaaaccacagggcatgaggacaggcggagacaacgctggaccatctcacagccacatcaagaggctgcccacatcagggctttctacgtggttgcaaggaacacaaacctgtgtgctccatttgcccactggcactaggcctcctgcccaccacccgcttctaggctattcgagccgcaggagctacaggctgctagagaaccctgcggcaggatgctgggcgcggttcagcttttgccagggagcagcatgggactgggatttggaaggtgtacagtggctgcgggctttagcaggaggagtgtctacagcaccttctgctcctccaggtaacctagtgtttttatcagtatccattttcctgtgtggatctcttctgcttgaaacctgtcctgcctatttttcttccctggaccctgactgatacactcttaaaacgagaaaagggtaccgatttataaagttcgtgaattaaaaactacaccagtcatggaaactcaatgacatcactcaaagaaaattcacaactctagccttgagttagctccctcaatagtatgatgaggtcatgcagatagaatcatacagttattaacaaaagtagttgatgttaaccgagtaatcagttttatctgtgttcctttgagacagagagagagagtgagaaagagagcgtgagcaagtgagtgcacatactattgttaaagtcttctctctaaagttttaatatctgatataccataaacacccagataaagaactttagagaaactggttaaaaagatttaaaattcccaactgtaataaatccctaaaatgaataccnaaaaaatgtttttaaattaaaaaaa

SEQ ID NO: 286521 - DNA, 3816 bp, Homo sapiens
ttctcgccggtcctgcgggtcgctgctcggctgtgggttagcagcaccctgagcggagcggaagagctgcccgccgccgcgtaaccccgaggccgagactcctggcctggcctccttgggcccacgacgcctgccccgcggagcggacccatgggcctgaggtttgtgtgcggggcctcaggcgagcgctggcgcagcctgtcccccatcgtctgcgccctgcgggcctggccctccccgtggaaggaccgcgggcttcggggccccacgctggggggctgactcctgccacacacacagcggtggccgcgggcctggggcggcagcacagccattctgctcgggctgcgtgagctgaccccgctctctgtgcacctacttttgctgcgtttggtgctgagcctgaagtcccaggacaggcggctgagggggaaagatggtgtgaattgggtgggcagagacaactgaaagccacaggacccggttggcacctttttggccgcctgcgcctttgcctgcagccccgctccctgggtcacccgaaggaggagctggcgctctttccgggcgcagaagcacccgacccacgctggaggaaacggtccctctgggcaggagaagctttgggcctggctggagcacactcacggaaccacgccaacgcctggcctgtagccagctcccacctcccctcccaccttctaaaatgcttgcggatctcacgtggccgaccctaaccagatacacatggggaaaggaatcaggtggcacacataccgcctttactccatagagaacttccaattgtgggtaagaacaaagccccacctctgcctaatagatgcagttttccacctgcagccaaaaagacaacctgttattagcttttttcccagaggacaggcatctctatgaaactgccattgcaaaatttgccgacagtgagataaccagctccattttgcttctaacctccatgccctccttgtttactgctgcacgcaggttgaactgtgggaggaacttagtttaaaacaaagatgataacagccctttcccaaaggaaacctttcctggggattagcctgcttttgtgggaccaacagattagccacaagattagaaactacggttgaagagtcacgcagcgggaggctacaggattctgaccctccccaaactgctcctggcgataacatcaccatcgtaaagcctaagatcagcacttggtgggtcacctggcaccacccaggctcatctgatgttgtggcacccaggaactgactcagtgcgaaaacagcttcgactccctgtgatttcatctctgacctgaccaatgggtacttctgactcactggctgccccccacccaccagcttatctttaaaaactccaaaccccagatgctcagggagaccgagtaataataaaactccagtctcccacacagctagctctgcgtgaattaccttttctctgttgcaaatgccctttcttgataaattggctgtctaggtaacagggaaggtgaacccactgggcagttacacttttatccacccttccagctggatcacgcgccctcttcaatgacatgacacgcagctagagtgtatgagcttgctgccggcaccttccgtcctggatcgcatagcaaggcctcaatggacagccaggtgcctggtccggtcccacttttttttctgtcctgttctcgtttcctctttgcttggccaaagagggttgggccagggtcctgagtgcaagggcttggcttggtgaattaaagtggcagtagccgtgtggcagagaaaatttgtagatgggtgaaatcctgggcctacacagtgacaaagtgtatatagacagccagcctagttggtggatgtgacaaccccagactcttctagatttgtggatccgtgcacctgccagacctgtctctgagccatctggggaggctgggtcggcacagacgcaacccagtctcctcccacctccgagagtgcagtgtcctgaatggagaaccccagcacccagaagcatccactgaaggacgtgtgtcctggaaccctggctgcacccacagatacagccactcctgggcccatgtggatgtaaccttcgagtgccggaatgcctcgtctccatggagaccaaactcaagggcctgactggcccagtctaccgagaccatgagacctgctgtgcccctcggccaggccaacccaaattcttttaaataaaaggcacaagccacagccacaccagcaggaagtggatacaggataaggggcagggctcacatctcatcctcatcagcctttgaccaggcgacggagtctgtgatagctagcttatctgctctatgctccagggacctggccggaacgagccgagttgctgtcctcatggaactctcatcctagtggggcagagacaaggacggtgtaacgtgcccgggggtcagcaccacagacaaaacgcagggagcacggcacagtgtgggccagggaaggcctggcttcccaagggtgtgggcgcgagcagcatggctgtggggagttccaggtgcagagaactactccagagacgaagccaggcctgcgaggaggccggagcgcatgaggggaaggcacgaggcaaggctgccagggctgtgctggtggtgcgggacggtcctgtgggggtagctgcggagatggcactgatgccttcggctccagcagcatcctgggctggtgcgggccaataaggggcagggttggggcaggatgaaaggcacaagccacagccatgtcaagcaggaagtggatgcagggtacagcctgtcagggtcagggtgaaaggcagggaggcgggtaggccataggtgaatttggagcagcctgtagaggacaggatgtgccatcaaagacttgttcttgggtccagctgagactgtcccttggggcttcctgtcaccttgtgcaggatagtgagaccatccttggaaaacccatcgggactgcagagcgcggctcagagctgactgtccaggcctggcaggggctgacccctgggcgctggtgcaccctccgtgcggcctcttggaggaagcacacaaggcgacagttcccagctgccgcctgagatgcagcatctgctttactccagcccagcactgctcaccgtcactgcccactcttatgattttacttcccttcatatttgtgattttgcaaagatggtgttgacttacagctgcagcatcaaatgactgactgccaccagcttggccccagctcagggacatgtctgagcccaggcagagcaccctagtggccgggaagcctcacctggagctcctgcgggtggctgcagtccgccaggtgatccgtgaggagggcttggagaggccccatgatggcgtggaaggatggcagggacccgtacatgagcacgcagcgcttcagcagggccaggcccacagccaggcaggacagtctgtgagggcaggaggcaagaggaggtccaacttgttctgtttgtcactgacaaaaccaataacgtggcaaaaatgaacttccccacttccactaggctgaaaactccagtgtggccaccttggccggccagggttgggcccatgcaaccacgggcaaggcaggctcagggtcaggcctaacgcaggaggggaggctgtgggaaccgcagcgccagctgggatggggcggctccatttttggttccaaattatgatttgtgaaatcaagcaaatgtattttgaaaatgaaaagaaaaagggacagcaagccaacatgcctcagaaaggct

SEQ ID NO: 286522 - DNA, 3955 bp, Homo sapiens
  misc_feature (1999)..(1999): n is a, c, g, or t
ttctcgccggtcctgcgggtcgctgctcggctgtgggttagcagcaccctgagcggagcggaagagctgcccgccgccgcgtaaccccgaggccgagactcctggcctggcctccttgggcccacgacgcctgccccgcggagcggacccatgggcctgaggtttgtgtgcggggcctcaggcgagcgctggcgcagcctgtcccccatcgtctgcgccctgcgggcctggccctccccgtggaaggaccgcgggcttcggggccccacgctggggggctgactcctgccacacacacagcggtggccgcgggcctggggcggcagcacagccattctgctcgggctgcgtgagctgaccccgctctctgtgcacctacttttgctgcgtttggtgctgagcctgaagtcccaggacaggcggctgagggggaaagatggtgtgaattgggtgggcagagacaactgaaagccacaggacccggttggcacctttttggccgcctgcgcctttgcctgcagccccgctccctgggtcacccgaaggaggagctggcgctctttccgggcgcagaagcacccgacccacgctggaggaaacggtccctctgggcaggagaagctttgggcctggctggagcacactcacggaaccacgccaacgcctggcctgtagccagctcccacctcccctcccaccttctaaaatgcttgcggatctcacgtggccgaccctaaccagatacacatggggaaaggaatcaggtggcacacataccgcctttactccatagagaacttccaattgtgggtaagaacaaagccccacctctgcctaatagatgcagttttccacctgcagccaaaaagacaacctgttattagcttttttcccagaggacaggcatctctatgaaactgccattgcaaaatttgccgacagtgagataaccagctccattttgcttctaacctccatgccctccttgtttactgctgcacgcaggttgaactgtgggaggaacttagtttaaaacaaagatgataacagccctttcccaaaggaaacctttcctggggattagcctgcttttgtgggaccaacagattagccacaagattagaaactacggttgaagagtcacgcagcgggaggctacaggattctgaccctccccaaactgctcctggcgataacatcaccatcgtaaagcctaagatcagcacttggtgggtcacctggcaccacccaggctcatctgatgttgtggcacccaggaactgactcagtgcgaaaacagcttcgactccctgtgatttcatctctgacctgaccaatgggtacttctgactcactggctgccccccacccaccagcttatctttaaaaactccaaaccccagatgctcagggagaccgagtaataataaaactccagtctcccacacagctagctctgcgtgaattaccttttctctgttgcaaatgccctttcttgataaattggctgtctaggtaacagggaaggtgaacccactgggcagttacacttttatccacccttccagctggatcacgcgccctcttcaatgacatgacacgcagctagagtgtatgagcttgctgccggcaccttccgtcctggatcgcatagcaaggcctcaatggacagccaggtgcctggtccggtcccacttttttttctgtcctgttctcgtttcctctttgcttggccaaagagggttgggccagggtcctgagtgcaagggcttggcttggtgaattaaagtggcagtagccgtgtggcagagaaaatttgtagatgggtgaaatcctgggcctacacagtgacaaagtgtatatagacagccagcctagttggtggatgtgacaaccccagactcttctagatttgtggatccgtgcacctgccagacctgtctctgagccatctggggaggctgggtaagatttcccccgtcagggcctgagcctcatntccaagctgctggcttcagcccagctgccaccagcgctgtctctgtcttgcgctttccagagagagactgactcattttgagctccaggcctaccaggcagcccaaccgcggcagtaactgcctctcacactgaggatggctcatgctctggtccagccatggcttgaacacctcccaacaagaacaaagccagactcattctccctagcatcttcttccttgctcaaagatcccacaccccgttagaagctggaactgggtccttgtcaccttcctcacctccccagtcgtagtctggttaatccttacatctcaccacggtcaccgtggctagatgtgacctccgcgatgcttcaggcacgtactagggcagcctgggcagggctggtcactgtgatctcatgaggtgtgaacttgaccccggccttctttcctgggatgccggctaaggacacaagttcagtgtttgccctggcttgtagcccagcgggggctccgtcatcccctggggaatgcctcggcctgcaagaccgcataccgcattggaacagggaaaccacctacttcagcacctccctcagcaaggtggcaggtcccaacaagccttgcaccacgaggaagtggcagtggcattcgggatatggctccctggccagcttgtgaagttcaaggggctcgttacttcttacagctcacagtccctcccgggtccagcacacctgagggctgacctccctcttgattagtgcaggggaaaagcactttaaaaagctgtgtcatgcgtaacttgcacatcttctgattctgacctgaaactgcatcccaggtcggcacagacgcaacccagtctcctcccacctccgagagtgcagtgtcctgaatggagaaccccagcacccagaagcatccactgaaggacgtacttctttgatagtgcctccatgcatgcagaagatgacgtggagagctccgcgcggcacagggcaggaagctggtgtgcactctcatggatccgaagccaacacacgcctctcaactgaggactctgcccctctggcattcttccagccaccagccctgggggccaggagccactgagtgggtcacacagccttagagggcaacgagggcaggagctcgccctggcggtccccatgcagacaagagggtcactggcttccttgctttgctcttcctggacatcttcctcgacattcatctttccatcctaccaagagcgtggaaaccacagggcatgaggacaggcggagacaacgctggaccatctcacagccacatcaagaggctgcccacatcagggctttctacgtggttgcaaggaacacaaacctgtgtgctccatttgcccactggcactaggcctcctgcccaccacccgcttctaggctattcgagccgcaggagctacaggctgctagagaaccctgcggcaggatgctgggcgcggttcagcttttgccagggagcagcatgggactgggatttggaaggtgtacagtggctgcgggctttagcaggaggagtgtctacagcaccttctgctcctccagaaataaggaaactgaggcacagctataaagcaatgtcctgagactggcacctgggggctgccctcttcctgccagactgagtgcctcagagtgctacaactgaccagaggggagaagccaactgaggcagcctgtttacttctaagggactaacccacatgaaaagacccaggcctcctgcgccggcctcacggcccctacacgcgttatcaagcttggagtcaactggacgacctgctgtccctcagacagctgtgagtgccacacttcaccataccgggacaatgtgcctttgcatgtgtgtcctctgccaccctgggcccatgaacagctcactccccttgcaaaacttgactgtaactccctctagaagaatttttggac

SEQ ID NO: 286523 - DNA, 3396 bp, Homo sapiens
  misc_feature (1999)..(1999): n is a, c, g, or t
ttctcgccggtcctgcgggtcgctgctcggctgtgggttagcagcaccctgagcggagcggaagagctgcccgccgccgcgtaaccccgaggccgagactcctggcctggcctccttgggcccacgacgcctgccccgcggagcggacccatgggcctgaggtttgtgtgcggggcctcaggcgagcgctggcgcagcctgtcccccatcgtctgcgccctgcgggcctggccctccccgtggaaggaccgcgggcttcggggccccacgctggggggctgactcctgccacacacacagcggtggccgcgggcctggggcggcagcacagccattctgctcgggctgcgtgagctgaccccgctctctgtgcacctacttttgctgcgtttggtgctgagcctgaagtcccaggacaggcggctgagggggaaagatggtgtgaattgggtgggcagagacaactgaaagccacaggacccggttggcacctttttggccgcctgcgcctttgcctgcagccccgctccctgggtcacccgaaggaggagctggcgctctttccgggcgcagaagcacccgacccacgctggaggaaacggtccctctgggcaggagaagctttgggcctggctggagcacactcacggaaccacgccaacgcctggcctgtagccagctcccacctcccctcccaccttctaaaatgcttgcggatctcacgtggccgaccctaaccagatacacatggggaaaggaatcaggtggcacacataccgcctttactccatagagaacttccaattgtgggtaagaacaaagccccacctctgcctaatagatgcagttttccacctgcagccaaaaagacaacctgttattagcttttttcccagaggacaggcatctctatgaaactgccattgcaaaatttgccgacagtgagataaccagctccattttgcttctaacctccatgccctccttgtttactgctgcacgcaggttgaactgtgggaggaacttagtttaaaacaaagatgataacagccctttcccaaaggaaacctttcctggggattagcctgcttttgtgggaccaacagattagccacaagattagaaactacggttgaagagtcacgcagcgggaggctacaggattctgaccctccccaaactgctcctggcgataacatcaccatcgtaaagcctaagatcagcacttggtgggtcacctggcaccacccaggctcatctgatgttgtggcacccaggaactgactcagtgcgaaaacagcttcgactccctgtgatttcatctctgacctgaccaatgggtacttctgactcactggctgccccccacccaccagcttatctttaaaaactccaaaccccagatgctcagggagaccgagtaataataaaactccagtctcccacacagctagctctgcgtgaattaccttttctctgttgcaaatgccctttcttgataaattggctgtctaggtaacagggaaggtgaacccactgggcagttacacttttatccacccttccagctggatcacgcgccctcttcaatgacatgacacgcagctagagtgtatgagcttgctgccggcaccttccgtcctggatcgcatagcaaggcctcaatggacagccaggtgcctggtccggtcccacttttttttctgtcctgttctcgtttcctctttgcttggccaaagagggttgggccagggtcctgagtgcaagggcttggcttggtgaattaaagtggcagtagccgtgtggcagagaaaatttgtagatgggtgaaatcctgggcctacacagtgacaaagtgtatatagacagccagcctagttggtggatgtgacaaccccagactcttctagatttgtggatccgtgcacctgccagacctgtctctgagccatctggggaggctgggtaagatttcccccgtcagggcctgagcctcatntccaagctgctggcttcagcccagctgccaccagcgctgtctctgtcttgcgctttccagagagagactgactcattttgagctccaggcctaccaggcagcccaaccgcggcagtaactgcctctcacactgaggatggctcatgctctggtccagccatggcttgaacacctcccaacaagaacaaagccagactcattctccctagcatcttcttccttgctcaaagatcccacaccccgttagaagctggaactgggtccttgtcaccttcctcacctccccagtcgtagtctggttaatccttacatctcaccacggtcaccgtggctagatgtgacctccgcgatgcttcaggcacgtactagggcagcctgggcagggctggtcactgtgatctcatgaggtgtgaacttgaccccggccttctttcctgggatgccggctaaggacacaagttcagtgtttgccctggcttgtagcccagcgggggctccgtcatcccctggggaatgcctcggcctgcaagaccgcataccgcattggaacagggaaaccacctacttcagcacctccctcagcaaggtggcaggtcccaacaagccttgcaccacgaggaagtggcagtggcattcgggatatggctccctggccagcttgtgaagttcaaggggctcgttacttcttacagctcacagtccctcccgggtccagcacacctgagggctgacctccctcttgattagtgcaggggaaaagcactttaaaaagctgtgtcatgcgtaacttgcacatcttctgattctgacctgaaactgcatcccaggtcggcacagacgcaacccagtctcctcccacctccgagagtgcagtgtcctgaatggagaaccccagcacccagaagcatccactgaaggactaaattctacacatgaaggcaaacgtccgtggttgacagaaattacactggccagaatccccagtccccatgaggcttgtccagacgcagtgaaccagtcgcagctgataacacacagaccattcccgatcccagaggtgcatttcaggattcattctatttcatcagagacggggtcttcctgtgttgcccaggctggtctcgaactcctgggctgaagcaatcttcctgccttggcctcccagagggttggaattgcagatgtgaggtgtgtcctggaaccctggctgcacccacagatacagccactcctgggcccatgtggatgtaaccttcgagtgccggaatgcctcgtctccatggagaccaaactcaagggcctgactggcccagtctaccgagaccatgagacctgctgtgcccctcggccaggccaacccaaattcttttaaataaaaggcacaagccacagccaca

SEQ ID NO: 286524 - DNA, 4945 bp, Homo sapiens
  misc_feature (1999)..(1999): n is a, c, g, or t
ttctcgccggtcctgcgggtcgctgctcggctgtgggttagcagcaccctgagcggagcggaagagctgcccgccgccgcgtaaccccgaggccgagactcctggcctggcctccttgggcccacgacgcctgccccgcggagcggacccatgggcctgaggtttgtgtgcggggcctcaggcgagcgctggcgcagcctgtcccccatcgtctgcgccctgcgggcctggccctccccgtggaaggaccgcgggcttcggggccccacgctggggggctgactcctgccacacacacagcggtggccgcgggcctggggcggcagcacagccattctgctcgggctgcgtgagctgaccccgctctctgtgcacctacttttgctgcgtttggtgctgagcctgaagtcccaggacaggcggctgagggggaaagatggtgtgaattgggtgggcagagacaactgaaagccacaggacccggttggcacctttttggccgcctgcgcctttgcctgcagccccgctccctgggtcacccgaaggaggagctggcgctctttccgggcgcagaagcacccgacccacgctggaggaaacggtccctctgggcaggagaagctttgggcctggctggagcacactcacggaaccacgccaacgcctggcctgtagccagctcccacctcccctcccaccttctaaaatgcttgcggatctcacgtggccgaccctaaccagatacacatggggaaaggaatcaggtggcacacataccgcctttactccatagagaacttccaattgtgggtaagaacaaagccccacctctgcctaatagatgcagttttccacctgcagccaaaaagacaacctgttattagcttttttcccagaggacaggcatctctatgaaactgccattgcaaaatttgccgacagtgagataaccagctccattttgcttctaacctccatgccctccttgtttactgctgcacgcaggttgaactgtgggaggaacttagtttaaaacaaagatgataacagccctttcccaaaggaaacctttcctggggattagcctgcttttgtgggaccaacagattagccacaagattagaaactacggttgaagagtcacgcagcgggaggctacaggattctgaccctccccaaactgctcctggcgataacatcaccatcgtaaagcctaagatcagcacttggtgggtcacctggcaccacccaggctcatctgatgttgtggcacccaggaactgactcagtgcgaaaacagcttcgactccctgtgatttcatctctgacctgaccaatgggtacttctgactcactggctgccccccacccaccagcttatctttaaaaactccaaaccccagatgctcagggagaccgagtaataataaaactccagtctcccacacagctagctctgcgtgaattaccttttctctgttgcaaatgccctttcttgataaattggctgtctaggtaacagggaaggtgaacccactgggcagttacacttttatccacccttccagctggatcacgcgccctcttcaatgacatgacacgcagctagagtgtatgagcttgctgccggcaccttccgtcctggatcgcatagcaaggcctcaatggacagccaggtgcctggtccggtcccacttttttttctgtcctgttctcgtttcctctttgcttggccaaagagggttgggccagggtcctgagtgcaagggcttggcttggtgaattaaagtggcagtagccgtgtggcagagaaaatttgtagatgggtgaaatcctgggcctacacagtgacaaagtgtatatagacagccagcctagttggtggatgtgacaaccccagactcttctagatttgtggatccgtgcacctgccagacctgtctctgagccatctggggaggctgggtaagatttcccccgtcagggcctgagcctcatntccaagctgctggcttcagcccagctgccaccagcgctgtctctgtcttgcgctttccagagagagactgactcattttgagctccaggcctaccaggcagcccaaccgcggcagtaactgcctctcacactgaggatggctcatgctctggtccagccatggcttgaacacctcccaacaagaacaaagccagactcattctccctagcatcttcttccttgctcaaagatcccacaccccgttagaagctggaactgggtccttgtcaccttcctcacctccccagtcgtagtctggttaatccttacatctcaccacggtcaccgtggctagatgtgacctccgcgatgcttcaggcacgtactagggcagcctgggcagggctggtcactgtgatctcatgaggtgtgaacttgaccccggccttctttcctgggatgccggctaaggacacaagttcagtgtttgccctggcttgtagcccagcgggggctccgtcatcccctggggaatgcctcggcctgcaagaccgcataccgcattggaacagggaaaccacctacttcagcacctccctcagcaaggtggcaggtcccaacaagccttgcaccacgaggaagtggcagtggcattcgggatatggctccctggccagcttgtgaagttcaaggggctcgttacttcttacagctcacagtccctcccgggtccagcacacctgagggctgacctccctcttgattagtgcaggggaaaagcactttaaaaagctgtgtcatgcgtaacttgcacatcttctgattctgacctgaaactgcatcccaggtcggcacagacgcaacccagtctcctcccacctccgagagtgcagtgtcctgaatggagaaccccagcacccagaagcatccactgaaggactaaattctacacatgaaggcaaacgtccgtggttgacagaaattacactggccagaatccccagtccccatgaggcttgtccagacgcagtgaaccagtcgcagctgataacacacagaccattcccgatcccagaggtgcatttcaggattcattctatttcatcagagacggggtcttcctgtgttgcccaggctggtctcgaactcctgggctgaagcaatcttcctgccttggcctcccagagggttggaattgcagatgtgaggtgtgtcctggaaccctggctgcacccacagatacagccactcctgggcccatgtggatgtaaccttcgagtgccggaatgcctcgtctccatggagaccaaactcaagggcctgactggcccagtctaccgagaccatgagacctgctgtgcccctcggccaggccaacccaaattcttttaaataaaaggcacaagccacagccacaccagcaggaagtggatacaggataaggggcagggctcacatctcatcctcatcagcctttgaccaggcgacggagtctgtgatagctagcttatctgctctatgctccagggacctggccggaacgagccgagttgctgtcctcatggaactctcatcctagtggggcagagacaaggacggtgtaacgtgcccgggggtcagcaccacagacaaaacgcagggagcacggcacagtgtgggccagggaaggcctggcttcccaagggtgtgggcgcgagcagcatggctgtggggagttccaggtgcagagaactactccagagacgaagccaggcctgcgaggaggccggagcgcatgaggggaaggcacgaggcaaggctgccagggctgtgctggtggtgcgggacggtcctgtgggggtagctgcggagatggcactgatgccttcggctccagcagcatcctgggctggtgcgggccaataaggggcagggttggggcaggatgaaaggcacaagccacagccatgtcaagcaggaagtggatgcagggtacagcctgtcagggtcagggtgaaaggcagggaggcgggtaggccataggtgaatttggagcagcctgtagaggacaggatgtgccatcaaagacttgttcttgggtccagctgagactgtcccttggggcttcctgtcaccttgtgcaggatagtgagaccatccttggaaaacccatcgggactgcagagcgcggctcagagctgactgtccaggcctggcaggggctgacccctgggcgctggtgcaccctccgtgcggcctcttggaggaagcacacaaggcgacagttcccagctgccgcctgagatgcagcatctgctttactccagcccagcactgctcaccgtcactgcccactcttatgattttacttcccttcatatttgtgattttgcaaagatggtgttgacttacagctgcagcatcaaatgactgactgccaccagcttggccccagctcagggacatgtctgagcccaggcagagcaccctagtggccgggaagcctcacctggagctcctgcgggtggctgcagtccgccaggtgatccgtgaggagggcttggagaggccccatgatggcgtggaaggatggcagggacccgtacatgagcacgcagcgcttcagcagggccaggcccacagccaggcaggacagtctgtgagggcaggaggcaagaggaggtccaacttgttctgtttgtcactgacaaaaccaataacgtggcaaaaatgaacttccccacttccactaggctgaaaactccagtgtggccaccttggccggccagggttgggcccatgcaaccacgggcaaggcaggctcagggtcaggcctaacgcaggaggggaggctgtgggaaccgcagcgccagctgggatggggcggctccatttttggttccaaattatgatttgtgaaatcaagcaaatgtattttgaaaatgaaaagaaaaagggacagcaagccaacatgcctcagaaaggct

SEQ ID NO: 286525 - DNA, 4677 bp, Homo sapiens
  misc_feature (1999)..(1999): n is a, c, g, or t
ttctcgccggtcctgcgggtcgctgctcggctgtgggttagcagcaccctgagcggagcggaagagctgcccgccgccgcgtaaccccgaggccgagactcctggcctggcctccttgggcccacgacgcctgccccgcggagcggacccatgggcctgaggtttgtgtgcggggcctcaggcgagcgctggcgcagcctgtcccccatcgtctgcgccctgcgggcctggccctccccgtggaaggaccgcgggcttcggggccccacgctggggggctgactcctgccacacacacagcggtggccgcgggcctggggcggcagcacagccattctgctcgggctgcgtgagctgaccccgctctctgtgcacctacttttgctgcgtttggtgctgagcctgaagtcccaggacaggcggctgagggggaaagatggtgtgaattgggtgggcagagacaactgaaagccacaggacccggttggcacctttttggccgcctgcgcctttgcctgcagccccgctccctgggtcacccgaaggaggagctggcgctctttccgggcgcagaagcacccgacccacgctggaggaaacggtccctctgggcaggagaagctttgggcctggctggagcacactcacggaaccacgccaacgcctggcctgtagccagctcccacctcccctcccaccttctaaaatgcttgcggatctcacgtggccgaccctaaccagatacacatggggaaaggaatcaggtggcacacataccgcctttactccatagagaacttccaattgtgggtaagaacaaagccccacctctgcctaatagatgcagttttccacctgcagccaaaaagacaacctgttattagcttttttcccagaggacaggcatctctatgaaactgccattgcaaaatttgccgacagtgagataaccagctccattttgcttctaacctccatgccctccttgtttactgctgcacgcaggttgaactgtgggaggaacttagtttaaaacaaagatgataacagccctttcccaaaggaaacctttcctggggattagcctgcttttgtgggaccaacagattagccacaagattagaaactacggttgaagagtcacgcagcgggaggctacaggattctgaccctccccaaactgctcctggcgataacatcaccatcgtaaagcctaagatcagcacttggtgggtcacctggcaccacccaggctcatctgatgttgtggcacccaggaactgactcagtgcgaaaacagcttcgactccctgtgatttcatctctgacctgaccaatgggtacttctgactcactggctgccccccacccaccagcttatctttaaaaactccaaaccccagatgctcagggagaccgagtaataataaaactccagtctcccacacagctagctctgcgtgaattaccttttctctgttgcaaatgccctttcttgataaattggctgtctaggtaacagggaaggtgaacccactgggcagttacacttttatccacccttccagctggatcacgcgccctcttcaatgacatgacacgcagctagagtgtatgagcttgctgccggcaccttccgtcctggatcgcatagcaaggcctcaatggacagccaggtgcctggtccggtcccacttttttttctgtcctgttctcgtttcctctttgcttggccaaagagggttgggccagggtcctgagtgcaagggcttggcttggtgaattaaagtggcagtagccgtgtggcagagaaaatttgtagatgggtgaaatcctgggcctacacagtgacaaagtgtatatagacagccagcctagttggtggatgtgacaaccccagactcttctagatttgtggatccgtgcacctgccagacctgtctctgagccatctggggaggctgggtaagatttcccccgtcagggcctgagcctcatntccaagctgctggcttcagcccagctgccaccagcgctgtctctgtcttgcgctttccagagagagactgactcattttgagctccaggcctaccaggcagcccaaccgcggcagtaactgcctctcacactgaggatggctcatgctctggtccagccatggcttgaacacctcccaacaagaacaaagccagactcattctccctagcatcttcttccttgctcaaagatcccacaccccgttagaagctggaactgggtccttgtcaccttcctcacctccccagtcgtagtctggttaatccttacatctcaccacggtcaccgtggctagatgtgacctccgcgatgcttcaggcacgtactagggcagcctgggcagggctggtcactgtgatctcatgaggtgtgaacttgaccccggccttctttcctgggatgccggctaaggacacaagttcagtgtttgccctggcttgtagcccagcgggggctccgtcatcccctggggaatgcctcggcctgcaagaccgcataccgcattggaacagggaaaccacctacttcagcacctccctcagcaaggtggcaggtcccaacaagccttgcaccacgaggaagtggcagtggcattcgggatatggctccctggccagcttgtgaagttcaaggggctcgttacttcttacagctcacagtccctcccgggtccagcacacctgagggctgacctccctcttgattagtgcaggggaaaagcactttaaaaagctgtgtcatgcgtaacttgcacatcttctgattctgacctgaaactgcatcccaggtcggcacagacgcaacccagtctcctcccacctccgagagtgcagtgtcctgaatggagaaccccagcacccagaagcatccactgaaggacgtgtgtcctggaaccctggctgcacccacagatacagccactcctgggcccatgtggatgtaaccttcgagtgccggaatgcctcgtctccatggagaccaaactcaagggcctgactggcccagtctaccgagaccatgagacctgctgtgcccctcggccaggccaacccaaattcttttaaataaaaggcacaagccacagccacaccagcaggaagtggatacaggataaggggcagggctcacatctcatcctcatcagcctttgaccaggcgacggagtctgtgatagctagcttatctgctctatgctccagggacctggccggaacgagccgagttgctgtcctcatggaactctcatcctagtggggcagagacaaggacggtgtaacgtgcccgggggtcagcaccacagacaaaacgcagggagcacggcacagtgtgggccagggaaggcctggcttcccaagggtgtgggcgcgagcagcatggctgtggggagttccaggtgcagagaactactccagagacgaagccaggcctgcgaggaggccggagcgcatgaggggaaggcacgaggcaaggctgccagggctgtgctggtggtgcgggacggtcctgtgggggtagctgcggagatggcactgatgccttcggctccagcagcatcctgggctggtgcgggccaataaggggcagggttggggcaggatgaaaggcacaagccacagccatgtcaagcaggaagtggatgcagggtacagcctgtcagggtcagggtgaaaggcagggaggcgggtaggccataggtgaatttggagcagcctgtagaggacaggatgtgccatcaaagacttgttcttgggtccagctgagactgtcccttggggcttcctgtcaccttgtgcaggatagtgagaccatccttggaaaacccatcgggactgcagagcgcggctcagagctgactgtccaggcctggcaggggctgacccctgggcgctggtgcaccctccgtgcggcctcttggaggaagcacacaaggcgacagttcccagctgccgcctgagatgcagcatctgctttactccagcccagcactgctcaccgtcactgcccactcttatgattttacttcccttcatatttgtgattttgcaaagatggtgttgacttacagctgcagcatcaaatgactgactgccaccagcttggccccagctcagggacatgtctgagcccaggcagagcaccctagtggccgggaagcctcacctggagctcctgcgggtggctgcagtccgccaggtgatccgtgaggagggcttggagaggccccatgatggcgtggaaggatggcagggacccgtacatgagcacgcagcgcttcagcagggccaggcccacagccaggcaggacagtctgtgagggcaggaggcaagaggaggtccaacttgttctgtttgtcactgacaaaaccaataacgtggcaaaaatgaacttccccacttccactaggctgaaaactccagtgtggccaccttggccggccagggttgggcccatgcaaccacgggcaaggcaggctcagggtcaggcctaacgcaggaggggaggctgtgggaaccgcagcgccagctgggatggggcggctccatttttggttccaaattatgatttgtgaaatcaagcaaatgtattttgaaaatgaaaagaaaaagggacagcaagccaacatgcctcagaaaggct

SEQ ID NO: 286526 - DNA, 3001 bp, Homo sapiens
  misc_feature (1999)..(1999): n is a, c, g, or t
ttctcgccggtcctgcgggtcgctgctcggctgtgggttagcagcaccctgagcggagcggaagagctgcccgccgccgcgtaaccccgaggccgagactcctggcctggcctccttgggcccacgacgcctgccccgcggagcggacccatgggcctgaggtttgtgtgcggggcctcaggcgagcgctggcgcagcctgtcccccatcgtctgcgccctgcgggcctggccctccccgtggaaggaccgcgggcttcggggccccacgctggggggctgactcctgccacacacacagcggtggccgcgggcctggggcggcagcacagccattctgctcgggctgcgtgagctgaccccgctctctgtgcacctacttttgctgcgtttggtgctgagcctgaagtcccaggacaggcggctgagggggaaagatggtgtgaattgggtgggcagagacaactgaaagccacaggacccggttggcacctttttggccgcctgcgcctttgcctgcagccccgctccctgggtcacccgaaggaggagctggcgctctttccgggcgcagaagcacccgacccacgctggaggaaacggtccctctgggcaggagaagctttgggcctggctggagcacactcacggaaccacgccaacgcctggcctgtagccagctcccacctcccctcccaccttctaaaatgcttgcggatctcacgtggccgaccctaaccagatacacatggggaaaggaatcaggtggcacacataccgcctttactccatagagaacttccaattgtgggtaagaacaaagccccacctctgcctaatagatgcagttttccacctgcagccaaaaagacaacctgttattagcttttttcccagaggacaggcatctctatgaaactgccattgcaaaatttgccgacagtgagataaccagctccattttgcttctaacctccatgccctccttgtttactgctgcacgcaggttgaactgtgggaggaacttagtttaaaacaaagatgataacagccctttcccaaaggaaacctttcctggggattagcctgcttttgtgggaccaacagattagccacaagattagaaactacggttgaagagtcacgcagcgggaggctacaggattctgaccctccccaaactgctcctggcgataacatcaccatcgtaaagcctaagatcagcacttggtgggtcacctggcaccacccaggctcatctgatgttgtggcacccaggaactgactcagtgcgaaaacagcttcgactccctgtgatttcatctctgacctgaccaatgggtacttctgactcactggctgccccccacccaccagcttatctttaaaaactccaaaccccagatgctcagggagaccgagtaataataaaactccagtctcccacacagctagctctgcgtgaattaccttttctctgttgcaaatgccctttcttgataaattggctgtctaggtaacagggaaggtgaacccactgggcagttacacttttatccacccttccagctggatcacgcgccctcttcaatgacatgacacgcagctagagtgtatgagcttgctgccggcaccttccgtcctggatcgcatagcaaggcctcaatggacagccaggtgcctggtccggtcccacttttttttctgtcctgttctcgtttcctctttgcttggccaaagagggttgggccagggtcctgagtgcaagggcttggcttggtgaattaaagtggcagtagccgtgtggcagagaaaatttgtagatgggtgaaatcctgggcctacacagtgacaaagtgtatatagacagccagcctagttggtggatgtgacaaccccagactcttctagatttgtggatccgtgcacctgccagacctgtctctgagccatctggggaggctgggtaagatttcccccgtcagggcctgagcctcatntccaagctgctggcttcagcccagctgccaccagcgctgtctctgtcttgcgctttccagagagagactgactcattttgagctccaggcctaccaggcagcccaaccgcggcagtaactgcctctcacactgaggatggctcatgctctggtccagccatggcttgaacacctcccaacaagaacaaagccagactcattctccctagcatcttcttccttgctcaaagatcccacaccccgttagaagctggaactgggtccttgtcaccttcctcacctccccagtcgtagtctggttaatccttacatctcaccacggtcaccgtggctagatgtgacctccgcgatgcttcaggcacgtactagggcagcctgggcagggctggtcactgtgatctcatgaggtgtgaacttgaccccggccttctttcctgggatgccggctaaggacacaagttcagtgtttgccctggcttgtagcccagcgggggctccgtcatcccctggggaatgcctcggcctgcaagaccgcataccgcattggaacagggaaaccacctacttcagcacctccctcagcaaggtggcaggtcccaacaagccttgcaccacgaggaagtggcagtggcattcgggatatggctccctggccagcttgtgaagttcaaggggctcgttacttcttacagctcacagtccctcccgggtccagcacacctgagggctgacctccctcttgattagtgcaggggaaaagcactttaaaaagctgtgtcatgcgtaacttgcacatcttctgattctgacctgaaactgcatcccaggtcggcacagacgcaacccagtctcctcccacctccgagagtgcagtgtcctgaatggagaaccccagcacccagaagcatccactgaaggactaaattctacacatgaaggcaaacgtccgtggttgacagaaattacactggcctacagcacatgcggtacgagctcgattct

SEQ ID NO: 286527 - DNA, 3836 bp, Homo sapiens
  misc_feature (1999)..(1999): n is a, c, g, or t
ttctcgccggtcctgcgggtcgctgctcggctgtgggttagcagcaccctgagcggagcggaagagctgcccgccgccgcgtaaccccgaggccgagactcctggcctggcctccttgggcccacgacgcctgccccgcggagcggacccatgggcctgaggtttgtgtgcggggcctcaggcgagcgctggcgcagcctgtcccccatcgtctgcgccctgcgggcctggccctccccgtggaaggaccgcgggcttcggggccccacgctggggggctgactcctgccacacacacagcggtggccgcgggcctggggcggcagcacagccattctgctcgggctgcgtgagctgaccccgctctctgtgcacctacttttgctgcgtttggtgctgagcctgaagtcccaggacaggcggctgagggggaaagatggtgtgaattgggtgggcagagacaactgaaagccacaggacccggttggcacctttttggccgcctgcgcctttgcctgcagccccgctccctgggtcacccgaaggaggagctggcgctctttccgggcgcagaagcacccgacccacgctggaggaaacggtccctctgggcaggagaagctttgggcctggctggagcacactcacggaaccacgccaacgcctggcctgtagccagctcccacctcccctcccaccttctaaaatgcttgcggatctcacgtggccgaccctaaccagatacacatggggaaaggaatcaggtggcacacataccgcctttactccatagagaacttccaattgtgggtaagaacaaagccccacctctgcctaatagatgcagttttccacctgcagccaaaaagacaacctgttattagcttttttcccagaggacaggcatctctatgaaactgccattgcaaaatttgccgacagtgagataaccagctccattttgcttctaacctccatgccctccttgtttactgctgcacgcaggttgaactgtgggaggaacttagtttaaaacaaagatgataacagccctttcccaaaggaaacctttcctggggattagcctgcttttgtgggaccaacagattagccacaagattagaaactacggttgaagagtcacgcagcgggaggctacaggattctgaccctccccaaactgctcctggcgataacatcaccatcgtaaagcctaagatcagcacttggtgggtcacctggcaccacccaggctcatctgatgttgtggcacccaggaactgactcagtgcgaaaacagcttcgactccctgtgatttcatctctgacctgaccaatgggtacttctgactcactggctgccccccacccaccagcttatctttaaaaactccaaaccccagatgctcagggagaccgagtaataataaaactccagtctcccacacagctagctctgcgtgaattaccttttctctgttgcaaatgccctttcttgataaattggctgtctaggtaacagggaaggtgaacccactgggcagttacacttttatccacccttccagctggatcacgcgccctcttcaatgacatgacacgcagctagagtgtatgagcttgctgccggcaccttccgtcctggatcgcatagcaaggcctcaatggacagccaggtgcctggtccggtcccacttttttttctgtcctgttctcgtttcctctttgcttggccaaagagggttgggccagggtcctgagtgcaagggcttggcttggtgaattaaagtggcagtagccgtgtggcagagaaaatttgtagatgggtgaaatcctgggcctacacagtgacaaagtgtatatagacagccagcctagttggtggatgtgacaaccccagactcttctagatttgtggatccgtgcacctgccagacctgtctctgagccatctggggaggctgggtaagatttcccccgtcagggcctgagcctcatntccaagctgctggcttcagcccagctgccaccagcgctgtctctgtcttgcgctttccagagagagactgactcattttgagctccaggcctaccaggcagcccaaccgcggcagtaactgcctctcacactgaggatggctcatgctctggtccagccatggcttgaacacctcccaacaagaacaaagccagactcattctccctagcatcttcttccttgctcaaagatcccacaccccgttagaagctggaactgggtccttgtcaccttcctcacctccccagtcgtagtctggttaatccttacatctcaccacggtcaccgtggctagatgtgacctccgcgatgcttcaggcacgtactagggcagcctgggcagggctggtcactgtgatctcatgaggtgtgaacttgaccccggccttctttcctgggatgccggctaaggacacaagttcagtgtttgccctggcttgtagcccagcgggggctccgtcatcccctggggaatgcctcggcctgcaagaccgcataccgcattggaacagggaaaccacctacttcagcacctccctcagcaaggtggcaggtcccaacaagccttgcaccacgaggaagtggcagtggcattcgggatatggctccctggccagcttgtgaagttcaaggggctcgttacttcttacagctcacagtccctcccgggtccagcacacctgagggctgacctccctcttgattagtgcaggggaaaagcactttaaaaagctgtgtcatgcgtaacttgcacatcttctgattctgacctgaaactgcatcccaggtcggcacagacgcaacccagtctcctcccacctccgagagtgcagtgtcctgaatggagaaccccagcacccagaagcatccactgaaggacgtaagtaggacaaggccaactgtggctgttccagcagagggactgtgggtgatgtttcccttctctgatttctaaaatatctgcaaacttgtttcatttataattgaaaatataatttgcataacaacagtaaattctacacatgaaggcaaacgtccgtggttgacagaaattacactggccagaatccccagtccccatgaggcttgtccagacgcagtgaaccagtcgcagctgataacacacagaccattcccgatcccagaggtgcatttcaggattcattctatttcatcagagacggggtcttcctgtgttgcccaggctggtctcgaactcctgggctgaagcaatcttcctgccttggcctcccagagggttggaattgcagatgtgaggtacttctttgatagtgcctccatgcatgcagaagatgacgtggagagctccgcgcggcacagggcaggaagctggtgtgcactctcatggatccgaagccaacacacgcctctcaactgaggactctgcccctctggcattcttccagccaccagccctgggggccaggagccactgagtgggtcacacagccttagagggcaacgagggcaggagctcgccctggcggtccccatgcagacaagaggtacacactccctggcatgcagagccacccaactgggtttcactgaagggtgaggggcggggtgtctaccgtgctttccaaataccgctcagtcacccagagcttgaaacttacaatgagccaccccatcccagccacaaatctaaaggggttcacttgtttcaaaatcaacttgtttgtggttaaaagtcagtcccagctctacagtggctggagcggcacgtgtgagaagccggcttgcgctgtgaggctcacaagccctgggtgacca

SEQ ID NO: 286528 - DNA, 3228 bp, Homo sapiens
  misc_feature (1999)..(1999): n is a, c, g, or t
ttctcgccggtcctgcgggtcgctgctcggctgtgggttagcagcaccctgagcggagcggaagagctgcccgccgccgcgtaaccccgaggccgagactcctggcctggcctccttgggcccacgacgcctgccccgcggagcggacccatgggcctgaggtttgtgtgcggggcctcaggcgagcgctggcgcagcctgtcccccatcgtctgcgccctgcgggcctggccctccccgtggaaggaccgcgggcttcggggccccacgctggggggctgactcctgccacacacacagcggtggccgcgggcctggggcggcagcacagccattctgctcgggctgcgtgagctgaccccgctctctgtgcacctacttttgctgcgtttggtgctgagcctgaagtcccaggacaggcggctgagggggaaagatggtgtgaattgggtgggcagagacaactgaaagccacaggacccggttggcacctttttggccgcctgcgcctttgcctgcagccccgctccctgggtcacccgaaggaggagctggcgctctttccgggcgcagaagcacccgacccacgctggaggaaacggtccctctgggcaggagaagctttgggcctggctggagcacactcacggaaccacgccaacgcctggcctgtagccagctcccacctcccctcccaccttctaaaatgcttgcggatctcacgtggccgaccctaaccagatacacatggggaaaggaatcaggtggcacacataccgcctttactccatagagaacttccaattgtgggtaagaacaaagccccacctctgcctaatagatgcagttttccacctgcagccaaaaagacaacctgttattagcttttttcccagaggacaggcatctctatgaaactgccattgcaaaatttgccgacagtgagataaccagctccattttgcttctaacctccatgccctccttgtttactgctgcacgcaggttgaactgtgggaggaacttagtttaaaacaaagatgataacagccctttcccaaaggaaacctttcctggggattagcctgcttttgtgggaccaacagattagccacaagattagaaactacggttgaagagtcacgcagcgggaggctacaggattctgaccctccccaaactgctcctggcgataacatcaccatcgtaaagcctaagatcagcacttggtgggtcacctggcaccacccaggctcatctgatgttgtggcacccaggaactgactcagtgcgaaaacagcttcgactccctgtgatttcatctctgacctgaccaatgggtacttctgactcactggctgccccccacccaccagcttatctttaaaaactccaaaccccagatgctcagggagaccgagtaataataaaactccagtctcccacacagctagctctgcgtgaattaccttttctctgttgcaaatgccctttcttgataaattggctgtctaggtaacagggaaggtgaacccactgggcagttacacttttatccacccttccagctggatcacgcgccctcttcaatgacatgacacgcagctagagtgtatgagcttgctgccggcaccttccgtcctggatcgcatagcaaggcctcaatggacagccaggtgcctggtccggtcccacttttttttctgtcctgttctcgtttcctctttgcttggccaaagagggttgggccagggtcctgagtgcaagggcttggcttggtgaattaaagtggcagtagccgtgtggcagagaaaatttgtagatgggtgaaatcctgggcctacacagtgacaaagtgtatatagacagccagcctagttggtggatgtgacaaccccagactcttctagatttgtggatccgtgcacctgccagacctgtctctgagccatctggggaggctgggtaagatttcccccgtcagggcctgagcctcatntccaagctgctggcttcagcccagctgccaccagcgctgtctctgtcttgcgctttccagagagagactgactcattttgagctccaggcctaccaggcagcccaaccgcggcagtaactgcctctcacactgaggatggctcatgctctggtccagccatggcttgaacacctcccaacaagaacaaagccagactcattctccctagcatcttcttccttgctcaaagatcccacaccccgttagaagctggaactgggtccttgtcaccttcctcacctccccagtcgtagtctggttaatccttacatctcaccacggtcaccgtggctagatgtgacctccgcgatgcttcaggcacgtactagggcagcctgggcagggctggtcactgtgatctcatgaggtgtgaacttgaccccggccttctttcctgggatgccggctaaggacacaagttcagtgtttgccctggcttgtagcccagcgggggctccgtcatcccctggggaatgcctcggcctgcaagaccgcataccgcattggaacagggaaaccacctacttcagcacctccctcagcaaggtggcaggtcccaacaagccttgcaccacgaggaagtggcagtggcattcgggatatggctccctggccagcttgtgaagttcaaggggctcgttacttcttacagctcacagtccctcccgggtccagcacacctgagggctgacctccctcttgattagtgcaggggaaaagcactttaaaaagctgtgtcatgcgtaacttgcacatcttctgattctgacctgaaactgcatcccaggtcggcacagacgcaacccagtctcctcccacctccgagagtgcagtgtcctgaatggagaaccccagcacccagaagcatccactgaaggacagacggggtcttcctgtgttgcccaggctggtctcgaactcctgggctgaagcaatcttcctgccttggcctcccagagggttggaattgcagatgtgaggtgtgtcctggaaccctggctgcacccacagatacagccactcctgggcccatgtggatgtaaccttcgagtgccggaatgcctcgtctccatggagaccaaactcaagggcctgactggcccagtctaccgagaccatgagacctgctgtgcccctcggccaggccaacccaaattcttttaaataaaaggcacaagccacagccaca

SEQ ID NO: 286529 - DNA, 2009 bp, Homo sapiens
ttctcgccggtcctgcgggtcgctgctcggctgtgggttagcagcaccctgagcggagcggaagagctgcccgccgccgcgtaaccccgaggccgagactcctggcctggcctccttgggcccacgacgcctgccccgcggagcggacccatgggcctgaggtttgtgtgcggggcctcaggcgagcgctggcgcagcctgtcccccatcgtctgcgccctgcgggcctggccctccccgtggaaggaccgcgggcttcggggccccacgctggggggctgactcctgccacacacacagcggtggccgcgggcctggggcggcagcacagccattctgctcgggctgcgtgagctgaccccgctctctgtgcacctacttttgctgcgtttggtgctgagcctgaagtcccaggacaggcggctgagggggaaagatggtgtgaattgggtgggcagagacaactgaaagccacaggacccggttggcacctttttggccgcctgcgcctttgcctgcagccccgctccctgggtcacccgaaggaggagctggcgctctttccgggcgcagaagcacccgacccacgctggaggaaacggtccctctgggcaggagaagctttgggcctggctggagcacactcacggaaccacgccaacgcctggcctgtagccagctcccacctcccctcccaccttctaaaatgcttgcggatctcacgtggccgaccctaaccagatacacatggggaaaggaatcaggtggcacacataccgcctttactccatagagaacttccaattgtgggtaagaacaaagccccacctctgcctaatagatgcagttttccacctgcagccaaaaagacaacctgttattagcttttttcccagaggacaggcatctctatgaaactgccattgcaaaatttgccgacagtgagataaccagctccattttgcttctaacctccatgccctccttgtttactgctgcacgcaggttgaactgtgggaggaacttagtttaaaacaaagatgataacagccctttcccaaaggaaacctttcctggggattagcctgcttttgtgggaccaacagattagccacaagattagaaactacggttgaagagtcacgcagcgggaggctacaggattctgaccctccccaaactgctcctggcgataacatcaccatcgtaaagcctaagatcagcacttggtgggtcacctggcaccacccaggctcatctgatgttgtggcacccaggaactgactcagtgcgaaaacagcttcgactccctgtgatttcatctctgacctgaccaatgggtacttctgactcactggctgccccccacccaccagcttatctttaaaaactccaaaccccagatgctcagggagaccgagtaataataaaactccagtctcccacacagctagctctgcgtgaattaccttttctctgttgcaaatgccctttcttgataaattggctgtctaggtaacagggaaggtgaacccactgggcagttacacttttatccacccttccagctggatcacgcgccctcttcaatgacatgacacgcagctagagtgtatgagcttgctgccggcaccttccgtcctggatcgcatagcaaggcctcaatggacagccaggtgcctggtccggtcccacttttttttctgtcctgttctcgtttcctctttgcttggccaaagagggttgggccaggtgtcctgaatggagaaccccagcacccagaagcatccactgaaggacgtgtgtcctggaaccctggctgcacccacagatacagccactcctgggcccatgtggatgtaaccttcgagtgccggaatgcctcgtctccatggagaccaaactcaagggcctgactggcccagtctaccgagaccatgagacctgctgtgcccctcggccaggccaacccaaattcttttaaataaaaggcacaagccacagccaca

SEQ ID NO: 286530 - DNA, 1535 bp, Homo sapiens
  misc_feature (1510)..(1510): n is a, c, g, or t
gattcaggaaacatctggcaaagatgatataagtgcctgttaagcagaaatgtaaagtcaggagagaatgactttagataagaaacacagaaaagccctgcaagccactttcctatgcagtcacctgttgactgagcaagtaagaactggatgaatccgctttttctaacagcattcttaagagtctacactcacttctgccatttcctaaaaactcagccataacattatggactggaggtggtgggagaaacagctcgatttgtggtacagacgttgttgggggcaccactctgtgtggcagctgcagctgacagctccaaggcactttccatattaactcatttattcctcacgacaggtacttctttgatagtgcctccatgcatgcagaagatgacgtggagagctccgcgcggcacagggcaggaagctggtgtgcactctcatggatccgaagccaacacacgcctctcaactgaggactctgcccctctggcattcttccagccaccagccctgggggccaggagccactgagtgggtcacacagccttagagggcaacgagggcaggagctcgccctggcggtccccatgcagacaagagggtcactggcttccttgctttgctcttcctggacatcttcctcgacattcatctttccatcctaccaagagcgtggaaaccacagggcatgaggacaggcggagacaacgctggaccatctcacagccacatcaagaggctgcccacatcagggctttctacgtggttgcaaggaacacaaacctgtgtgctccatttgcccactggcactaggcctcctgcccaccacccgcttctaggctattcgagccgcaggagctacaggctgctagagaaccctgcggcaggatgctgggcgcggttcagcttttgccagggagcagcatgggactgggatttggaaggtgtacagtggctgcgggctttagcaggaggagtgtctacagcaccttctgctcctccaggtaacctagtgtttttatcagtatccattttcctgtgtggatctcttctgcttgaaacctgtcctgcctatttttcttccctggaccctgactgatacactcttaaaacgagaaaagggtaccgatttataaagttcgtgaattaaaaactacaccagtcatggaaactcaatgacatcactcaaagaaaattcacaactctagccttgagttagctccctcaatagtatgatgaggtcatgcagatagaatcatacagttattaacaaaagtagttgatgttaaccgagtaatcagttttatctgtgttcctttgagacagagagagagagtgagaaagagagcgtgagcaagtgagtgcacatactattgttaaagtcttctctctaaagttttaatatctgatataccataaacacccagataaagaactttagagaaactggttaaaaagatttaaaattcccaactgtaataaatccctaaaatgaataccnaaaaaatgtttttaaattaaaaaaa

SEQ ID NO: 286531 - DNA, 521 bp, Homo sapiens
gctacctgtggggagggccccagaggtggaagtgagactttttattgcatatttttaatactttctcaattctgaaccacatgaatacattaacaattttttttaagttttttttttaaggtgagttgaagtcttgggaatagactgaaaactaacaaaaccggccccatcgctgaggaccaggtgagcctcttcagaatgcatcatttccacccatactaaatgactacatcatctctttggacatcccaattcacaaaagtctgaagtagttcccagtaactgcagggttcttgaccatttcaatgtcctctgtccacaggatgggacaaaaacaagggcagatgctgtagtctgcaagctcatatcctcaaagagaccaaaatgccatttataattttactgtcatattcactgcagccatgttatttaaatagtcattacagaatcatgaaaataaccacaagaacttttaagtgtgaaataaaggtctcataaatttctgttccttaaaacccaaa

SEQ ID NO: 286532 - DNA, 785 bp, Homo sapiens
atgggaatgtattcatacacagcctgagcagctgagcaggtgctggactgcacaaggcaagaggggaagctgggcctcaccagagaattccaagttcaagttccaagtcgcaccagatgatggcgagcctcataagagctgggactgaatataaaaaggtgagaggccaccaccttctccacatgcctggtcctgggcttcttggctcgttttgttttgctctacattaaaaggtcagttgagagaaaatgaggaagtcaaaacaaaggctcctggcgtctggcaggagctgccgaaaggtggctgatgcaatctccccgaggagccacattaatttttaaaaaggcagctgttttcaaagcaaaacgtttaataattttttttggaaccccagtgtaacagaattcaaatgggaaaagtgagagggagtgtttaaacaaaggcatccccaagtcccttcccagttggtcctgaacaatggaggaggtcaaaccttcttttccacagcatgatggtataaatcagggaagtcctggaaatctattccacaccctaaaatacccaaacccattaaaagcacagatataggcttttacaaacatttactaaataagcaaaaccatacaaaatatgttcccgtcggcaatttttcccataccatggactcaaatggttaaaactccttatcatcccagactaatgccaccttttcaattcccaatgatgcttgttacggaaggaattattgggaattgaaaaggtggcattagtctgggatgataagg

SEQ ID NO: 286533 - DNA, 2601 bp, Homo sapiens
gccccaactcagcccaccatagacactgaggtgctcgctcttttaatgtcctcgttgtggccgtaagtactttgctaggtttcatttaggcatttggcaaatcagcctggaagtctggacccatgacagcaatcactccctccccacctcctgaagctagaggaaggagagctgtttactaggcacgactgcgaaggcaagggggcaccagctcaggactgcatctgcctgccatttcccttccactcctcctttctggagtctgacattagaaagccagcgagaaggaagattcaaacaaccaaccctgatttcctgcttctccttttcatgagtgttcctgtggtctctgcacctcctttctgtcccccggcagagggcagtagagatggccggcccaaggcctcggtggcgcgaccagctgctgttcatgagcatcatagtcctcgtgattgtggtcatctgcctgatgttatacgctcttctctgggaggctggcaacctcactgacctgcccaacctgagaatcggcttctataacttctgcctgtggaatgaggacaccagcaccctacagtgtcaccagttccctgagctggaagccctgggggtgcctcgggttggcctgggcctggccaggcttggcgtgtacgggtccctggtcctcaccctctttgccccccagcctctcctcctagcccagtgcaacagtgatgagagagcgtggcggctggcagtgggcttcctggctgtgtcctctgtgctgctggcaggcggcctgggcctcttcctctcctatgtgtggaagtgggtcaggctctccctcccggggcctgggtttctagctctgggcagcgcccaggccttactcatcctcttgcttatagccatggctgtgttccctctgagggctgagagggctgagagcaagcttgagagctgctaaaggcttacgtgattgcaagggttcagttccaaccatggtcagaggtggcacatctgctcagccatctcattttacagctaacgctgatctccagctccagcgatggaacccactacagaggaggtggggcccctgtgtcaaagaggccgaggggcagcaagggcagccagggcacctgtgacttcttagtacaagattgtctgtccttcaggacttccaaggctcccaaagactccctaaaccatgcagctcattgtcacaccaattcctgctttaattaatggatctgagcaaatcttcctctagcttcaggagggtggggagggagtgattgccgtcatggggccagacttccaggctgatttgccaaatgccaaaatgaaacctagcaaagaacttacggcaacaaacgaggacattaaaagagcgagcacctcagtgtctctggggacatggttaaggagcttccactcagcccaccatagtgagtgggccgccataagccatcactggaactccaaccccagaggtccaggagtgatctctgagtgactcaacaaagacaggacacatggggtacaaagacaaggcttgactgcttcaaagcttccctggacctgaagccagacagggcagaggcgtccgctgacaaatcactcccatgatgagaccctggaggactccaaatcctcgctgtgaacaggactggacggttgcgcacaaacaaacgctgccaccctccacttcccaacccagaacttggaaagacattagcacaacttacgcattggggaattgtgtgtattttctagcacttgtgtattggaaaacctgtatggcagtgatttattcatatattcctgtccaaagccacactgaaaacagaggcagagacatgtactctggtgtgatctcttgtcctcagtgtctcttctgggctcctgtccctcttgctttatagctagctgcccggggaccaaggtacaggtgaaagcaaggtagcagcttgcgggaggaggcctgtctggcttaccagtctatacactgtggcctcaacctcccagacagggcagagaactgtgggcagctcgtttgctttctaggctggctggagaggtgggagctcattgatagactcatgatggaaactatttttgaaacaggcttcctccttcaggagagatcatgcggactaaactgtagcaattccagtgcacctggcagtgatccttttctttgcaaagtactgtctctttggttccagtaagttggaccaccacatgacatcattttccctggaacctggtcactgactaacacagacaattgggactccagagcctcaagagccaggagagggcacagtacatacagagggagtcaaatgggatctcattttgagtcctgccttccgcacactcagaacggcagccccaaggcccggagtgtccaggggcttctggcctgaggtgaatctgccaggcccaagaaggcacaaagaagagtcagggcccaagcttaatgacctgttttttaattcaggaaggtaaatctcgttctctcgtcacacccggaattacaggtccatttgtcctcagtgggagttgatctttgattcccggaactttaagccctgccgtctcgcctggcgccca

SEQ ID NO: 286534 - DNA, 3214 bp, Homo sapiens
ataccccaaaatttaaatcttttttttttttgggacagagtcttactctgttgcccaggctggagagcagtggtccaatctcaactcacggcaaacctccacctcccgggttcaaagtgattctcctgcctcaggaggcagagattgcagtgagccaagatcgcaccactgcactccagcctgggtgacagagtgaggctccatctcaaaacaacaacaaacaaaaacgtctaagttttctataattcatactaccattgtcaggaaaaaatatgtattagtttttaaagtaatgagtatatgatgggatttcatcaccaggtgacatcttgtcttgacccagtaatgagttcccagagcactgcaggtaaaatcagagtgggtgtgtcagtggtccttgacccaggctcaccttcgaatgagcttcagagcttcagaaacacaccagtgcccagcccgaagcacataagttgagctctgattgatctgtggcccagcaatgggtagttcttacagctccccaggtggttgtcttggcagctgtggtgaaaaccaatagcttcctccaccttcaggtctccattaagggtgggccttgcccttcacctcagtcaaaacccaccttcaaaaaagatctgagaaatcccctcactaatgtttccaatggcttgttgtatttggactggagcaaagcctttggctaaagagcacttcactcagtttaagatgtttcacactttcaaagctgcttgggagagacttttcctcctgacctcaaatcagagggcagctaatgacttatttgcaaataggtcctggcaggaggttacctcagacttctggtccttggtggagggcagggtaggagggaaacttgccatgagtttgtaagaaatgccaaagggagaacatgagcttgtctggacacagggaacaagcaagggagagatggactgactgctgtgacttccccgcaggtcccccggcagagggcagtagagatggccggcccaaggcctcggtggcgcgaccagctgctgttcatgagcatcatagtcctcgtgattgtggtcatctgcctgatgttatacgctcttctctgggaggctggcaacctcactgacctgcccaacctgagaatcggcttctataacttctgcctgtggaatgaggacaccagcaccctacagtgtcaccagttccctgagctggaagccctgggggtgcctcgggttggcctgggcctggccaggcttggcgtgtacgggtccctggtcctcaccctctttgccccccagcctctcctcctagcccagtgcaacagtgatgagagagcgtggcggctggcagtgggcttcctggctgtgtcctctgtgctgctggcaggcggcctgggcctcttcctctcctatgtgtggaagtgggtcaggctctccctcccggggcctgggtttctagctctgggcagcgcccaggccttactcatcctcttgcttatagccatggctgtgttccctctgagggctgagagggctgagagcaagcttgagagctgctaaaggcttacgtgattgcaagggttcagttccaaccatggtcagaggtggcacatctgctcagccatctcattttacagctaacgctgatctccagctccagcgatggaacccactacagaggaggtggggcccctgtgtcaaagaggccgaggggcagcaagggcagccagggcacctgtgacttcttagtacaagattgtctgtccttcaggacttccaaggctcccaaagactccctaaaccatgcagctcattgtcacaccaattcctgctttaattaatggatctgagcaaatcttcctctagcttcaggagggtggggagggagtgattgccgtcatggggccagacttccaggctgatttgccaaatgccaaaatgaaacctagcaaagaacttacggcaacaaacgaggacattaaaagagcgagcacctcagtgtctctggggacatggttaaggagcttccactcagcccaccatagtgagtgggccgccataagccatcactggaactccaaccccagaggtccaggagtgatctctgagtgactcaacaaagacaggacacatggggtacaaagacaaggcttgactgcttcaaagcttccctggacctgaagccagacagggcagaggcgtccgctgacaaatcactcccatgatgagaccctggaggactccaaatcctcgctgtgaacaggactggacggttgcgcacaaacaaacgctgccaccctccacttcccaacccagaacttggaaagacattagcacaacttacgcattggggaattgtgtgtattttctagcacttgtgtattggaaaacctgtatggcagtgatttattcatatattcctgtccaaagccacactgaaaacagaggcagagacatgtactctggtgtgatctcttgtcctcagtgtctcttctgggctcctgtccctcttgctttatagctagctgcccggggaccaaggtacaggtgaaagcaaggtagcagcttgcgggaggaggcctgtctggcttaccagtctatacactgtggcctcaacctcccagacagggcagagaactgtgggcagctcgtttgctttctaggctggctggagaggtgggagctcattgatagactcatgatggaaactatttttgaaacaggcttcctccttcaggagagatcatgcggactaaactgtagcaattccagtgcacctggcagtgatccttttctttgcaaagtactgtctctttggttccagtaagttggaccaccacatgacatcattttccctggaacctggtcactgactaacacagacaattgggactccagagcctcaagagccaggagagggcacagtacatacagagggagtcaaatgggatctcattttgagtcctgccttccgcacactcagaacggcagccccaaggcccggagtgtccaggggcttctggcctgaggtgaatctgccaggcccaagaaggcacaaagaagagtcagggcccaagcttaatgacctgttttttaattcaggaaggtaaatctcgttctctcgtcacacccggaattacaggtccatttgtcctcagtgggagttgatctttgattcccggaactttaagccctgccgtctcgcctggcgccca

SEQ ID NO: 286535 - DNA, 689 bp, Homo sapiens
gccccaactcagcccaccatagacactgaggtgctcgctcttttaatgtcctcgttgtggccgtaagtactttgctaggtttcatttaggcatttggcaaatcagcctggaagtctggacccatgacagcaatcactccctccccacctcctgaagctagaggaaggagagctgtttactaggcacgactgcgaaggcaagggggcaccagctcaggactgcatctgcctgccatttcccttccactcctcctttctggagtctgacattagaaagccagcgagaaggaagattcaaacaaccaaccctgatttcctgcttctccttttcatgagtgttcctgtggtctctgcacctcctttcttgtgtaatgtttaacagcagcaaaattaaaacatgtaagttccatgcggcagtcctcaaggccatgatagcaactgctgctggtggtgcccgatggggaaggggctgccaaactatgcatctgaccaaggactaatatccagaatctacaagaacacaaacaactcaacaagaaaaaacaatcccattaaaaagtgggtaaaggacataaacagacattttccaaaggaagacatacaagtggccaagaaacatatgaaaaatgctcaacatcactaatcaccagataaatgcaaattaaaaccacaatgagatactatcttaca

SEQ ID NO: 286536 - DNA, 5690 bp, Homo sapiens
atgggaatgtattcatacacagcctgagcagctgagcaggtgctggactgcacaaggcaagaggggaagctgggcctcaccagagaattccaagttcaagttccaagtcgcaccagatgatggcgagcctcataagagctgggactgaatataaaaaggtgagaggccaccaccttctccacatgcctggtcctgggcttcttggctcgttttgttttgctctacattaaaaggtcagttgagagaaaatgaggaagtcaaaacaaaggctcctggcgtctggcaggagctgccgaaaggtggctgatgcaatctccccgaggagccacattaatttttaaaaaggcagctgttttcaaagcaaaacgtttaataattttttttggaaccccagtgtaacagaattcaaatgggaaaagtgagagggagtgtttaaacaaaggcatccccaagtcccttcccagttggtcctgaacaatggaggaggtcaaaccttcttttccacagcatgatggtataaatcagggaagtcctggaaatctattccacaccctaaaatacccaaacccattaaaagcacagatataggcttttacaaacatttactaaataagcaaaaccatacaaaatatgttcccgtcggcaatttttcccataccatggactcaaatggttaaaactccttatcatcccagactaatgccaccttttcaattcccaataattccttccgtaacaagcatcattgctccaagaatctctcaactacattcaaacccgagtcttcagacccttggccctctgggacctccagagcctttgacagtgccacccaaggcagcagccagggcttctgctgggacagcccctcactcctccactctgactgtccccactgggcttctctggagcagaagccacgggcagaactgggcagactgcccagtgctgctgagtccagagaagcggcatctgaggggaggcggtggcagtgtggaccccacccttactgtattcacaggccccagctctccatcagccagcctgcccaggtctctgccaaagaagtcgctggtcaatcttcattctcatttttggcatacacctaggtcctttgaatggagctgccctctctctcagcctgttccatgttctttattttccccacttggtccctttctgtaacaaatgcagtgtgtagaatgagacagaccttccagtcagctctgggaaagaggagggagctgttcccccagaggggtcccctcagaaactgatcatcagggctgtgtagccttcaggtcccttcccagggccacgactcattttgctgctgaacaccacctgggactccctgctggggcttccaggaggccatttggtatcatggccccagtaccttgtgcctcacaaagcttgaagctctgtgttcctagtcacttcctggtgaatgctgttgtattagtccattttcatactgctatgaagagatacccagtaatttgaaaagaaaaagaggtttaatggactcatagttccacatggttagggaggcctcacaatcatggtgaaaggcaaaggaagagcaaaagcacatcttacatggcagcaggcaagagaacatgtgcaggggaaatgccctttataaaaccatcagatatcatgagactcactaccatgagtacagtatgggggaaacccacccccatgatccaattacctcccactgggtccctcccacaatgtggggattatgggagctataattcaagatgagatttgggtagggacacagccaaaccatatcagccgaaccttatcccatactggaaaatacacatatgtaaaatacagtgtgcagaccactgtttcagagaccaactggacaaagcccttctgatttaaaacggagtgaaaagaattttttaaaagagtataacaaagtgggcacttttatatacaattagagggactatgattagcaaattttctgtaggccagttaggcagtatttagcaagatcactaaaagatatttctacccttgatccaatgattgcacttataggtagatcacctgagaaaaatcagattccaaacacgattcacacagcgtcttcacttataatggtgaaaagtggaaacaatttgtctagtaatagtgtaatggatgatcccacatgaactattgcacagccattgatcatgtttttgaagaatatttaacagctttgaaaaatgtttactaaatctagtgaaaaaacattacattcaacatcatgattatgtaaaaatacatcagtacaggaagaaaatattggtagaatattaacagtggttttatgtgtatgatgggataaaaggttatcttttttattattatttttaaaatatcttctggccaggcatggtggctcatgcctgtaatcccagcactttgggaggccaaggtgggtggatcatttgaggtcaggagttcaatcaagaccagcctggccaacatggtgaaacccatctctaccaaaaatacaaaaattagccaggcatggtggcgggtgcctgtagtcccagctactcgggaggctgaggcaggagacttgcttgaccccgggaggcagagattgcagtgagccaagatcgcaccactgcactccagcctgggtgacagagtgaggctccatctcaaaacaacaacaaacaaaaacgtctaagttttctataattcatactaccattgtcaggaaaaaatatgtattagtttttaaagtaatgagtatatgatgggatttcatcaccaggtgacatcttgtcttgacccagtaatgagttcccagagcactgcaggtaaaatcagagtgggtgtgtcagtggtccttgacccaggctcaccttcgaatgagcttcagagcttcagaaacacaccagtgcccagcccgaagcacataagttgagctctgattgatctgtggcccagcaatgggtagttcttacagctccccaggtggttgtcttggcagctgtggtgaaaaccaatagcttcctccaccttcaggtctccattaagggtgggccttgcccttcacctcagtcaaaacccaccttcaaaaaagatctgagaaatcccctcactaatgtttccaatggcttgttgtatttggactggagcaaagcctttggctaaagagcacttcactcagtttaagatgtttcacactttcaaagctgcttgggagagacttttcctcctgacctcaaatcagagggcagctaatgacttatttgcaaataggtcctggcaggaggttacctcagacttctggtccttggtggagggcagggtaggagggaaacttgccatgagtttgtaagaaatgccaaagggagaacatgagcttgtctggacacagggaacaagcaagggagagatggactgactgctgtgacttccccgcaggtcccccggcagagggcagtagagatggccggcccaaggcctcggtggcgcgaccagctgctgttcatgagcatcatagtcctcgtgattgtggtcatctgcctgatgttatacgctcttctctgggaggctggcaacctcactgacctgcccaacctgagaatcggcttctataacttctgcctgtggaatgaggacaccagcaccctacagtgtcaccagttccctgagctggaagccctgggggtgcctcgggttggcctgggcctggccaggcttggcgtgtacgggtccctggtcctcaccctctttgccccccagcctctcctcctagcccagtgcaacagtgatgagagagcgtggcggctggcagtgggcttcctggctgtgtcctctgtgctgctggcaggcggcctgggcctcttcctctcctatgtgtggaagtgggtcaggctctccctcccggggcctgggtttctagctctgggcagcgcccaggccttactcatcctcttgcttatagccatggctgtgttccctctgagggctgagagggctgagagcaagcttgagagctgctaaaggcttacgtgattgcaagggttcagttccaaccatggtcagaggtggcacatctgctcagccatctcattttacagctaacgctgatctccagctccagcgatggaacccactacagaggaggtggggcccctgtgtcaaagaggccgaggggcagcaagggcagccagggcacctgtgacttcttagtacaagattgtctgtccttcaggacttccaaggctcccaaagactccctaaaccatgcagctcattgtcacaccaattcctgctttaattaatggatctgagcaaatcttcctctagcttcaggagggtggggagggagtgattgccgtcatggggccagacttccaggctgatttgccaaatgccaaaatgaaacctagcaaagaacttacggcaacaaacgaggacattaaaagagcgagcacctcagtgtctctggggacatggttaaggagcttccactcagcccaccatagtgagtgggccgccataagccatcactggaactccaaccccagaggtccaggagtgatctctgagtgactcaacaaagacaggacacatggggtacaaagacaaggcttgactgcttcaaagcttccctggacctgaagccagacagggcagaggcgtccgctgacaaatcactcccatgatgagaccctggaggactccaaatcctcgctgtgaacaggactggacggttgcgcacaaacaaacgctgccaccctccacttcccaacccagaacttggaaagacattagcacaacttacgcattggggaattgtgtgtattttctagcacttgtgtattggaaaacctgtatggcagtgatttattcatatattcctgtccaaagccacactgaaaacagaggcagagacatgtactctggtgtgatctcttgtcctcagtgtctcttctgggctcctgtccctcttgctttatagctagctgcccggggaccaaggtacaggtgaaagcaaggtagcagcttgcgggaggaggcctgtctggcttaccagtctatacactgtggcctcaacctcccagacagggcagagaactgtgggcagctcgtttgctttctaggctggctggagaggtgggagctcattgatagactcatgatggaaactatttttgaaacaggcttcctccttcaggagagatcatgcggactaaactgtagcaattccagtgcacctggcagtgatccttttctttgcaaagtactgtctctttggttccagtaagttggaccaccacatgacatcattttccctggaacctggtcactgactaacacagacaattgggactccagagcctcaagagccaggagagggcacagtacatacagagggagtcaaatgggatctcattttgagtcctgccttccgcacactcagaacggcagccccaaggcccggagtgtccaggggcttctggcctgaggtgaatctgccaggcccaagaaggcacaaagaagagtcagggcccaagcttaatgacctgttttttaattcaggaaggtaaatctcgttctctcgtcacacccggaattacaggtccatttgtcctcagtgggagttgatctttgattcccggaactttaagccctgccgtctcgcctggcgccca

SEQ ID NO: 286537 - DNA, 727 bp, Homo sapiens
ggctcagcgtggcgctgtcgcagcgcggccagctcggcctccaacgcgcggttctgcgtctccagctgatgcaccttctcgatgaacacggcgaagcggtcgttgaggccctgcagctgctccttctcgttggtgcggatgatcttgtactcgttggtgcgcgccgccgcctggctcaggtccagcccgtcggacgccggcggccggcgataggccaggccgaggccgagcgacgaggccgaggagcaggcggccgaggaggccacattgctgcgggacagcgactgcgagcggaagccgcccgcgccgccggccccagagaggcgggcggacaggcgagagccatccccgaacaccttgcggtaggaggaggaggagcacaggtagtgctccgagccgaagctcatggtgccgggatcggggccggacgtgcggcttcaacgcgagctacagaagaaaggagaggcttgagtgcagtggcaccaatctcggctcactgcaacctccgcctcctgggttccaagtggtcatcccgcctcagcctcccgaagtgctgggattacaggtgtgagccaccacacctggctgcgtaatgttttcaaggttcatccaagttgtagcatgtatcaaaactttatttatttatttctgagacagagtgttgctctgtcacccaggcaggagtgcgtggcatgatctcagctcactgccacctccacctcccaga

SEQ ID NO: 286538 - DNA, 1041 bp, Homo sapiens
gcgcgcgcgacgacctggggcgccgggacagggccatctgcatcggagtcgcccctttccgcagcgcttctccccaagaatcgactgcttcggaagtgactcgagcggaggggtgcctaaacgactgaggtttcccatccggaaaccacacagctctgtcgcatcccttgaccctatcccctcttctttaaccgactgggaggttaggggtttctgggaggtgtcccctacacccaccctcatcctgaggtgaggcgcacagaaagccttcccgagggcgaggtcgtgtttttccagttacagtgaggacctgcagagcgagcccttgtccccttcctcagggtccccaaggagaaaggtgggagatgctacgtcagaaagcatctctccagctgcccctctgcagctcctggggaggctccgggcggaaagatgttcagcaagtgcctctcccagaagagaggggagatcagtaaagaaagtgaccccgagctgcggagagtggggagaagcggcggtacagaggggaaaagaggccagacttggagaagcaggaggcgctgggaattgctggggctcatcgttagggcactaaagcatggcacaggccaggaccacaagctgctggaaagggggctgcagacttttgtgtttagagcattatattttaaaatatttcgaaaggagcatttttaaaccaggagatttcacctgtaaagaaattggatttctggcttcttctgaaaatgggaagagctgggatgcccacagtggcagaggcttgagtgcagtggcaccaatctcggctcactgcaacctccgcctcctgggttccaagtggtcatcccgcctcagcctcccgaagtgctgggattacaggtgtgagccaccacacctggctgcgtaatgttttcaaggttcatccaagttgtagcatgtatcaaaactttatttatttatttctgagacagagtgttgctctgtcacccaggcaggagtgcgtggcatgatctcagctcactgccacctccacctcccaga

SEQ ID NO: 286539 - DNA, 2180 bp, Homo sapiens
gcttccggcacgggatgttttcggttgtttgaccgagagagttgtaggcgcaaagctgaggaaaggagagtgtggagaggggcctggtgtggtggggcccggtgtttgggaccggagggtgttgacggctgatgagttccttgggtttgctctttcttcacctgaaaagaagactccaggaagggcagcacatgccggagaaagatgaattccagcttgaccgcccagaggcgcggcagtgacgccgagttgggaccctgggtgatggctgcgaggtccaaggacgcggcgccgtcccaacgcgacggacttttgcccgtgaaagtggaggaagactcacccggaagttgggagcccaactatcccgcggcttcgccggaccccgaaacttctcgactgcactttaggcagctgcgttaccaggaggtggctggaccggaagaggcgctgagccggctccgagaactctgtcgtcggtggctgagacccgagctgctctccaaggagcagatcctggagctgctggtgctggagcagttcctcaccatcctgcccgaggagcttcaagcctgggtgcgagagcactgcccagagagcggggaggaggcggtggccgtggtgcgggctctgcagcgagcgctcgatggaacctcatcccaggggatggtgactttcgaggacacggctgtgtctctaacctgggaggagtgggagcgcctggacccagcacggagggacttctgcagagagagtgcgcagaaggattccgggagcacagttccgccgagtttggaaagcagagtggagaacaaagagttgattccaatgcaacaaattttagaagaagcggagccacaggggcaactacaagaagcgttccaggggaagcgccccctgttttctaagtgtggcagtacccatgaggacagggtggaaaagcagtccggagaccccttgcccctgaaacttgaaaattctcctgaagcagaaggactcaacagcatctcagatgtcaataagaatggttccatagaaggggaagactctaaaaataatgaattgcagaacagtgccaggtgttccaaccttgttctatgtcagcacatcccgaaagcagagaggcccactgacagtgaggaacacgggaacaagtgcaagcaaagtttccacatggtgacgtggcacgtgctgaaacctcacaagtctgacagtggagacagtttccatcattccagcctttttgagacccagaggcagctccatgaagaaagaccttataaatgtggtaactgtgggaagagtttcaaacaacgctctgacctctttagacaccagagaatccacacaggtgagaaaccctatggctgccaagaatgtgggaaaagcttcagccagagtgctgccctgaccaagcaccagaggacacacacaggcgagaagccgtacacctgtctgaaatgtggggagcgcttcaggcagaattcacacctaaatcgtcatcaaagtacccacagtagagacaaacattttaaatgtgaggaatgcggggaaacctgtcatatttccaacctttttagacatcagagactacataaaggggaaagaccctataagtgtgaagaatgcgagaagagcttcaaacagcgctctgacctctttaaacaccacagaatccacactggggagaagccctatggatgttccgtctgtgggaaacgcttcaatcagagtgcaaccctcattaaacaccagagaattcacactggggaaaagccttacaaatgtcttgaatgtggggaaagatttagacaaagtacacaccttatccgacaccaaagaattcatcaaaataaagtgctgtcggctgggcgtggtggctcacgcctataatcccagcactttgggaggccaaggcaggcagatcatttgagatcaggagtttgaaaccagcctggccaacatggtaaaatcctgtctctactaaaaatacaaaaatgagccgggcatggtggtgcatgcctgtaagcccagctattcgggaggctgaggtaggagaatcacttgaacccaggaggcggaagttgcagtgagctgagatcatgccactgcactccagcctgggcaacagagcgagactccatctcaaaaaagaaataaagtgctgtcattttgatatgttt

SEQ ID NO: 286540 - DNA, 1232 bp, Homo sapiens
gcttccggcacgggatgttttcggttgtttgaccgagagagttgtaggcgcaaagctgaggaaaggagagtgtggagaggggcctggtgtggtggggcccggtgtttgggaccggagggtgttgacggctgatgagttccttgggtttgctctttcttcacctgaaaagaagactccaggaagggcagcacatgccggagaaagatgaattccagcttgaccgcccagaggcgcggcagtgacgccgagttgggaccctgggtgatggctgcgaggtccaaggacgcggcgccgtcccaacgcgacggacttttgcccgtgaaagtggaggaagactcacccggaagttgggagcccaactatcccgcggcttcgccggaccccgaaacttctcgactgcactttaggcagctgcgttaccaggaggtggctggaccggaagaggcgctgagccggctccgagaactctgtcgtcggtggctgagacccgagctgctctccaaggagcagatcctggagctgctggtgctggagcagttcctcaccatcctgcccgaggagcttcaagcctgggtgcgagagcactgcccagagagcggggaggaggcggtggccgtggtgcgggctctgcagcgagcgctcgatggaacctcatcccaggggatggtgactttcgaggacacggctgtgtctctaacctgggaggagtgggagcgcctggacccagcacggagggacttctgcagagagagtgcgcagaaggattccgggagcacagttccgccgagtgacactgtttatggaccgtaagagctgaccgctgtctgaaggcttgcccacagaccttacactcaaaaggattctctaaaaagtgaattctttgatgttgatcaaaccatgccttacgcctaatgacttttccacattcactgcattcataagactttgctcttgtgagaattcgctcatgccccaaaagcaaagatctttgattgaagggtttgccatcctcatcatatctgccctgcttccaccttgtttgcgcattctgatcttgaataaggttaaggttttgaaggaagcccctgctgtattcatcaccactagtagggaaagtaagcctgcaactgtccacaaattctttacacttatgtaacttttctgaaagtttctcagctgattcctgcattaccactgatatcttatatgactctaaatcttcagaaaatttc

SEQ ID NO: 286541 - DNA, 1091 bp, Homo sapiens
tggctcccatagaaaaaccctttgttacatttattgcttttcatggaaacaattacgtgatacacacttgaagtagaggtttataagttctagttctccaatgactgctttccaattaacatcatgtggatatctgtcctttgtgagtgccctggtgcttaataaagcttgtgtgccacttgaaagattttccacatatgacacattggtagggttggcttccagtgtgaatgacctgatgtcgaaaaagattcctcttaaaactaaacgttttcccacattctccacattgaaagaattcctcctttgtatggattctttgatgctgaatgagatccacattcctaccaaaggactgtccacattcactgcatttatgggtgttcggtttactgtgaatctgttgatgacatagaagggttgaatgccggccaaaggcttttccacactcaaggcatttatggcgtttttctccactatggatcacctgatgtcgaataagggttgaattctgactaaacgttttttcacatttgctacatttataaggtttttctttggtgtgaatcctcttatgttcaacaagatacgcgagctgccgaaaacactttccacagtcatgacatctgtatggcttgttttgcaggtgacactgtttatggaccgtaagagctgaccgctgtctgaaggcttgcccacagaccttacactcaaaaggattctctaaaaagtgaattctttgatgttgatcaaaccatgccttacgcctaatgacttttccacattcactgcattcataagactttgctcttgtgagaattcgctcatgccccaaaagcaaagatctttgattgaagggtttgccatcctcatcatatctgccctgcttccaccttgtttgcgcattctgatcttgaataaggttaaggttttgaaggaagcccctgctgtattcatcaccactagtagggaaagtaagcctgcaactgtccacaaattctttacacttatgtaacttttctgaaagtttctcagctgattcctgcattaccactgatatcttatatgactctaaatcttcagaaaatttc

SEQ ID NO: 286542 - DNA, 1975 bp, Homo sapiens
ggtgctctagaggatacccagttccttctctaaatttcaaaataaagctcctgggacaggcgtggtggctcacacctgcaatcccagcactttgggaggccaaggcaggtggatcacctgaggtcaggagtttgagaacagcctggccaacatgagtgagactccatctcaaaataaataaatagcaacagagtaatactctgtctcaaaataaataaatagggaggctgaggcgagcggatcatgaggtcaagagatagagaccatcctggccaacatggtgaaaccccatctctaataaaaatacaaaaattagctgggtgtggtggcgtgcacttgtaatgccagctacttgggaggctgaggtaggataatcagttgaactcgggaggcagaggttgcagtgaactgagatcggaccactgcactccagcctggtgacaaagcaagacaccgtctcaaaaaataaattaattaattaaaaagtaaaaggggtttgagggtttaacattctgccagcacttgcttatttctgtgttgcacagggatgcactggcaggaatttgtattttcacgtttcaggtttggaaagcagagtggagaacaaagagttgattccaatgcaacaaattttagaagaagcggagccacaggggcaactacaagaagcgttccaggggaagcgccccctgttttctaagtgtggcagtacccatgaggacagggtggaaaagcagtccggagaccccttgcccctgaaacttgaaaattctcctgaagcagaaggactcaacagcatctcagatgtcaataagaatggttccatagaaggggaagactctaaaaataatgaattgcagaacagtgccaggtgttccaaccttgttctatgtcagcacatcccgaaagcagagaggcccactgacagtgaggaacacgggaacaagtgcaagcaaagtttccacatggtgacgtggcacgtgctgaaacctcacaagtctgacagtggagacagtttccatcattccagcctttttgagacccagaggcagctccatgaagaaagaccttataaatgtggtaactgtgggaagagtttcaaacaacgctctgacctctttagacaccagagaatccacacaggtgagaaaccctatggctgccaagaatgtgggaaaagcttcagccagagtgctgccctgaccaagcaccagaggacacacacaggcgagaagccgtacacctgtctgaaatgtggggagcgcttcaggcagaattcacacctaaatcgtcatcaaagtacccacagtagagacaaacattttaaatgtgaggaatgcggggaaacctgtcatatttccaacctttttagacatcagagactacataaaggggaaagaccctataagtgtgaagaatgcgagaagagcttcaaacagcgctctgacctctttaaacaccacagaatccacactggggagaagccctatggatgttccgtctgtgggaaacgcttcaatcagagtgcaaccctcattaaacaccagagaattcacactggggaaaagccttacaaatgtcttgaatgtggggaaagatttagacaaagtacacaccttatccgacaccaaagaattcatcaaaataaagtgctgtcggctgggcgtggtggctcacgcctataatcccagcactttgggaggccaaggcaggcagatcatttgagatcaggagtttgaaaccagcctggccaacatggtaaaatcctgtctctactaaaaatacaaaaatgagccgggcatggtggtgcatgcctgtaagcccagctattcgggaggctgaggtaggagaatcacttgaacccaggaggcggaagttgcagtgagctgagatcatgccactgcactccagcctgggcaacagagcgagactccatctcaaaaaagaaataaagtgctgtcattttgatatgttt

SEQ ID NO: 286543 - DNA, 803 bp, Homo sapiens
  misc_feature (69)..(69): n is a, c, g, or t
tcccccgttcacctactattcctaaattctcgcccgcgtcgaccaaatgtgaaaaaacgtttagtcagnattcaacccttattcgacatcaggtgttcggtttactgtgaatctgttgatgacatagaagggttgaatgccggccaaaggcttttccacactcaaggcatttatggcgtttttctccactatggatcacctgatgtcgaataagggttgaattctgactaaacgttttttcacatttgctacatttataaggtttttctttggtgtgaatcctcttatgttcaacaagatacgcgagctgccgaaaacactttccacagtcatgacatctgtatggcttgttttgcaggtgacactgtttatggaccgtaagagctgaccgctgtctgaaggcttgcccacagaccttacactcaaaaggattctctaaaaagtgaattctttgatgttgatcaaaccatgccttacgcctaatgacttttccacattcactgcattcataagactttgctcttgtgagaattcgctcatgccccaaaagcaaagatctttgattgaagggtttgccatcctcatcatatctgccctgcttccaccttgtttgcgcattctgatcttgaataaggttaaggttttgaaggaagcccctgctgtattcatcaccactagtagggaaagtaagcctgcaactgtccacaaattctttacacttatgtaacttttctgaaagtttctcagctgattcctgcattaccactgatatcttatatgactctaaatcttcagaaaatttc

SEQ ID NO: 286544 - DNA, 2053 bp, Homo sapiens
gcttccggcacgggatgttttcggttgtttgaccgagagagttgtaggcgcaaagctgaggaaaggagagtgtggagaggggcctggtgtggtggggcccggtgtttgggaccggagggtgttgacggctgatgagttccttgggtttgctctttcttcacctgaaaagaagactccaggaagggcagcacatgccggagaaagatgaattccagcttgaccgcccagaggcgcggcagtgacgccgagttgggaccctgggtgatggctgcgaggtccaaggacgcggcgccgtcccaacgcgacggacttttgcccgtgaaagtggaggaagactcacccggaagttgggagcccaactatcccgcggcttcgccggaccccgaaacttctcgactgcactttaggcagctgcgttaccaggaggtggctggaccggaagaggcgctgagccggctccgagaactctgtcgtcggtggctgagacccgagctgctctccaaggagcagatcctggagctgctggtgctggagcagttcctcaccatcctgcccgaggagcttcaagcctgggtgcgagagcactgcccagagagcggggaggaggcggtggccgtggtgcgggctctgcagcgagcgctcgatggaacctcatcccaggtttggaaagcagagtggagaacaaagagttgattccaatgcaacaaattttagaagaagcggagccacaggggcaactacaagaagcgttccaggggaagcgccccctgttttctaagtgtggcagtacccatgaggacagggtggaaaagcagtccggagaccccttgcccctgaaacttgaaaattctcctgaagcagaaggactcaacagcatctcagatgtcaataagaatggttccatagaaggggaagactctaaaaataatgaattgcagaacagtgccaggtgttccaaccttgttctatgtcagcacatcccgaaagcagagaggcccactgacagtgaggaacacgggaacaagtgcaagcaaagtttccacatggtgacgtggcacgtgctgaaacctcacaagtctgacagtggagacagtttccatcattccagcctttttgagacccagaggcagctccatgaagaaagaccttataaatgtggtaactgtgggaagagtttcaaacaacgctctgacctctttagacaccagagaatccacacaggtgagaaaccctatggctgccaagaatgtgggaaaagcttcagccagagtgctgccctgaccaagcaccagaggacacacacaggcgagaagccgtacacctgtctgaaatgtggggagcgcttcaggcagaattcacacctaaatcgtcatcaaagtacccacagtagagacaaacattttaaatgtgaggaatgcggggaaacctgtcatatttccaacctttttagacatcagagactacataaaggggaaagaccctataagtgtgaagaatgcgagaagagcttcaaacagcgctctgacctctttaaacaccacagaatccacactggggagaagccctatggatgttccgtctgtgggaaacgcttcaatcagagtgcaaccctcattaaacaccagagaattcacactggggaaaagccttacaaatgtcttgaatgtggggaaagatttagacaaagtacacaccttatccgacaccaaagaattcatcaaaataaagtgctgtcggctgggcgtggtggctcacgcctataatcccagcactttgggaggccaaggcaggcagatcatttgagatcaggagtttgaaaccagcctggccaacatggtaaaatcctgtctctactaaaaatacaaaaatgagccgggcatggtggtgcatgcctgtaagcccagctattcgggaggctgaggtaggagaatcacttgaacccaggaggcggaagttgcagtgagctgagatcatgccactgcactccagcctgggcaacagagcgagactccatctcaaaaaagaaataaagtgctgtcattttgatatgttt

SEQ ID NO: 286545 - DNA, 1027 bp, Homo sapiens
gcttccggcacgggatgttttcggttgtttgaccgagagagttgtaggcgcaaagctgaggaaaggagagtgtggagaggggcctggtgtggtggggcccggtgtttgggaccggagggtgttgacggctgatgagttccttgggtttgctctttcttcacctgaaaagaagactccaggaagggcagcacatgccggagaaagatgaattccagcttgaccgcccagaggcgcggcagtgacgccgagttgggaccctgggtgatggctgcgaggtccaaggacgcggcgccgtcccaacgcgacggacttttgcccgtgaaagtggaggaagactcacccggaagttgggagcccaactatcccgcggcttcgccggaccccgaaacttctcgactgcactttaggcagctgcgttaccaggaggtggctggaccggaagaggcgctgagccggctccgagaactctgtcgtcggtggctgagacccgagctgctctccaaggagcagatcctggagctgctggtgctggagcagttcctcaccatcctgcccgaggagcttcaagcctgggtgcgagagcactgcccagagagcggggaggaggcggtggccgtggtgcgggctctgcagcgagcgctcgatggaacctcatcccaggggatggtgactttcgaggacacggctgtgtctctaacctgggaggagtgggagcgcctggacccagcacggagggacttctgcagagagagtgcgcagaaggattccgggagcacagttccgccgagtgagtgctgttgctctgctggtttattgcggtgtgtggtttgtgaagggctggttcactaccatccctgagccactatgccattcccagacttgggctgagagccttcaggtgccttctgtaacgcaagcaggagcctctgtactgctaggtgctagattcagctttttactttggttcatttttaatgttttatacatacagaaaactatataaaaaaaagataatgaccatcccctg

SEQ ID NO: 286546 - DNA, 2029 bp, Homo sapiens
  misc_feature (5)..(5): n is a, c, g, or t
  misc_feature (43)..(43): n is a, c, g, or t
ccganaagcgcaaccaacccaaaaaaaaaacccaacccccacngaccacactggggagaagccctatggatgttccgtctgtgggaaacgcttcattcagagtgcaaccctcattaaacaccagagaattcacactggggaaaagccttacaaatgtcttgaatgtggggaaagatttagacaaagtacacaccttatccgacaccaaagaattcatcaaaataaagtgctgtcggccgggcatgtggcttacgcctgtaatcccaccactttggaaggcagagccaggagtatcacctgaggtcaggagtttaagaccagcctggccaacatggcgaaaccctgtctctactaaaaatacaaaaattagctgggcatggtggtgcatgtctgtaatcccagctactcgggaggctgaggcaggagaatcacttgaacccaggaagctgaggttgcagtgaactgagatcggaccactgcactccagcctggtgacaaagcaagacaccgtctcaaaaaataaattaattaattaaaaagtaaaaggggtttgagggtttaacattctgccagcacttgcttatttctgtgttgcacagggatgcactggcaggaatttgtattttcacgtttcaggtttggaaagcagagtggagaacaaagagttgattccaatgcaacaaattttagaagaagcggagccacaggggcaactacaagaagcgttccaggggaagcgccccctgttttctaagtgtggcagtacccatgaggacagggtggaaaagcagtccggagaccccttgcccctgaaacttgaaaattctcctgaagcagaaggactcaacagcatctcagatgtcaataagaatggttccatagaaggggaagactctaaaaataatgaattgcagaacagtgccaggtgttccaaccttgttctatgtcagcacatcccgaaagcagagaggcccactgacagtgaggaacacgggaacaagtgcaagcaaagtttccacatggtgacgtggcacgtgctgaaacctcacaagtctgacagtggagacagtttccatcattccagcctttttgagacccagaggcagctccatgaagaaagaccttataaatgtggtaactgtgggaagagtttcaaacaacgctctgacctctttagacaccagagaatccacacaggtgagaaaccctatggctgccaagaatgtgggaaaagcttcagccagagtgctgccctgaccaagcaccagaggacacacacaggcgagaagccgtacacctgtctgaaatgtggggagcgcttcaggcagaattcacacctaaatcgtcatcaaagtacccacagtagagacaaacattttaaatgtgaggaatgcggggaaacctgtcatatttccaacctttttagacatcagagactacataaaggggaaagaccctataagtgtgaagaatgcgagaagagcttcaaacagcgctctgacctctttaaacaccacagaatccacactggggagaagccctatggatgttccgtctgtgggaaacgcttcaatcagagtgcaaccctcattaaacaccagagaattcacactggggaaaagccttacaaatgtcttgaatgtggggaaagatttagacaaagtacacaccttatccgacaccaaagaattcatcaaaataaagtgctgtcggctgggcgtggtggctcacgcctataatcccagcactttgggaggccaaggcaggcagatcatttgagatcaggagtttgaaaccagcctggccaacatggtaaaatcctgtctctactaaaaatacaaaaatgagccgggcatggtggtgcatgcctgtaagcccagctattcgggaggctgaggtaggagaatcacttgaacccaggaggcggaagttgcagtgagctgagatcatgccactgcactccagcctgggcaacagagcgagactccatctcaaaaaagaaataaagtgctgtcattttgatatgttt

SEQ ID NO: 286547 - DNA, 1032 bp, Homo sapiens
  misc_feature (454)..(454): n is a, c, g, or t
tgcggtcagaggccacagaggtgacttacccgagccccacacctggtgtcacagtggagtggagcctggctccttggccctgagttcagcccccatcacagctgccgaattcacagtcagtgctcaacacgtgttcacgtgtttggaggacgaaccaaacccgagttctcggggctccccagccagcatgaagaccgtgtaaccacagcacgcatgggcgggccgcttggcaatggccaggctcatgctctactgagcccctgggggtcacgactcccctgctgctctgtgcagagaaagaaaaggcagtcacctctctcttccctcactggaagacctggtgagcaggaagtacaggatcgttttgaattcagcagattttgaataatgccagatcaggagtggatctctggggtaagatgcaatggtcccacacacttatatgtcaccagangtccactctttggggaacagcaatttgacggaacatgtcaagagcttgtgaaaataagtaattcacattcgacctgttacccagaaaaaaaccggggttcattcacctggtgaatctcaaacggctctccacgagaacgcaggtttggatcagtaggagttttatgactcgccacagtccttggagggactctctggaatttccttatctgacctagaaagtgtcttgccaaaagaaacacatttgccttctgtccgtctgataccccattatccactgcagaaaagaagccggaagaaaagaagtcagaagtccaaccacagctggatggacttttccacaacataatgtctgcctctcagactcattccattcacaagttgatttctgtctccctgatccattcattctccttaataatcatttactgctcctcaaaacaatgctctatgtttcccatctcctcgctcccctgggaaaaagagtacataagcttctgtaccccattgggggattggggtaatcacactgtaattctctcccatgaatgttaataaatgtgtatcctttttctccta

SEQ ID NO: 286548 - DNA, 751 bp, Homo sapiens
  misc_feature (454)..(454): n is a, c, g, or t
tgcggtcagaggccacagaggtgacttacccgagccccacacctggtgtcacagtggagtggagcctggctccttggccctgagttcagcccccatcacagctgccgaattcacagtcagtgctcaacacgtgttcacgtgtttggaggacgaaccaaacccgagttctcggggctccccagccagcatgaagaccgtgtaaccacagcacgcatgggcgggccgcttggcaatggccaggctcatgctctactgagcccctgggggtcacgactcccctgctgctctgtgcagagaaagaaaaggcagtcacctctctcttccctcactggaagacctggtgagcaggaagtacaggatcgttttgaattcagcagattttgaataatgccagatcaggagtggatctctggggtaagatgcaatggtcccacacacttatatgtcaccagangtccactctttggggaacagcaatttgacggaacatgtcaagagcttgtgaaaataagtaattcacattcgacctgttacccagaaaaaaaccggggttcattcacctggtgaatctcaaacggctctccacgagaacgcaggtttggatcagtaggagttttatgactcgccacaggtaagaagagccctgggaggattctccaaagcagtgtctccctgagggaaagtgacaggagggttttatgcagtgatggaggggacgaggggccccgctgctgcagacgcagggcaccat

SEQ ID NO: 286549 - DNA, 6841 bp, Homo sapiens
  misc_feature (3371)..(3371): n is a, c, g, or t
ccgcgcgccatccgccaccctactggacacgggcgagagcgtcgccgccgtagcctccggagaagacaagggcatcgccgcctcagccgccgccgccgccgttttcgcctgcagctgctcaccggatcctcagtcttccacaatgaaccctgtttacagccccgtgcagcctggggctccttatggcaaccctaagaacatggcctacacgggttaccccacagcctatccagcagctgcccctgcctacaatcccagcctgtaccccaccaatagtcccagttatgctccagagtttcagttcctgcattcagcttatgcaactctgctgatgaaacaggcctggccacagaactcgtcttcctgtggcactgaaggcaccttccacctcccagtggacaccgggaccgagaaccgaacttaccaagcatcctctgcggctttcagatatactgcggggacaccatacaaggtcccaccgacccagagtaacactgctccacccccctactccccatcacccaacccctatcagacggccatgtatccaatcagaagtgcctacccccagcagaatctgtatgcccagggagcctactacacacagccggtgtatgctgcccagcctcatgtcatccaccataccacggtcgtccagcccaacagcattccctctgctatctacccagcacctgttgccgccccgaggaccaacggtgtggccatgggcatggtggcaggcaccaccatggcaatgtcagcaggtaccctgctgactacaccccagcacacggcgattggggcacaccctgtctccatgccaacatatagggcccaaggaacccctgcgtacagctacgtgcccccacactggtaaagcctgcagcccatccaaatctggagtcacacattgtatgcaactactcaagtcttacaccggtgctggagcagttccctagcagcaccacctctatttgcaagaagagacaacggaagtgcaagggtcactttatgcatctttaatggttttgatttttatttttggtttttgtaaaagctgctttttctaatctcctgcctctccccaactgtccccctcttagcccctgcccttccagctctatccccttcctcctacctgaccaggccatgtcctctctgctcttccctaagtgtcctgtccctggggatcccagtctagaggcaagcagagagtagggtttattgcagtggttcatctgaaggctggattccatttgaagagcataaacagatgtggtccagggtaggaactcagagctgttgagcaggctacatctctaggggagtgttctggttgttttttcttaagcaagattagttcaggacattcccatgtcccagacacaaatgaaatgtctcctgagaaccattgcaacagaccaagaacaaaaccacctgagtatgtaggcgtgttattagcagcttaataccccaggctgagaacctggggaaaaaagtctttagaatttgggggagggtggggggagggagggcattgtggggaaggagagggaagaagggaggagcggtgcttgcctcatggctttggtttgaaaggtctctggccaaagcatctggccctggaccttctgatttgcacagtgatgttaactgacctggcacttcctcaaaaggtgattttgtccttagacctgccaagcggctgcagggtggtaggatcccagcatcccgaggccttggaaggccggatgccctgtgtcatccagacttcagcctctgagctgtcatggacccactctgatgaggagcttcctcctgattggagtgggaacctagggcatttctctcccttttcttttgcccttcccagtgccaggactcacctgtctgaccatagagcttgcaggcaggccaagctcttggttacctgtgccattcatggcccaagtgaaggaaccacattccaggtgggtgctggcagctctgaaggtgaggatagtgaaggaaaagcaatagcaataaacatttcatagactcatggaactgaagggaccttagcaatcatctcatccatttccctatttggcagatgaggaaactgaggcccagagaagcggaaaggacttccctagaccttacagtaaattagcattaaatgcagccttcctacctagtgggcaccttgcttacaaaaatttacctagggacggattggcttggttttgtaaaaattaagtcggcagcgcccatacctggtgagtctggaatggtctctgggctcctgtttctgctcttttcctccacggactccaaaggcgggggttgaagactgggcagaggctacatgggggcggatggcaggaacagaaattgcaaatgaagaaatagcatttggaaattctgtgaagacatctggaacttccgtcctgtacctgactccacctccaggagaaggagcaggtggactggccgaaaaggagaggccatgcttttaggacagtagcccctcatcccgagaggagaggaagaggaggaagacagtgggagtcatcaggagaggagaatgaggatgaggcccaggagacaggctcatctgggagaagagggacccctgggacgaggaggtccctgctagtctcagccaggagcctggattgcccagcagcagcctccggcacccagcgcttggctgggccagcagcccctctgggggtggggcacgaacattttattgtaaaaaatgggatcattgacaacatttgggactttaaaaaactgctttcatttaaaattcatgcaaacttggacatatccttaccccaacctcccatgtctccctaagggagggaaaaatcaggaaacccttgggttggaaggagctcagaagctgtctagccattcccaggagggtaaagcccatcagcctccttggcctagagccaggagtttgggggcccaccttcctgggcttccaaggaactttaggaccagtaagaaaaaattcagctgttctaaattatctgttctgggtgctgatgaggtttcactttaaaacaatagaaagttttccagtgttaattcactttttgcaaatacctccttccaccctctttggttttgtaaaggtgggtgaaggttgttctagattatgtcatacgtgtttgaaaaatgccaaaataataataatgataataataatagaaacctttggatttgtcaggtgcatcacagaggtcaaagcacttcacggcctttcatgtactcgccctgagagggacagggttagagttattacagtcaattgacaaatgaggaaacaggttatggaagggaacaggcccacagtgagcagcatgctggtatccgcnaggcttcccagaaccctgctgcctccatgtgggctggggtggaaccacagagaggagaaaggaagaagaggagacctaggaatgaccttgtaacttttgttctttcaacaccagtaagtaaaactaacagctggacctcacagttcacagaacagttgaacataaattatctggtttaacccgatgaaatagaggttatttctcctatttgatccataaggaaatcaaggcttggaaaagtcaagtgacttgctaataagtgacagagccactcgaatcccaggctgtctgctgtctcgttcccctccatctgatccccacacaggctcacgtactgaagcatctgtgctctgtgccctatcttagcacctactatgtaattcaagagcaaaggggggccccaaggtgaaaataaggcactgaaaggctgtggtctggaagagcccaggtccagcacccctttttcagtatgagccccagttcagccggcctcagcctcttgctgtgatggagatccacaagcctagccaagcttggggagtcactgcaaaaggactgagcccaggagagcggggacagtcatgtgcctctggtaggatgggcacagttactggtaaggtcacagagatctagtgggaggtaccataggtagatacctccaaagattctagatggcacggtggtcaagctagacaaaaagtcagagctggaagggccgtctcattgaaggcaggcaagcaagagaggacaagggatgtagccgcctgacagtgagctacagcactggccccaggatgcaaacccctctctcctcctcatgccactgcctctccccaagtgcaacacctatggccaggatcaggggtacagatggctcgttaccagccaacccttttgaattcttctacttctacctgaccccctctcctcactggcctggggtcaagaagtttgagtctgggagctggattgcctgcaaatagtgaaagcctgaaacataatggtttgccatgttttgaaaaaaaatgcatatttaatttcttcctcatgagataggacagttgctgttctttcttacctggcaatgaccctaaaatgtatatcctctttcctgaatatttagcagagacacacacacctgtccagagcgtttttggtatgcaaagtactttgacattggttgccaaagtcctccattttatagatgaaaaaactaaggctcaggaggcttgagacttgctaaaaggtcacacagcttggaagtgattcttcaaatcctctgctctttctgctgccacctgctgggtctcttggcaagcatggagggaggggctaactgtactttatagagctgggaagcccagtctctgagctgagcagatttgtatgaactgctttgggccaggacctgtaatgagccctggggagggacccagaggcacatctaactggcagcacaaggaggatgagaatttgcaactaaaggcctcacttggacaaaacactttggggtcacaatgcccaggaccgaagacatgttcaaggacagcacgaggcatctttctattgggagacccatgtccttggtaagcctgcacacctggcttcctaatccctgagagcctgcccactgtccagatccagtgagttggtacaaaacgtacagactgaagtccctgggcttgcttttcccatgggtgaggaccagaaccagactctgagcatccttacccctggccacccgaattgttccaagtttgaggtaccccgttcccagagatctgggggtccttctttggagggcttgctttgttctgatggccttcagaaaggaatcacatgaagtataaaaggacaggccccttggtcaccaagttttggctcctcatacagataggactcatccaggttcccagcgaggcactgactaagcgaggctcagagcttccatatcaaattcctcagctttgttctgtgcccagagggggtgggccccattctgggccctgtgaactttgtcttatatatcaccatctgtatcagaattcctcctcaattgcagttaagtgaaaatacgtggaagtctgcttttccatcctgtattctcccacatcactactggctgtgcggcccccgctgcttgccaagcttgggaatccagagaggggcagtagtagagtgggccagttgggacccacccgcagagctgaagaaacacgccagactaactgatgggattccacaccggagcctctgagcgcacaggcaggcatgccaagggggctgcagggtttgtcctttacttatctgcccctttcctagaaaactcctcgtttctgaaattaggcattatatggttccaggacccagccttcaaaattcctggcaggccagcttcaacattccatggccagccctgcctaagccagacttgggtcccagtccctcagtctctccagtggatatcttctgtggtgcatgctgttgagtccaacccaaaggccaaccgaggcacacaggagttgggactggctgccacaaagctagaaagggacaaaacagcacttgcttccctatggccacatggatagtccctggatatccttgctgtggtagaggtcctctacccattccagccactgatagcagggggattttccttcctaaggagaacagatgtaacagctttgcaaagtaccggcccataggaatcaaatgggtgagatcagctttgggcctgaccccagcaagaccagcatctccagaccccagcctttctcctcaggcctaagagagtcagggaaagagaggagactgtcccagagaccttctcctcgggtcagccagatagtctggatctatggtgtgactcaagctcctccttacccagggggggtaaggccaggcctctagctacttggagttgtctgtaataatcttgaaaggcccaagggcctgtccccatcctgacttaaaggcatctgcttccctgtttcatatcacatgacagagaaacctgttctcatggcatgtaacatccctgtgaagagagcgttgtatatgattttgtattttttaattcattttaatctacaggttggaatctaatttttaaattttattggaactcacattttaaaaagaaataaaatttaaaataataataataataataataataataataaacctttgaccagtgtcttccaagtagtttgatcaaagaatttataggtgttttcaaaacacagtccggagtgtaaagattggaaagccccatggccttgcctgtgtgtatgaagtgtaaatctggttttgttttgttgttttggattcttttgggtttttgttttgttttgaagatcagacagtgatcactctgaaagattgaagccaagaatttgtaactatggtatttactgtaagctgtagaacactcaataactattaaaaaaaaaaattccccccca

SEQ ID NO: 286550 - DNA, 584 bp, Homo sapiens
  misc_feature (8)..(8): n is a, c, g, or t
gcgccctnacgtcaacccagtcaaccatctcagaaaggctgaccatcccatgtgtctgaacaggccccttgggttgggtgtttctgtccagcacaaggcccttgctttgtgtctgtgattggtggtggccacttcttatttctgtctaatgccattcttgtgtcttcccttaagcaactctgctgatgaaacaggcctggccacagaactcgtcttcctgtggcactgaaggcaccttccacctcccagtggacaccgggaccgagaaccgaacttaccaagcatcctctgcggctttcagtaaatacagcctgtctcatttccttgttccccttggttgggactgatttgtttcttaggaagaaaggaaagggagctttttaaaatgacatttatgagataaataatgttttaagaggttcttttacccaggcagaaaattacccctccttattcaggaaaggtcattctctttgatcatgcactcagctttggggaaacacaaaccactgagggaaggagaaggaaatactcacctggccaacaatttgattgggttgacgtcaggggtaccgagactcaat

SEQ ID NO: 286551 - DNA, 5793 bp, Homo sapiens
  misc_feature (2584)..(2584): n is a, c, g, or t
aggcgggaggcaggcagcttcactaggaaggcacagcgggctcccgagttgaggggagaagcctcctgaatatcactgacactgtttctttcccctttccctctgcagatctggagtcacacattgtatgcaactactcaagtcttacaccggtgctggagcagttccctagcagcaccacctctatttgcaagaagagacaacggaagtgcaagggtcactttatgcatctttaatggttttgatttttatttttggtttttgtaaaagctgctttttctaatctcctgcctctccccaactgtccccctcttagcccctgcccttccagctctatccccttcctcctacctgaccaggccatgtcctctctgctcttccctaagtgtcctgtccctggggatcccagtctagaggcaagcagagagtagggtttattgcagtggttcatctgaaggctggattccatttgaagagcataaacagatgtggtccagggtaggaactcagagctgttgagcaggctacatctctaggggagtgttctggttgttttttcttaagcaagattagttcaggacattcccatgtcccagacacaaatgaaatgtctcctgagaaccattgcaacagaccaagaacaaaaccacctgagtatgtaggcgtgttattagcagcttaataccccaggctgagaacctggggaaaaaagtctttagaatttgggggagggtggggggagggagggcattgtggggaaggagagggaagaagggaggagcggtgcttgcctcatggctttggtttgaaaggtctctggccaaagcatctggccctggaccttctgatttgcacagtgatgttaactgacctggcacttcctcaaaaggtgattttgtccttagacctgccaagcggctgcagggtggtaggatcccagcatcccgaggccttggaaggccggatgccctgtgtcatccagacttcagcctctgagctgtcatggacccactctgatgaggagcttcctcctgattggagtgggaacctagggcatttctctcccttttcttttgcccttcccagtgccaggactcacctgtctgaccatagagcttgcaggcaggccaagctcttggttacctgtgccattcatggcccaagtgaaggaaccacattccaggtgggtgctggcagctctgaaggtgaggatagtgaaggaaaagcaatagcaataaacatttcatagactcatggaactgaagggaccttagcaatcatctcatccatttccctatttggcagatgaggaaactgaggcccagagaagcggaaaggacttccctagaccttacagtaaattagcattaaatgcagccttcctacctagtgggcaccttgcttacaaaaatttacctagggacggattggcttggttttgtaaaaattaagtcggcagcgcccatacctggtgagtctggaatggtctctgggctcctgtttctgctcttttcctccacggactccaaaggcgggggttgaagactgggcagaggctacatgggggcggatggcaggaacagaaattgcaaatgaagaaatagcatttggaaattctgtgaagacatctggaacttccgtcctgtacctgactccacctccaggagaaggagcaggtggactggccgaaaaggagaggccatgcttttaggacagtagcccctcatcccgagaggagaggaagaggaggaagacagtgggagtcatcaggagaggagaatgaggatgaggcccaggagacaggctcatctgggagaagagggacccctgggacgaggaggtccctgctagtctcagccaggagcctggattgcccagcagcagcctccggcacccagcgcttggctgggccagcagcccctctgggggtggggcacgaacattttattgtaaaaaatgggatcattgacaacatttgggactttaaaaaactgctttcatttaaaattcatgcaaacttggacatatccttaccccaacctcccatgtctccctaagggagggaaaaatcaggaaacccttgggttggaaggagctcagaagctgtctagccattcccaggagggtaaagcccatcagcctccttggcctagagccaggagtttgggggcccaccttcctgggcttccaaggaactttaggaccagtaagaaaaaattcagctgttctaaattatctgttctgggtgctgatgaggtttcactttaaaacaatagaaagttttccagtgttaattcactttttgcaaatacctccttccaccctctttggttttgtaaaggtgggtgaaggttgttctagattatgtcatacgtgtttgaaaaatgccaaaataataataatgataataataatagaaacctttggatttgtcaggtgcatcacagaggtcaaagcacttcacggcctttcatgtactcgccctgagagggacagggttagagttattacagtcaattgacaaatgaggaaacaggttatggaagggaacaggcccacagtgagcagcatgctggtatccgcnaggcttcccagaaccctgctgcctccatgtgggctggggtggaaccacagagaggagaaaggaagaagaggagacctaggaatgaccttgtaacttttgttctttcaacaccagtaagtaaaactaacagctggacctcacagttcacagaacagttgaacataaattatctggtttaacccgatgaaatagaggttatttctcctatttgatccataaggaaatcaaggcttggaaaagtcaagtgacttgctaataagtgacagagccactcgaatcccaggctgtctgctgtctcgttcccctccatctgatccccacacaggctcacgtactgaagcatctgtgctctgtgccctatcttagcacctactatgtaattcaagagcaaaggggggccccaaggtgaaaataaggcactgaaaggctgtggtctggaagagcccaggtccagcacccctttttcagtatgagccccagttcagccggcctcagcctcttgctgtgatggagatccacaagcctagccaagcttggggagtcactgcaaaaggactgagcccaggagagcggggacagtcatgtgcctctggtaggatgggcacagttactggtaaggtcacagagatctagtgggaggtaccataggtagatacctccaaagattctagatggcacggtggtcaagctagacaaaaagtcagagctggaagggccgtctcattgaaggcaggcaagcaagagaggacaagggatgtagccgcctgacagtgagctacagcactggccccaggatgcaaacccctctctcctcctcatgccactgcctctccccaagtgcaacacctatggccaggatcaggggtacagatggctcgttaccagccaacccttttgaattcttctacttctacctgaccccctctcctcactggcctggggtcaagaagtttgagtctgggagctggattgcctgcaaatagtgaaagcctgaaacataatggtttgccatgttttgaaaaaaaatgcatatttaatttcttcctcatgagataggacagttgctgttctttcttacctggcaatgaccctaaaatgtatatcctctttcctgaatatttagcagagacacacacacctgtccagagcgtttttggtatgcaaagtactttgacattggttgccaaagtcctccattttatagatgaaaaaactaaggctcaggaggcttgagacttgctaaaaggtcacacagcttggaagtgattcttcaaatcctctgctctttctgctgccacctgctgggtctcttggcaagcatggagggaggggctaactgtactttatagagctgggaagcccagtctctgagctgagcagatttgtatgaactgctttgggccaggacctgtaatgagccctggggagggacccagaggcacatctaactggcagcacaaggaggatgagaatttgcaactaaaggcctcacttggacaaaacactttggggtcacaatgcccaggaccgaagacatgttcaaggacagcacgaggcatctttctattgggagacccatgtccttggtaagcctgcacacctggcttcctaatccctgagagcctgcccactgtccagatccagtgagttggtacaaaacgtacagactgaagtccctgggcttgcttttcccatgggtgaggaccagaaccagactctgagcatccttacccctggccacccgaattgttccaagtttgaggtaccccgttcccagagatctgggggtccttctttggagggcttgctttgttctgatggccttcagaaaggaatcacatgaagtataaaaggacaggccccttggtcaccaagttttggctcctcatacagataggactcatccaggttcccagcgaggcactgactaagcgaggctcagagcttccatatcaaattcctcagctttgttctgtgcccagagggggtgggccccattctgggccctgtgaactttgtcttatatatcaccatctgtatcagaattcctcctcaattgcagttaagtgaaaatacgtggaagtctgcttttccatcctgtattctcccacatcactactggctgtgcggcccccgctgcttgccaagcttgggaatccagagaggggcagtagtagagtgggccagttgggacccacccgcagagctgaagaaacacgccagactaactgatgggattccacaccggagcctctgagcgcacaggcaggcatgccaagggggctgcagggtttgtcctttacttatctgcccctttcctagaaaactcctcgtttctgaaattaggcattatatggttccaggacccagccttcaaaattcctggcaggccagcttcaacattccatggccagccctgcctaagccagacttgggtcccagtccctcagtctctccagtggatatcttctgtggtgcatgctgttgagtccaacccaaaggccaaccgaggcacacaggagttgggactggctgccacaaagctagaaagggacaaaacagcacttgcttccctatggccacatggatagtccctggatatccttgctgtggtagaggtcctctacccattccagccactgatagcagggggattttccttcctaaggagaacagatgtaacagctttgcaaagtaccggcccataggaatcaaatgggtgagatcagctttgggcctgaccccagcaagaccagcatctccagaccccagcctttctcctcaggcctaagagagtcagggaaagagaggagactgtcccagagaccttctcctcgggtcagccagatagtctggatctatggtgtgactcaagctcctccttacccagggggggtaaggccaggcctctagctacttggagttgtctgtaataatcttgaaaggcccaagggcctgtccccatcctgacttaaaggcatctgcttccctgtttcatatcacatgacagagaaacctgttctcatggcatgtaacatccctgtgaagagagcgttgtatatgattttgtattttttaattcattttaatctacaggttggaatctaatttttaaattttattggaactcacattttaaaaagaaataaaatttaaaataataataataataataataataataataaacctttgaccagtgtcttcca

SEQ ID NO: 286552 - DNA, 5129 bp, Homo sapiens
  misc_feature (1920)..(1920): n is a, c, g, or t
ccgcgcgccatccgccaccctactggacacgggcgagagcgtcgccgccgtagcctccggagaagacaagggcatcgccgcctcagccgccgccgccgccgttttcgcctgcagctgctcaccggatcctcagtcttccacaatgaaccctgtttacagccccgtgcagcctggggctccttatggcaaccctaagaacatggcctacacgggttaccccacagcctatccagcagctgcccctgcctacaatcccagcctgtaccccaccaatagtcccagttatgctccagagtttcagttcctgcattcagcttatgcaactctgctgatgaaacaggcctggccacagaactcgtcttcctgtggcactgaaggcaccttccacctcccagtggacaccgggaccgagaaccgaacttaccaagcatcctctgcggctttcagatatactgcggggacaccatacaaggtcccaccgacccagagtaacactgctccacccccctactccccatcacccaacccctatcagacggccatgtatccaatcagaagtgcctacccccagcagaatctgtatgcccagggagcctactacacacagccggtgtatgctgcccagcctcatgtcatccaccataccacggtcgtccagcccaacagcattccctctgctatctacccagcacctgttgccgccccgaggaccaacggtgtggccatgggcatggtggcaggcaccaccatggcaatgtcagcaggtaccctgctgactacaccccagcacacggcgattggggcacaccctgtctccatgccaacatatagggcccaaggaacccctgcgtacagctacgtgcccttccagctctatccccttcctcctacgctacatgggggcggatggcaggaacagaaattgcaaatgaagaaatagcatttggaaattctgtgaagacatctggaacttccgtcctgtacctgactccacctccaggagaaggagcaggtggactggccgaaaaggagaggccatgcttttaggacagtagcccctcatcccgagaggagaggaagaggaggaagacagtgggagtcatcaggagaggagaatgaggatgaggcccaggagacaggctcatctgggagaagagggacccctgggacgaggaggtccctgctagtctcagccaggagcctggattgcccagcagcagcctccggcacccagcgcttggctgggccagcagcccctctgggggtggggcacgaacattttattgtaaaaaatgggatcattgacaacatttgggactttaaaaaactgctttcatttaaaattcatgcaaacttggacatatccttaccccaacctcccatgtctccctaagggagggaaaaatcaggaaacccttgggttggaaggagctcagaagctgtctagccattcccaggagggtaaagcccatcagcctccttggcctagagccaggagtttgggggcccaccttcctgggcttccaaggaactttaggaccagtaagaaaaaattcagctgttctaaattatctgttctgggtgctgatgaggtttcactttaaaacaatagaaagttttccagtgttaattcactttttgcaaatacctccttccaccctctttggttttgtaaaggtgggtgaaggttgttctagattatgtcatacgtgtttgaaaaatgccaaaataataataatgataataataatagaaacctttggatttgtcaggtgcatcacagaggtcaaagcacttcacggcctttcatgtactcgccctgagagggacagggttagagttattacagtcaattgacaaatgaggaaacaggttatggaagggaacaggcccacagtgagcagcatgctggtatccgcnaggcttcccagaaccctgctgcctccatgtgggctggggtggaaccacagagaggagaaaggaagaagaggagacctaggaatgaccttgtaacttttgttctttcaacaccagtaagtaaaactaacagctggacctcacagttcacagaacagttgaacataaattatctggtttaacccgatgaaatagaggttatttctcctatttgatccataaggaaatcaaggcttggaaaagtcaagtgacttgctaataagtgacagagccactcgaatcccaggctgtctgctgtctcgttcccctccatctgatccccacacaggctcacgtactgaagcatctgtgctctgtgccctatcttagcacctactatgtaattcaagagcaaaggggggccccaaggtgaaaataaggcactgaaaggctgtggtctggaagagcccaggtccagcacccctttttcagtatgagccccagttcagccggcctcagcctcttgctgtgatggagatccacaagcctagccaagcttggggagtcactgcaaaaggactgagcccaggagagcggggacagtcatgtgcctctggtaggatgggcacagttactggtaaggtcacagagatctagtgggaggtaccataggtagatacctccaaagattctagatggcacggtggtcaagctagacaaaaagtcagagctggaagggccgtctcattgaaggcaggcaagcaagagaggacaagggatgtagccgcctgacagtgagctacagcactggccccaggatgcaaacccctctctcctcctcatgccactgcctctccccaagtgcaacacctatggccaggatcaggggtacagatggctcgttaccagccaacccttttgaattcttctacttctacctgaccccctctcctcactggcctggggtcaagaagtttgagtctgggagctggattgcctgcaaatagtgaaagcctgaaacataatggtttgccatgttttgaaaaaaaatgcatatttaatttcttcctcatgagataggacagttgctgttctttcttacctggcaatgaccctaaaatgtatatcctctttcctgaatatttagcagagacacacacacctgtccagagcgtttttggtatgcaaagtactttgacattggttgccaaagtcctccattttatagatgaaaaaactaaggctcaggaggcttgagacttgctaaaaggtcacacagcttggaagtgattcttcaaatcctctgctctttctgctgccacctgctgggtctcttggcaagcatggagggaggggctaactgtactttatagagctgggaagcccagtctctgagctgagcagatttgtatgaactgctttgggccaggacctgtaatgagccctggggagggacccagaggcacatctaactggcagcacaaggaggatgagaatttgcaactaaaggcctcacttggacaaaacactttggggtcacaatgcccaggaccgaagacatgttcaaggacagcacgaggcatctttctattgggagacccatgtccttggtaagcctgcacacctggcttcctaatccctgagagcctgcccactgtccagatccagtgagttggtacaaaacgtacagactgaagtccctgggcttgcttttcccatgggtgaggaccagaaccagactctgagcatccttacccctggccacccgaattgttccaagtttgaggtaccccgttcccagagatctgggggtccttctttggagggcttgctttgttctgatggccttcagaaaggaatcacatgaagtataaaaggacaggccccttggtcaccaagttttggctcctcatacagataggactcatccaggttcccagcgaggcactgactaagcgaggctcagagcttccatatcaaattcctcagctttgttctgtgcccagagggggtgggccccattctgggccctgtgaactttgtcttatatatcaccatctgtatcagaattcctcctcaattgcagttaagtgaaaatacgtggaagtctgcttttccatcctgtattctcccacatcactactggctgtgcggcccccgctgcttgccaagcttgggaatccagagaggggcagtagtagagtgggccagttgggacccacccgcagagctgaagaaacacgccagactaactgatgggattccacaccggagcctctgagcgcacaggcaggcatgccaagggggctgcagggtttgtcctttacttatctgcccctttcctagaaaactcctcgtttctgaaattaggcattatatggttccaggacccagccttcaaaattcctggcaggccagcttcaacattccatggccagccctgcctaagccagacttgggtcccagtccctcagtctctccagtggatatcttctgtggtgcatgctgttgagtccaacccaaaggccaaccgaggcacacaggagttgggactggctgccacaaagctagaaagggacaaaacagcacttgcttccctatggccacatggatagtccctggatatccttgctgtggtagaggtcctctacccattccagccactgatagcagggggattttccttcctaaggagaacagatgtaacagctttgcaaagtaccggcccataggaatcaaatgggtgagatcagctttgggcctgaccccagcaagaccagcatctccagaccccagcctttctcctcaggcctaagagagtcagggaaagagaggagactgtcccagagaccttctcctcgggtcagccagatagtctggatctatggtgtgactcaagctcctccttacccagggggggtaaggccaggcctctagctacttggagttgtctgtaataatcttgaaaggcccaagggcctgtccccatcctgacttaaaggcatctgcttccctgtttcatatcacatgacagagaaacctgttctcatggcatgtaacatccctgtgaagagagcgttgtatatgattttgtattttttaattcattttaatctacaggttggaatctaatttttaaattttattggaactcacattttaaaaagaaataaaatttaaaataataataataataataataataataataaacctttgaccagtgtcttcca

SEQ ID NO: 286553 - DNA, 4549 bp, Homo sapiens
  misc_feature (1340)..(1340): n is a, c, g, or t
gctcggtacccccattccattcccgcttagcaatcatctcatccatttccctatttggcagatgaggaaactgaggcccagagaagcggaaaggacttccctagaccttacagtaaattagcattaaatgcagccttcctacctagtgggcaccttgcttacaaaaatttacctagggacggattggcttggttttgtaaaaattaagtcggcagcgcccatacctggtgagtctggaatggtctctgggctcctgtttctgctcttttcctccacggactccaaaggcgggggttgaagactgggcagaggctacatgggggcggatggcaggaacagaaattgcaaatgaagaaatagcatttggaaattctgtgaagacatctggaacttccgtcctgtacctgactccacctccaggagaaggagcaggtggactggccgaaaaggagaggccatgcttttaggacagtagcccctcatcccgagaggagaggaagaggaggaagacagtgggagtcatcaggagaggagaatgaggatgaggcccaggagacaggctcatctgggagaagagggacccctgggacgaggaggtccctgctagtctcagccaggagcctggattgcccagcagcagcctccggcacccagcgcttggctgggccagcagcccctctgggggtggggcacgaacattttattgtaaaaaatgggatcattgacaacatttgggactttaaaaaactgctttcatttaaaattcatgcaaacttggacatatccttaccccaacctcccatgtctccctaagggagggaaaaatcaggaaacccttgggttggaaggagctcagaagctgtctagccattcccaggagggtaaagcccatcagcctccttggcctagagccaggagtttgggggcccaccttcctgggcttccaaggaactttaggaccagtaagaaaaaattcagctgttctaaattatctgttctgggtgctgatgaggtttcactttaaaacaatagaaagttttccagtgttaattcactttttgcaaatacctccttccaccctctttggttttgtaaaggtgggtgaaggttgttctagattatgtcatacgtgtttgaaaaatgccaaaataataataatgataataataatagaaacctttggatttgtcaggtgcatcacagaggtcaaagcacttcacggcctttcatgtactcgccctgagagggacagggttagagttattacagtcaattgacaaatgaggaaacaggttatggaagggaacaggcccacagtgagcagcatgctggtatccgcnaggcttcccagaaccctgctgcctccatgtgggctggggtggaaccacagagaggagaaaggaagaagaggagacctaggaatgaccttgtaacttttgttctttcaacaccagtaagtaaaactaacagctggacctcacagttcacagaacagttgaacataaattatctggtttaacccgatgaaatagaggttatttctcctatttgatccataaggaaatcaaggcttggaaaagtcaagtgacttgctaataagtgacagagccactcgaatcccaggctgtctgctgtctcgttcccctccatctgatccccacacaggctcacgtactgaagcatctgtgctctgtgccctatcttagcacctactatgtaattcaagagcaaaggggggccccaaggtgaaaataaggcactgaaaggctgtggtctggaagagcccaggtccagcacccctttttcagtatgagccccagttcagccggcctcagcctcttgctgtgatggagatccacaagcctagccaagcttggggagtcactgcaaaaggactgagcccaggagagcggggacagtcatgtgcctctggtaggatgggcacagttactggtaaggtcacagagatctagtgggaggtaccataggtagatacctccaaagattctagatggcacggtggtcaagctagacaaaaagtcagagctggaagggccgtctcattgaaggcaggcaagcaagagaggacaagggatgtagccgcctgacagtgagctacagcactggccccaggatgcaaacccctctctcctcctcatgccactgcctctccccaagtgcaacacctatggccaggatcaggggtacagatggctcgttaccagccaacccttttgaattcttctacttctacctgaccccctctcctcactggcctggggtcaagaagtttgagtctgggagctggattgcctgcaaatagtgaaagcctgaaacataatggtttgccatgttttgaaaaaaaatgcatatttaatttcttcctcatgagataggacagttgctgttctttcttacctggcaatgaccctaaaatgtatatcctctttcctgaatatttagcagagacacacacacctgtccagagcgtttttggtatgcaaagtactttgacattggttgccaaagtcctccattttatagatgaaaaaactaaggctcaggaggcttgagacttgctaaaaggtcacacagcttggaagtgattcttcaaatcctctgctctttctgctgccacctgctgggtctcttggcaagcatggagggaggggctaactgtactttatagagctgggaagcccagtctctgagctgagcagatttgtatgaactgctttgggccaggacctgtaatgagccctggggagggacccagaggcacatctaactggcagcacaaggaggatgagaatttgcaactaaaggcctcacttggacaaaacactttggggtcacaatgcccaggaccgaagacatgttcaaggacagcacgaggcatctttctattgggagacccatgtccttggtaagcctgcacacctggcttcctaatccctgagagcctgcccactgtccagatccagtgagttggtacaaaacgtacagactgaagtccctgggcttgcttttcccatgggtgaggaccagaaccagactctgagcatccttacccctggccacccgaattgttccaagtttgaggtaccccgttcccagagatctgggggtccttctttggagggcttgctttgttctgatggccttcagaaaggaatcacatgaagtataaaaggacaggccccttggtcaccaagttttggctcctcatacagataggactcatccaggttcccagcgaggcactgactaagcgaggctcagagcttccatatcaaattcctcagctttgttctgtgcccagagggggtgggccccattctgggccctgtgaactttgtcttatatatcaccatctgtatcagaattcctcctcaattgcagttaagtgaaaatacgtggaagtctgcttttccatcctgtattctcccacatcactactggctgtgcggcccccgctgcttgccaagcttgggaatccagagaggggcagtagtagagtgggccagttgggacccacccgcagagctgaagaaacacgccagactaactgatgggattccacaccggagcctctgagcgcacaggcaggcatgccaagggggctgcagggtttgtcctttacttatctgcccctttcctagaaaactcctcgtttctgaaattaggcattatatggttccaggacccagccttcaaaattcctggcaggccagcttcaacattccatggccagccctgcctaagccagacttgggtcccagtccctcagtctctccagtggatatcttctgtggtgcatgctgttgagtccaacccaaaggccaaccgaggcacacaggagttgggactggctgccacaaagctagaaagggacaaaacagcacttgcttccctatggccacatggatagtccctggatatccttgctgtggtagaggtcctctacccattccagccactgatagcagggggattttccttcctaaggagaacagatgtaacagctttgcaaagtaccggcccataggaatcaaatgggtgagatcagctttgggcctgaccccagcaagaccagcatctccagaccccagcctttctcctcaggcctaagagagtcagggaaagagaggagactgtcccagagaccttctcctcgggtcagccagatagtctggatctatggtgtgactcaagctcctccttacccagggggggtaaggccaggcctctagctacttggagttgtctgtaataatcttgaaaggcccaagggcctgtccccatcctgacttaaaggcatctgcttccctgtttcatatcacatgacagagaaacctgttctcatggcatgtaacatccctgtgaagagagcgttgtatatgattttgtattttttaattcattttaatctacaggttggaatctaatttttaaattttattggaactcacattttaaaaagaaataaaatttaaaataataataataataataataataataataaacctttgaccagtgtcttcca

SEQ ID NO: 286554 - DNA, 6000 bp, Homo sapiens
  misc_feature (2584)..(2584): n is a, c, g, or t
aggcgggaggcaggcagcttcactaggaaggcacagcgggctcccgagttgaggggagaagcctcctgaatatcactgacactgtttctttcccctttccctctgcagatctggagtcacacattgtatgcaactactcaagtcttacaccggtgctggagcagttccctagcagcaccacctctatttgcaagaagagacaacggaagtgcaagggtcactttatgcatctttaatggttttgatttttatttttggtttttgtaaaagctgctttttctaatctcctgcctctccccaactgtccccctcttagcccctgcccttccagctctatccccttcctcctacctgaccaggccatgtcctctctgctcttccctaagtgtcctgtccctggggatcccagtctagaggcaagcagagagtagggtttattgcagtggttcatctgaaggctggattccatttgaagagcataaacagatgtggtccagggtaggaactcagagctgttgagcaggctacatctctaggggagtgttctggttgttttttcttaagcaagattagttcaggacattcccatgtcccagacacaaatgaaatgtctcctgagaaccattgcaacagaccaagaacaaaaccacctgagtatgtaggcgtgttattagcagcttaataccccaggctgagaacctggggaaaaaagtctttagaatttgggggagggtggggggagggagggcattgtggggaaggagagggaagaagggaggagcggtgcttgcctcatggctttggtttgaaaggtctctggccaaagcatctggccctggaccttctgatttgcacagtgatgttaactgacctggcacttcctcaaaaggtgattttgtccttagacctgccaagcggctgcagggtggtaggatcccagcatcccgaggccttggaaggccggatgccctgtgtcatccagacttcagcctctgagctgtcatggacccactctgatgaggagcttcctcctgattggagtgggaacctagggcatttctctcccttttcttttgcccttcccagtgccaggactcacctgtctgaccatagagcttgcaggcaggccaagctcttggttacctgtgccattcatggcccaagtgaaggaaccacattccaggtgggtgctggcagctctgaaggtgaggatagtgaaggaaaagcaatagcaataaacatttcatagactcatggaactgaagggaccttagcaatcatctcatccatttccctatttggcagatgaggaaactgaggcccagagaagcggaaaggacttccctagaccttacagtaaattagcattaaatgcagccttcctacctagtgggcaccttgcttacaaaaatttacctagggacggattggcttggttttgtaaaaattaagtcggcagcgcccatacctggtgagtctggaatggtctctgggctcctgtttctgctcttttcctccacggactccaaaggcgggggttgaagactgggcagaggctacatgggggcggatggcaggaacagaaattgcaaatgaagaaatagcatttggaaattctgtgaagacatctggaacttccgtcctgtacctgactccacctccaggagaaggagcaggtggactggccgaaaaggagaggccatgcttttaggacagtagcccctcatcccgagaggagaggaagaggaggaagacagtgggagtcatcaggagaggagaatgaggatgaggcccaggagacaggctcatctgggagaagagggacccctgggacgaggaggtccctgctagtctcagccaggagcctggattgcccagcagcagcctccggcacccagcgcttggctgggccagcagcccctctgggggtggggcacgaacattttattgtaaaaaatgggatcattgacaacatttgggactttaaaaaactgctttcatttaaaattcatgcaaacttggacatatccttaccccaacctcccatgtctccctaagggagggaaaaatcaggaaacccttgggttggaaggagctcagaagctgtctagccattcccaggagggtaaagcccatcagcctccttggcctagagccaggagtttgggggcccaccttcctgggcttccaaggaactttaggaccagtaagaaaaaattcagctgttctaaattatctgttctgggtgctgatgaggtttcactttaaaacaatagaaagttttccagtgttaattcactttttgcaaatacctccttccaccctctttggttttgtaaaggtgggtgaaggttgttctagattatgtcatacgtgtttgaaaaatgccaaaataataataatgataataataatagaaacctttggatttgtcaggtgcatcacagaggtcaaagcacttcacggcctttcatgtactcgccctgagagggacagggttagagttattacagtcaattgacaaatgaggaaacaggttatggaagggaacaggcccacagtgagcagcatgctggtatccgcnaggcttcccagaaccctgctgcctccatgtgggctggggtggaaccacagagaggagaaaggaagaagaggagacctaggaatgaccttgtaacttttgttctttcaacaccagtaagtaaaactaacagctggacctcacagttcacagaacagttgaacataaattatctggtttaacccgatgaaatagaggttatttctcctatttgatccataaggaaatcaaggcttggaaaagtcaagtgacttgctaataagtgacagagccactcgaatcccaggctgtctgctgtctcgttcccctccatctgatccccacacaggctcacgtactgaagcatctgtgctctgtgccctatcttagcacctactatgtaattcaagagcaaaggggggccccaaggtgaaaataaggcactgaaaggctgtggtctggaagagcccaggtccagcacccctttttcagtatgagccccagttcagccggcctcagcctcttgctgtgatggagatccacaagcctagccaagcttggggagtcactgcaaaaggactgagcccaggagagcggggacagtcatgtgcctctggtaggatgggcacagttactggtaaggtcacagagatctagtgggaggtaccataggtagatacctccaaagattctagatggcacggtggtcaagctagacaaaaagtcagagctggaagggccgtctcattgaaggcaggcaagcaagagaggacaagggatgtagccgcctgacagtgagctacagcactggccccaggatgcaaacccctctctcctcctcatgccactgcctctccccaagtgcaacacctatggccaggatcaggggtacagatggctcgttaccagccaacccttttgaattcttctacttctacctgaccccctctcctcactggcctggggtcaagaagtttgagtctgggagctggattgcctgcaaatagtgaaagcctgaaacataatggtttgccatgttttgaaaaaaaatgcatatttaatttcttcctcatgagataggacagttgctgttctttcttacctggcaatgaccctaaaatgtatatcctctttcctgaatatttagcagagacacacacacctgtccagagcgtttttggtatgcaaagtactttgacattggttgccaaagtcctccattttatagatgaaaaaactaaggctcaggaggcttgagacttgctaaaaggtcacacagcttggaagtgattcttcaaatcctctgctctttctgctgccacctgctgggtctcttggcaagcatggagggaggggctaactgtactttatagagctgggaagcccagtctctgagctgagcagatttgtatgaactgctttgggccaggacctgtaatgagccctggggagggacccagaggcacatctaactggcagcacaaggaggatgagaatttgcaactaaaggcctcacttggacaaaacactttggggtcacaatgcccaggaccgaagacatgttcaaggacagcacgaggcatctttctattgggagacccatgtccttggtaagcctgcacacctggcttcctaatccctgagagcctgcccactgtccagatccagtgagttggtacaaaacgtacagactgaagtccctgggcttgcttttcccatgggtgaggaccagaaccagactctgagcatccttacccctggccacccgaattgttccaagtttgaggtaccccgttcccagagatctgggggtccttctttggagggcttgctttgttctgatggccttcagaaaggaatcacatgaagtataaaaggacaggccccttggtcaccaagttttggctcctcatacagataggactcatccaggttcccagcgaggcactgactaagcgaggctcagagcttccatatcaaattcctcagctttgttctgtgcccagagggggtgggccccattctgggccctgtgaactttgtcttatatatcaccatctgtatcagaattcctcctcaattgcagttaagtgaaaatacgtggaagtctgcttttccatcctgtattctcccacatcactactggctgtgcggcccccgctgcttgccaagcttgggaatccagagaggggcagtagtagagtgggccagttgggacccacccgcagagctgaagaaacacgccagactaactgatgggattccacaccggagcctctgagcgcacaggcaggcatgccaagggggctgcagggtttgtcctttacttatctgcccctttcctagaaaactcctcgtttctgaaattaggcattatatggttccaggacccagccttcaaaattcctggcaggccagcttcaacattccatggccagccctgcctaagccagacttgggtcccagtccctcagtctctccagtggatatcttctgtggtgcatgctgttgagtccaacccaaaggccaaccgaggcacacaggagttgggactggctgccacaaagctagaaagggacgtggtagaggtcctctacccattccagccactgatagcagggggattttccttcctaaggagaacagatgtaacagctttgcaaagtaccggcccataggaatcaaatgggtgagatcagctttgggcctgaccccagcaagaccagcatctccagaccccagcctttctcctcaggcctaagagagtcagggaaagagaggagactgtcccagagaccttctcctcgggtcagccagatagtctggatctatggtgtgactcaagctcctccttacccagggggggtaaggccaggcctctagctacttggagttgtctgtaataatcttgaaaggcccaagggcctgtccccatcctgacttaaaggcatctgcttccctgtttcatatcacatgacagagaaacctgttctcatggcatgtaacatccctgtgaagagagcgttgtatatgattttgtattttttaattcattttaatctacaggttggaatctaatttttaaattttattggaactcacattttaaaaagaaataaaatttaaaataataataataataataataataataataaacctttgaccagtgtcttccaagtagtttgatcaaagaatttataggtgttttcaaaacacagtccggagtgtaaagattggaaagccccatggccttgcctgtgtgtatgaagtgtaaatctggttttgttttgttgttttggattcttttgggtttttgttttgttttgaagatcagacagtgatcactctgaaagattgaagccaagaatttgtaactatggtatttactgtaagctgtagaacactcaataactattaaaaaaaaaaattccccccca

SEQ ID NO: 286555 - DNA, 6372 bp, Homo sapiens
  misc_feature (2584)..(2584): n is a, c, g, or t
aggcgggaggcaggcagcttcactaggaaggcacagcgggctcccgagttgaggggagaagcctcctgaatatcactgacactgtttctttcccctttccctctgcagatctggagtcacacattgtatgcaactactcaagtcttacaccggtgctggagcagttccctagcagcaccacctctatttgcaagaagagacaacggaagtgcaagggtcactttatgcatctttaatggttttgatttttatttttggtttttgtaaaagctgctttttctaatctcctgcctctccccaactgtccccctcttagcccctgcccttccagctctatccccttcctcctacctgaccaggccatgtcctctctgctcttccctaagtgtcctgtccctggggatcccagtctagaggcaagcagagagtagggtttattgcagtggttcatctgaaggctggattccatttgaagagcataaacagatgtggtccagggtaggaactcagagctgttgagcaggctacatctctaggggagtgttctggttgttttttcttaagcaagattagttcaggacattcccatgtcccagacacaaatgaaatgtctcctgagaaccattgcaacagaccaagaacaaaaccacctgagtatgtaggcgtgttattagcagcttaataccccaggctgagaacctggggaaaaaagtctttagaatttgggggagggtggggggagggagggcattgtggggaaggagagggaagaagggaggagcggtgcttgcctcatggctttggtttgaaaggtctctggccaaagcatctggccctggaccttctgatttgcacagtgatgttaactgacctggcacttcctcaaaaggtgattttgtccttagacctgccaagcggctgcagggtggtaggatcccagcatcccgaggccttggaaggccggatgccctgtgtcatccagacttcagcctctgagctgtcatggacccactctgatgaggagcttcctcctgattggagtgggaacctagggcatttctctcccttttcttttgcccttcccagtgccaggactcacctgtctgaccatagagcttgcaggcaggccaagctcttggttacctgtgccattcatggcccaagtgaaggaaccacattccaggtgggtgctggcagctctgaaggtgaggatagtgaaggaaaagcaatagcaataaacatttcatagactcatggaactgaagggaccttagcaatcatctcatccatttccctatttggcagatgaggaaactgaggcccagagaagcggaaaggacttccctagaccttacagtaaattagcattaaatgcagccttcctacctagtgggcaccttgcttacaaaaatttacctagggacggattggcttggttttgtaaaaattaagtcggcagcgcccatacctggtgagtctggaatggtctctgggctcctgtttctgctcttttcctccacggactccaaaggcgggggttgaagactgggcagaggctacatgggggcggatggcaggaacagaaattgcaaatgaagaaatagcatttggaaattctgtgaagacatctggaacttccgtcctgtacctgactccacctccaggagaaggagcaggtggactggccgaaaaggagaggccatgcttttaggacagtagcccctcatcccgagaggagaggaagaggaggaagacagtgggagtcatcaggagaggagaatgaggatgaggcccaggagacaggctcatctgggagaagagggacccctgggacgaggaggtccctgctagtctcagccaggagcctggattgcccagcagcagcctccggcacccagcgcttggctgggccagcagcccctctgggggtggggcacgaacattttattgtaaaaaatgggatcattgacaacatttgggactttaaaaaactgctttcatttaaaattcatgcaaacttggacatatccttaccccaacctcccatgtctccctaagggagggaaaaatcaggaaacccttgggttggaaggagctcagaagctgtctagccattcccaggagggtaaagcccatcagcctccttggcctagagccaggagtttgggggcccaccttcctgggcttccaaggaactttaggaccagtaagaaaaaattcagctgttctaaattatctgttctgggtgctgatgaggtttcactttaaaacaatagaaagttttccagtgttaattcactttttgcaaatacctccttccaccctctttggttttgtaaaggtgggtgaaggttgttctagattatgtcatacgtgtttgaaaaatgccaaaataataataatgataataataatagaaacctttggatttgtcaggtgcatcacagaggtcaaagcacttcacggcctttcatgtactcgccctgagagggacagggttagagttattacagtcaattgacaaatgaggaaacaggttatggaagggaacaggcccacagtgagcagcatgctggtatccgcnaggcttcccagaaccctgctgcctccatgtgggctggggtggaaccacagagaggagaaaggaagaagaggagacctaggaatgaccttgtaacttttgttctttcaacaccagtaagtaaaactaacagctggacctcacagttcacagaacagttgaacataaattatctggtttaacccgatgaaatagaggttatttctcctatttgatccataaggaaatcaaggcttggaaaagtcaagtgacttgctaataagtgacagagccactcgaatcccaggctgtctgctgtctcgttcccctccatctgatccccacacaggctcacgtactgaagcatctgtgctctgtgccctatcttagcacctactatgtaattcaagagcaaaggggggccccaaggtgaaaataaggcactgaaaggctgtggtctggaagagcccaggtccagcacccctttttcagtatgagccccagttcagccggcctcagcctcttgctgtgatggagatccacaagcctagccaagcttggggagtcactgcaaaaggactgagcccaggagagcggggacagtcatgtgcctctggtaggatgggcacagttactggtaaggtcacagagatctagtgggaggtaccataggtagatacctccaaagattctagatggcacggtggtcaagctagacaaaaagtcagagctggaagggccgtctcattgaaggcaggcaagcaagagaggacaagggatgtagccgcctgacagtgagctacagcactggccccaggatgcaaacccctctctcctcctcatgccactgcctctccccaagtgcaacacctatggccaggatcaggggtacagatggctcgttaccagccaacccttttgaattcttctacttctacctgaccccctctcctcactggcctggggtcaagaagtttgagtctgggagctggattgcctgcaaatagtgaaagcctgaaacataatggtttgccatgttttgaaaaaaaatgcatatttaatttcttcctcatgagataggacagttgctgttctttcttacctggcaatgaccctaaaatgtatatcctctttcctgaatatttagcagagacacacacacctgtccagagcgtttttggtatgcaaagtactttgacattggttgccaaagtcctccattttatagatgaaaaaactaaggctcaggaggcttgagacttgctaaaaggtcacacagcttggaagtgattcttcaaatcctctgctctttctgctgccacctgctgggtctcttggcaagcatggagggaggggctaactgtactttatagagctgggaagcccagtctctgagctgagcagatttgtatgaactgctttgggccaggacctgtaatgagccctggggagggacccagaggcacatctaactggcagcacaaggaggatgagaatttgcaactaaaggcctcacttggacaaaacactttggggtcacaatgcccaggaccgaagacatgttcaaggacagcacgaggcatctttctattgggagacccatgtccttggtaagcctgcacacctggcttcctaatccctgagagcctgcccactgtccagatccagtgagttggtacaaaacgtacagactgaagtccctgggcttgcttttcccatgggtgaggaccagaaccagactctgagcatccttacccctggccacccgaattgttccaagtttgaggtaccccgttcccagagatctgggggtccttctttggagggcttgctttgttctgatggccttcagaaaggaatcacatgaagtataaaaggacaggccccttggtcaccaagttttggctcctcatacagataggactcatccaggttcccagcgaggcactgactaagcgaggctcagagcttccatatcaaattcctcagctttgttctgtgcccagagggggtgggccccattctgggccctgtgaactttgtcttatatatcaccatctgtatcagaattcctcctcaattgcagttaagtgaaaatacgtggaagtctgcttttccatcctgtattctcccacatcactactggctgtgcggcccccgctgcttgccaagcttgggaatccagagaggggcagtagtagagtgggccagttgggacccacccgcagagctgaagaaacacgccagactaactgatgggattccacaccggagcctctgagcgcacaggcaggcatgccaagggggctgcagggtttgtcctttacttatctgcccctttcctagaaaactcctcgtttctgaaattaggcattatatggttccaggacccagccttcaaaattcctggcaggccagcttcaacattccatggccagccctgcctaagccagacttgggtcccagtccctcagtctctccagtggatatcttctgtggtgcatgctgttgagtccaacccaaaggccaaccgaggcacacaggagttgggactggctgccacaaagctagaaagggacaaaacagcacttgcttccctatggccacatggatagtccctggatatccttgctgtggtagaggtcctctacccattccagccactgatagcagggggattttccttcctaaggagaacagatgtaacagctttgcaaagtaccggcccataggaatcaaatgggtgagatcagctttgggcctgaccccagcaagaccagcatctccagaccccagcctttctcctcaggcctaagagagtcagggaaagagaggagactgtcccagagaccttctcctcgggtcagccagatagtctggatctatggtgtgactcaagctcctccttacccagggggggtaaggccaggcctctagctacttggagttgtctgtaataatcttgaaaggcccaagggcctgtccccatcctgacttaaaggcatctgcttccctgtttcatatcacatgacagagaaacctgttctcatggcatgtaacatccctgtgaagagagcgttgtatatgattttgtattttttaattcattttaatctacaggttggaatctaatttttaaattttattggaactcacattttaaaaagaaataaaatttaaaataataataataataataataataataataaacctttgaccagtgtcttccaagtagtttgatcaaagaatttataggtgttttcaaaacacagtccggagtgtaaagattggaaagccccatggccttgcctgtgtgtatgaagtgtaaatctggttttgttttgttgttttggattcttttgggtttttgttttgttttgaagatcagacagtgatcactctgaaagattgaagccaagaatttgtaactatggtatttactgtaagctgtagaacactcaataactattaaaaaaaaaaattcccccccaaaaaaaagtcttaggtgactagactgagtggttcttggggagggaggcacagaggactgtcctgggccagtgagtcccttgggcgtctccccaagttgatgctaaatttgttctcagtagtcaagaaaaacctatggtacatcttacagctgatctgacaggggtctgccctaagggtctcacagctgctggggagctttaagtggcaacttcagcacccaccctaagtgtgtgatgtgggagcacagtgaggccattcagagttgaaatccattgagccatccgcgcaataaagctgacatctattgtgtgaaaaaa

SEQ ID NO: 286556 - DNA, 5770 bp, Homo sapiens
  misc_feature (2584)..(2584): n is a, c, g, or t
aggcgggaggcaggcagcttcactaggaaggcacagcgggctcccgagttgaggggagaagcctcctgaatatcactgacactgtttctttcccctttccctctgcagatctggagtcacacattgtatgcaactactcaagtcttacaccggtgctggagcagttccctagcagcaccacctctatttgcaagaagagacaacggaagtgcaagggtcactttatgcatctttaatggttttgatttttatttttggtttttgtaaaagctgctttttctaatctcctgcctctccccaactgtccccctcttagcccctgcccttccagctctatccccttcctcctacctgaccaggccatgtcctctctgctcttccctaagtgtcctgtccctggggatcccagtctagaggcaagcagagagtagggtttattgcagtggttcatctgaaggctggattccatttgaagagcataaacagatgtggtccagggtaggaactcagagctgttgagcaggctacatctctaggggagtgttctggttgttttttcttaagcaagattagttcaggacattcccatgtcccagacacaaatgaaatgtctcctgagaaccattgcaacagaccaagaacaaaaccacctgagtatgtaggcgtgttattagcagcttaataccccaggctgagaacctggggaaaaaagtctttagaatttgggggagggtggggggagggagggcattgtggggaaggagagggaagaagggaggagcggtgcttgcctcatggctttggtttgaaaggtctctggccaaagcatctggccctggaccttctgatttgcacagtgatgttaactgacctggcacttcctcaaaaggtgattttgtccttagacctgccaagcggctgcagggtggtaggatcccagcatcccgaggccttggaaggccggatgccctgtgtcatccagacttcagcctctgagctgtcatggacccactctgatgaggagcttcctcctgattggagtgggaacctagggcatttctctcccttttcttttgcccttcccagtgccaggactcacctgtctgaccatagagcttgcaggcaggccaagctcttggttacctgtgccattcatggcccaagtgaaggaaccacattccaggtgggtgctggcagctctgaaggtgaggatagtgaaggaaaagcaatagcaataaacatttcatagactcatggaactgaagggaccttagcaatcatctcatccatttccctatttggcagatgaggaaactgaggcccagagaagcggaaaggacttccctagaccttacagtaaattagcattaaatgcagccttcctacctagtgggcaccttgcttacaaaaatttacctagggacggattggcttggttttgtaaaaattaagtcggcagcgcccatacctggtgagtctggaatggtctctgggctcctgtttctgctcttttcctccacggactccaaaggcgggggttgaagactgggcagaggctacatgggggcggatggcaggaacagaaattgcaaatgaagaaatagcatttggaaattctgtgaagacatctggaacttccgtcctgtacctgactccacctccaggagaaggagcaggtggactggccgaaaaggagaggccatgcttttaggacagtagcccctcatcccgagaggagaggaagaggaggaagacagtgggagtcatcaggagaggagaatgaggatgaggcccaggagacaggctcatctgggagaagagggacccctgggacgaggaggtccctgctagtctcagccaggagcctggattgcccagcagcagcctccggcacccagcgcttggctgggccagcagcccctctgggggtggggcacgaacattttattgtaaaaaatgggatcattgacaacatttgggactttaaaaaactgctttcatttaaaattcatgcaaacttggacatatccttaccccaacctcccatgtctccctaagggagggaaaaatcaggaaacccttgggttggaaggagctcagaagctgtctagccattcccaggagggtaaagcccatcagcctccttggcctagagccaggagtttgggggcccaccttcctgggcttccaaggaactttaggaccagtaagaaaaaattcagctgttctaaattatctgttctgggtgctgatgaggtttcactttaaaacaatagaaagttttccagtgttaattcactttttgcaaatacctccttccaccctctttggttttgtaaaggtgggtgaaggttgttctagattatgtcatacgtgtttgaaaaatgccaaaataataataatgataataataatagaaacctttggatttgtcaggtgcatcacagaggtcaaagcacttcacggcctttcatgtactcgccctgagagggacagggttagagttattacagtcaattgacaaatgaggaaacaggttatggaagggaacaggcccacagtgagcagcatgctggtatccgcnaggcttcccagaaccctgctgcctccatgtgggctggggtggaaccacagagaggagaaaggaagaagaggagacctaggaatgaccttgtaacttttgttctttcaacaccagtaagtaaaactaacagctggacctcacagttcacagaacagttgaacataaattatctggtttaacccgatgaaatagaggttatttctcctatttgatccataaggaaatcaaggcttggaaaagtcaagtgacttgctaataagtgacagagccactcgaatcccaggctgtctgctgtctcgttcccctccatctgatccccacacaggctcacgtactgaagcatctgtgctctgtgccctatcttagcacctactatgtaattcaagagcaaaggggggccccaaggtgaaaataaggcactgaaaggctgtggtctggaagagcccaggtccagcacccctttttcagtatgagccccagttcagccggcctcagcctcttgctgtgatggagatccacaagcctagccaagcttggggagtcactgcaaaaggactgagcccaggagagcggggacagtcatgtgcctctggtaggatgggcacagttactggtaaggtcacagagatctagtgggaggtaccataggtagatacctccaaagattctagatggcacggtggtcaagctagacaaaaagtcagagctggaagggccgtctcattgaaggcaggcaagcaagagaggacaagggatgtagccgcctgacagtgagctacagcactggccccaggatgcaaacccctctctcctcctcatgccactgcctctccccaagtgcaacacctatggccaggatcaggggtacagatggctcgttaccagccaacccttttgaattcttctacttctacctgaccccctctcctcactggcctggggtcaagaagtttgagtctgggagctggattgcctgcaaatagtgaaagcctgaaacataatggtttgccatgttttgaaaaaaaatgcatatttaatttcttcctcatgagataggacagttgctgttctttcttacctggcaatgaccctaaaatgtatatcctctttcctgaatatttagcagagacacacacacctgtccagagcgtttttggtatgcaaagtactttgacattggttgccaaagtcctccattttatagatgaaaaaactaaggctcaggaggcttgagacttgctaaaaggtcacacagcttggaagtgattcttcaaatcctctgctctttctgctgccacctgctgggtctcttggcaagcatggagggaggggctaactgtactttatagagctgggaagcccagtctctgagctgagcagatttgtatgaactgctttgggccaggacctgtaatgagccctggggagggacccagaggcacatctaactggcagcacaaggaggatgagaatttgcaactaaaggcctcacttggacaaaacactttggggtcacaatgcccaggaccgaagacatgttcaaggacagcacgaggcatctttctattgggagacccatgtccttggtaagcctgcacacctggcttcctaatccctgagagcctgcccactgtccagatccagtgagttggtacaaaacgtacagactgaagtccctgggcttgcttttcccatgggtgaggaccagaaccagactctgagcatccttacccctggccacccgaattgttccaagtttgaggtaccccgttcccagagatctgggggtccttctttggagggcttgctttgttctgatggccttcagaaaggaatcacatgaagtataaaaggacaggccccttggtcaccaagttttggctcctcatacagataggactcatccaggttcccagcgaggcactgactaagcgaggctcagagcttccatatcaaattcctcagctttgttctgtgcccagagggggtgggccccattctgggccctgtgaactttgtttatctgcccctttcctagaaaactcctcgtttctgaaattaggcattatatggttccaggacccagccttcaaaattcctggcaggccagcttcaacattccatggccagccctgcctaagccagacttgggtcccagtccctcagtctctccagtggatatcttctgtggtgcatgctgttgagtccaacccaaaggccaaccgaggcacacaggagttgggactggctgccacaaagctagaaagggacaaaacagcacttgcttccctatggccacatggatagtccctggatatccttgctgtggtagaggtcctctacccattccagccactgatagcagggggattttccttcctaaggagaacagatgtaacagctttgcaaagtaccggcccataggaatcaaatgggtgagatcagctttgggcctgaccccagcaagaccagcatctccagaccccagcctttctcctcaggcctaagagagtcagggaaagagaggagactgtcccagagaccttctcctcgggtcagccagatagtctggatctatggtgtgactcaagctcctccttacccagggggggtaaggccaggcctctagctacttggagttgtctgtaataatcttgaaaggcccaagggcctgtccccatcctgacttaaaggcatctgcttccctgtttcatatcacatgacagagaaacctgttctcatggcatgtaacatccctgtgaagagagcgttgtatatgattttgtattttttaattcattttaatctacaggttggaatctaatttttaaattttattggaactcacattttaaaaagaaataaaatttaaaataataataataataataataataataataaacctttgaccagtgtcttccaagtagtttgatcaaagaatttataggtgttttcaaaacacagtccggagtgtaaagattggaaagccccatggccttgcctgtgtgtatgaagtgtaaatctggttttgttttgttgttttggattcttttgggtttttgttttgttttgaagatcagacagtgatcactctgaaagattgaagccaagaatttgtaactatggtatttactgtaagctgtagaacactcaataactattaaaaaaaaaaattccccccca

SEQ ID NO: 286557 - DNA, 2894 bp, Homo sapiens
  misc_feature (15)..(15): n is a, c, g, or t
  misc_feature (23)..(23): n is a, c, g, or t
attgttgatcccccncggggtantggatatgtcgaccaggcgcctcggatgatctagtgggaggtaccataggtagatacctccaaagattctagatggcacggtggtcaagctagacaaaaagtcagagctggaagggccgtctcattgaaggcaggcaagcaagagaggacaagggatgtagccgcctgacagtgagctacagcactggccccaggatgcaaacccctctctcctcctcatgccactgcctctccccaagtgcaacacctatggccaggatcaggggtacagatggctcgttaccagccaacccttttgaattcttctacttctacctgaccccctctcctcactggcctggggtcaagaagtttgagtctgggagctggattgcctgcaaatagtgaaagcctgaaacataatggtttgccatgttttgaaaaaaaatgcatatttaatttcttcctcatgagataggacagttgctgttctttcttacctggcaatgaccctaaaatgtatatcctctttcctgaatatttagcagagacacacacacctgtccagagcgtttttggtatgcaaagtactttgacattggttgccaaagtcctccattttatagatgaaaaaactaaggctcaggaggcttgagacttgctaaaaggtcacacagcttggaagtgattcttcaaatcctctgctctttctgctgccacctgctgggtctcttggcaagcatggagggaggggctaactgtactttatagagctgggaagcccagtctctgagctgagcagatttgtatgaactgctttgggccaggacctgtaatgagccctggggagggacccagaggcacatctaactggcagcacaaggaggatgagaatttgcaactaaaggcctcacttggacaaaacactttggggtcacaatgcccaggaccgaagacatgttcaaggacagcacgaggcatctttctattgggagacccatgtccttggtaagcctgcacacctggcttcctaatccctgagagcctgcccactgtccagatccagtgagttggtacaaaacgtacagactgaagtccctgggcttgcttttcccatgggtgaggaccagaaccagactctgagcatccttacccctggccacccgaattgttccaagtttgaggtaccccgttcccagagatctgggggtccttctttggagggcttgctttgttctgatggccttcagaaaggaatcacatgaagtataaaaggacaggccccttggtcaccaagttttggctcctcatacagataggactcatccaggttcccagcgaggcactgactaagcgaggctcagagcttccatatcaaattcctcagctttgttctgtgcccagagggggtgggccccattctgggccctgtgaactttgtcttatatatcaccatctgtatcagaattcctcctcaattgcagttaagtgaaaatacgtggaagtctgcttttccatcctgtattctcccacatcactactggctgtgcggcccccgctgcttgccaagcttgggaatccagagaggggcagtagtagagtgggccagttgggacccacccgcagagctgaagaaacacgccagactaactgatgggattccacaccggagcctctgagcgcacaggcaggcatgccaagggggctgcagggtttgtcctttacttatctgcccctttcctagaaaactcctcgtttctgaaattaggcattatatggttccaggacccagccttcaaaattcctggcaggccagcttcaacattccatggccagccctgcctaagccagacttgggtcccagtccctcagtctctccagtggatatcttctgtggtgcatgctgttgagtccaacccaaaggccaaccgaggcacacaggagttgggactggctgccacaaagctagaaagggacaaaacagcacttgcttccctatggccacatggatagtccctggatatccttgctgtggtagaggtcctctacccattccagccactgatagcagggggattttccttcctaaggagaacagatgtaacagctttgcaaagtaccggcccataggaatcaaatgggtgagatcagctttgggcctgaccccagcaagaccagcatctccagaccccagcctttctcctcaggcctaagagagtcagggaaagagaggagactgtcccagagaccttctcctcgggtcagccagatagtctggatctatggtgtgactcaagctcctccttacccagggggggtaaggccaggcctctagctacttggagttgtctgtaataatcttgaaaggcccaagggcctgtccccatcctgacttaaaggcatctgcttccctgtttcatatcacatgacagagaaacctgttctcatggcatgtaacatccctgtgaagagagcgttgtatatgattttgtattttttaattcattttaatctacaggttggaatctaatttttaaattttattggaactcacattttaaaaagaaataaaatttaaaataataataataataataataataataataaacctttgaccagtgtcttccaagtagtttgatcaaagaatttataggtgttttcaaaacacagtccggagtgtaaagattggaaagccccatggccttgcctgtgtgtatgaagtgtaaatctggttttgttttgttgttttggattcttttgggtttttgttttgttttgaagatcagacagtgatcactctgaaagattgaagccaagaatttgtaactatggtatttactgtaagctgtagaacactcaataactattaaaaaaaaaaattccccccca

SEQ ID NO: 286558 - DNA, 5775 bp, Homo sapiens
  misc_feature (2584)..(2584): n is a, c, g, or t
aggcgggaggcaggcagcttcactaggaaggcacagcgggctcccgagttgaggggagaagcctcctgaatatcactgacactgtttctttcccctttccctctgcagatctggagtcacacattgtatgcaactactcaagtcttacaccggtgctggagcagttccctagcagcaccacctctatttgcaagaagagacaacggaagtgcaagggtcactttatgcatctttaatggttttgatttttatttttggtttttgtaaaagctgctttttctaatctcctgcctctccccaactgtccccctcttagcccctgcccttccagctctatccccttcctcctacctgaccaggccatgtcctctctgctcttccctaagtgtcctgtccctggggatcccagtctagaggcaagcagagagtagggtttattgcagtggttcatctgaaggctggattccatttgaagagcataaacagatgtggtccagggtaggaactcagagctgttgagcaggctacatctctaggggagtgttctggttgttttttcttaagcaagattagttcaggacattcccatgtcccagacacaaatgaaatgtctcctgagaaccattgcaacagaccaagaacaaaaccacctgagtatgtaggcgtgttattagcagcttaataccccaggctgagaacctggggaaaaaagtctttagaatttgggggagggtggggggagggagggcattgtggggaaggagagggaagaagggaggagcggtgcttgcctcatggctttggtttgaaaggtctctggccaaagcatctggccctggaccttctgatttgcacagtgatgttaactgacctggcacttcctcaaaaggtgattttgtccttagacctgccaagcggctgcagggtggtaggatcccagcatcccgaggccttggaaggccggatgccctgtgtcatccagacttcagcctctgagctgtcatggacccactctgatgaggagcttcctcctgattggagtgggaacctagggcatttctctcccttttcttttgcccttcccagtgccaggactcacctgtctgaccatagagcttgcaggcaggccaagctcttggttacctgtgccattcatggcccaagtgaaggaaccacattccaggtgggtgctggcagctctgaaggtgaggatagtgaaggaaaagcaatagcaataaacatttcatagactcatggaactgaagggaccttagcaatcatctcatccatttccctatttggcagatgaggaaactgaggcccagagaagcggaaaggacttccctagaccttacagtaaattagcattaaatgcagccttcctacctagtgggcaccttgcttacaaaaatttacctagggacggattggcttggttttgtaaaaattaagtcggcagcgcccatacctggtgagtctggaatggtctctgggctcctgtttctgctcttttcctccacggactccaaaggcgggggttgaagactgggcagaggctacatgggggcggatggcaggaacagaaattgcaaatgaagaaatagcatttggaaattctgtgaagacatctggaacttccgtcctgtacctgactccacctccaggagaaggagcaggtggactggccgaaaaggagaggccatgcttttaggacagtagcccctcatcccgagaggagaggaagaggaggaagacagtgggagtcatcaggagaggagaatgaggatgaggcccaggagacaggctcatctgggagaagagggacccctgggacgaggaggtccctgctagtctcagccaggagcctggattgcccagcagcagcctccggcacccagcgcttggctgggccagcagcccctctgggggtggggcacgaacattttattgtaaaaaatgggatcattgacaacatttgggactttaaaaaactgctttcatttaaaattcatgcaaacttggacatatccttaccccaacctcccatgtctccctaagggagggaaaaatcaggaaacccttgggttggaaggagctcagaagctgtctagccattcccaggagggtaaagcccatcagcctccttggcctagagccaggagtttgggggcccaccttcctgggcttccaaggaactttaggaccagtaagaaaaaattcagctgttctaaattatctgttctgggtgctgatgaggtttcactttaaaacaatagaaagttttccagtgttaattcactttttgcaaatacctccttccaccctctttggttttgtaaaggtgggtgaaggttgttctagattatgtcatacgtgtttgaaaaatgccaaaataataataatgataataataatagaaacctttggatttgtcaggtgcatcacagaggtcaaagcacttcacggcctttcatgtactcgccctgagagggacagggttagagttattacagtcaattgacaaatgaggaaacaggttatggaagggaacaggcccacagtgagcagcatgctggtatccgcnaggcttcccagaaccctgctgcctccatgtgggctggggtggaaccacagagaggagaaaggaagaagaggagacctaggaatgaccttgtaacttttgttctttcaacaccagtaagtaaaactaacagctggacctcacagttcacagaacagttgaacataaattatctggtttaacccgatgaaatagaggttatttctcctatttgatccataaggaaatcaaggcttggaaaagtcaagtgacttgctaataagtgacagagccactcgaatcccaggctgtctgctgtctcgttcccctccatctgatccccacacaggctcacgtactgaagcatctgtgctctgtgccctatcttagcacctactatgtaattcaagagcaaaggggggccccaaggtgaaaataaggcactgaaaggctgtggtctggaagagcccaggtccagcacccctttttcagtatgagccccagttcagccggcctcagcctcttgctgtgatggagatccacaagcctagccaagcttggggagtcactgcaaaaggactgagcccaggagagcggggacagtcatgtgcctctggtaggatgggcacagttactggtaaggtcacagagatctagtgggaggtaccataggtagatacctccaaagattctagatggcacggtggtcaagctagacaaaaagtcagagctggaagggccgtctcattgaaggcaggcaagcaagagaggacaagggatgtagccgcctgacagtgagctacagcactggccccaggatgcaaacccctctctcctcctcatgccactgcctctccccaagtgcaacacctatggccaggatcaggggtacagatggctcgttaccagccaacccttttgaattcttctacttctacctgaccccctctcctcactggcctggggtcaagaagtttgagtctgggagctggattgcctgcaaatagtgaaagcctgaaacataatggtttgccatgttttgaaaaaaaatgcatatttaatttcttcctcatgagataggacagttgctgttctttcttacctggcaatgaccctaaaatgtatatcctctttcctgaatatttagcagagacacacacacctgtccagagcgtttttggtatgcaaagtactttgacattggttgccaaagtcctccattttatagatgaaaaaactaaggctcaggaggcttgagacttgctaaaaggtcacacagcttggaagtgattcttcaaatcctctgctctttctgctgccacctgctgggtctcttggcaagcatggagggaggggctaactgtactttatagagctgggaagcccagtctctgagctgagcagatttgtatgaactgctttgggccaggacctgtaatgagccctggggagggacccagaggcacatctaactggcagcacaaggaggatgagaatttgcaactaaaggcctcacttggacaaaacactttggggtcacaatgcccaggaccgaagacatgttcaaggacagcacgaggcatctttctattgggagacccatgtccttggtaagcctgcacacctggcttcctaatccctgagagcctgcccactgtccagatccagtgagttggtacaaaacgtacagactgaagtccctgggcttgcttttcccatgggtgaggaccagaaccagactctgagcatccttacccctggccacccgaattgttccaagtttgaggtaccccgttcccagagatctgggggtccttctttggagggcttgctttgttctgatggccttcagaaaggaatcacatgaagtataaaaggacaggccccttggtcaccaagttttggctcctcatacagataggactcatccaggttcccagcgaggcactgactaagcgaggctcagagcttccatatcaaattcctcagctttgttctgtgcccagagggggtgggccccattctgggccctgtgaactttgtcttatatatcaccatctgtatcagaattcctcctcaattgcagttaagtgaaaatacgtggaagtctgcttttccatcctgtattctcccacatcactactggctgtgcggcccccgctgcttgccaagcttgggaatccagagaggggcagtagtagagtgggccagttgggacccacccgcagagctgaagaaacacgccagactaactgatgggattccacaccggagcctctgagcgcacaggcaggcatgccaagggggctgcagggtttgtcctttacttatctgcccctttcctagaaaactcctcgtttctgaaattaggcattatatggttccaggacccagccttcaaaattcctggcaggccagcttcaacattccatggccagccctgcctaagccagacttgggtcccagtccctcagtctctccagtggatatcttctgtggtgcatgctgttgagtccaacccaaaggccaaccgaggcacacaggagttgggactggctgccacaaagctagaaagggacaaaacagcacttgcttccctatggccacatggatagtccctggatatccttgctgtggtagaggtcctctacccattccagccactgatagcagggggattttccttcctaaggagaacagatgtaacagctttgcaaagtaccggcccataggaatcaaatgggtgagatcagctttgggcctgaccccagcaagaccagcatctccagaccccagcctttctcctcaggcctaagagagtcagggaaagagaggagactgtcccagagaccttctcctcgggtcagccagatagtctggatctatggtgtgactcaagctcctccttacccagggggggtaaggccaggcctctagctacttggagttgtctgtaataatcttgaaaggcccaagggcctgtccccatcctgacttaaaggcatctgcttccctgtttcatatcacatgacagagaaacctgttctcatggcatgtaacatccctgtgaagagagcgttgtatatgattttgtattttttaattcattttaatctacaggttggaatctaatttttaaattttattggaactccccccccaacccgaatttcgagagactattataacaaccatacaccacaataataaaaaaa

SEQ ID NO: 286559 - DNA, 2187 bp, Homo sapiens
taactggtaatagaattgattcaaatgtgccttaatataggcgctggggctaactgtactttatagagctgggaagcccagtctctgagctgagcagatttgtatgaactgctttgggccaggacctgtaatgagccctggggagggacccagaggcacatctaactggcagcacaaggaggatgagaatttgcaactaaaggcctcacttggacaaaacactttggggtcacaatgcccaggaccgaagacatgttcaaggacagcacgaggcatctttctattgggagacccatgtccttggtaagcctgcacacctggcttcctaatccctgagagcctgcccactgtccagatccagtgagttggtacaaaacgtacagactgaagtccctgggcttgcttttcccatgggtgaggaccagaaccagactctgagcatccttacccctggccacccgaattgttccaagtttgaggtaccccgttcccagagatctgggggtccttctttggagggcttgctttgttctgatggccttcagaaaggaatcacatgaagtataaaaggacaggccccttggtcaccaagttttggctcctcatacagataggactcatccaggttcccagcgaggcactgactaagcgaggctcagagcttccatatcaaattcctcagctttgttctgtgcccagagggggtgggccccattctgggccctgtgaactttgtcttatatatcaccatctgtatcagaattcctcctcaattgcagttaagtgaaaatacgtggaagtctgcttttccatcctgtattctcccacatcactactggctgtgcggcccccgctgcttgccaagcttgggaatccagagaggggcagtagtagagtgggccagttgggacccacccgcagagctgaagaaacacgccagactaactgatgggattccacaccggagcctctgagcgcacaggcaggcatgccaagggggctgcagggtttgtcctttacttatctgcccctttcctagaaaactcctcgtttctgaaattaggcattatatggttccaggacccagccttcaaaattcctggcaggccagcttcaacattccatggccagccctgcctaagccagacttgggtcccagtccctcagtctctccagtggatatcttctgtggtgcatgctgttgagtccaacccaaaggccaaccgaggcacacaggagttgggactggctgccacaaagctagaaagggacaaaacagcacttgcttccctatggccacatggatagtccctggatatccttgctgtggtagaggtcctctacccattccagccactgatagcagggggattttccttcctaaggagaacagatgtaacagctttgcaaagtaccggcccataggaatcaaatgggtgagatcagctttgggcctgaccccagcaagaccagcatctccagaccccagcctttctcctcaggcctaagagagtcagggaaagagaggagactgtcccagagaccttctcctcgggtcagccagatagtctggatctatggtgtgactcaagctcctccttacccagggggggtaaggccaggcctctagctacttggagttgtctgtaataatcttgaaaggcccaagggcctgtccccatcctgacttaaaggcatctgcttccctgtttcatatcacatgacagagaaacctgttctcatggcatgtaacatccctgtgaagagagcgttgtatatgattttgtattttttaattcattttaatctacaggttggaatctaatttttaaattttattggaactcacattttaaaaagaaataaaatttaaaataataataataataataataataataataaacctttgaccagtgtcttccaagtagtttgatcaaagaatttataggtgttttcaaaacacagtccggagtgtaaagattggaaagccccatggccttgcctgtgtgtatgaagtgtaaatctggttttgttttgttgttttggattcttttgggtttttgttttgttttgaagatcagacagtgatcactctgaaagattgaagccaagaatttgtaactatggtatttactgtaagctgtagaacactcaataactattaaaaaaaaaaattccccccca

SEQ ID NO: 286560 - DNA, 5662 bp, Homo sapiens
  misc_feature (2584)..(2584): n is a, c, g, or t
aggcgggaggcaggcagcttcactaggaaggcacagcgggctcccgagttgaggggagaagcctcctgaatatcactgacactgtttctttcccctttccctctgcagatctggagtcacacattgtatgcaactactcaagtcttacaccggtgctggagcagttccctagcagcaccacctctatttgcaagaagagacaacggaagtgcaagggtcactttatgcatctttaatggttttgatttttatttttggtttttgtaaaagctgctttttctaatctcctgcctctccccaactgtccccctcttagcccctgcccttccagctctatccccttcctcctacctgaccaggccatgtcctctctgctcttccctaagtgtcctgtccctggggatcccagtctagaggcaagcagagagtagggtttattgcagtggttcatctgaaggctggattccatttgaagagcataaacagatgtggtccagggtaggaactcagagctgttgagcaggctacatctctaggggagtgttctggttgttttttcttaagcaagattagttcaggacattcccatgtcccagacacaaatgaaatgtctcctgagaaccattgcaacagaccaagaacaaaaccacctgagtatgtaggcgtgttattagcagcttaataccccaggctgagaacctggggaaaaaagtctttagaatttgggggagggtggggggagggagggcattgtggggaaggagagggaagaagggaggagcggtgcttgcctcatggctttggtttgaaaggtctctggccaaagcatctggccctggaccttctgatttgcacagtgatgttaactgacctggcacttcctcaaaaggtgattttgtccttagacctgccaagcggctgcagggtggtaggatcccagcatcccgaggccttggaaggccggatgccctgtgtcatccagacttcagcctctgagctgtcatggacccactctgatgaggagcttcctcctgattggagtgggaacctagggcatttctctcccttttcttttgcccttcccagtgccaggactcacctgtctgaccatagagcttgcaggcaggccaagctcttggttacctgtgccattcatggcccaagtgaaggaaccacattccaggtgggtgctggcagctctgaaggtgaggatagtgaaggaaaagcaatagcaataaacatttcatagactcatggaactgaagggaccttagcaatcatctcatccatttccctatttggcagatgaggaaactgaggcccagagaagcggaaaggacttccctagaccttacagtaaattagcattaaatgcagccttcctacctagtgggcaccttgcttacaaaaatttacctagggacggattggcttggttttgtaaaaattaagtcggcagcgcccatacctggtgagtctggaatggtctctgggctcctgtttctgctcttttcctccacggactccaaaggcgggggttgaagactgggcagaggctacatgggggcggatggcaggaacagaaattgcaaatgaagaaatagcatttggaaattctgtgaagacatctggaacttccgtcctgtacctgactccacctccaggagaaggagcaggtggactggccgaaaaggagaggccatgcttttaggacagtagcccctcatcccgagaggagaggaagaggaggaagacagtgggagtcatcaggagaggagaatgaggatgaggcccaggagacaggctcatctgggagaagagggacccctgggacgaggaggtccctgctagtctcagccaggagcctggattgcccagcagcagcctccggcacccagcgcttggctgggccagcagcccctctgggggtggggcacgaacattttattgtaaaaaatgggatcattgacaacatttgggactttaaaaaactgctttcatttaaaattcatgcaaacttggacatatccttaccccaacctcccatgtctccctaagggagggaaaaatcaggaaacccttgggttggaaggagctcagaagctgtctagccattcccaggagggtaaagcccatcagcctccttggcctagagccaggagtttgggggcccaccttcctgggcttccaaggaactttaggaccagtaagaaaaaattcagctgttctaaattatctgttctgggtgctgatgaggtttcactttaaaacaatagaaagttttccagtgttaattcactttttgcaaatacctccttccaccctctttggttttgtaaaggtgggtgaaggttgttctagattatgtcatacgtgtttgaaaaatgccaaaataataataatgataataataatagaaacctttggatttgtcaggtgcatcacagaggtcaaagcacttcacggcctttcatgtactcgccctgagagggacagggttagagttattacagtcaattgacaaatgaggaaacaggttatggaagggaacaggcccacagtgagcagcatgctggtatccgcnaggcttcccagaaccctgctgcctccatgtgggctggggtggaaccacagagaggagaaaggaagaagaggagacctaggaatgaccttgtaacttttgttctttcaacaccagtaagtaaaactaacagctggacctcacagttcacagaacagttgaacataaattatctggtttaacccgatgaaatagaggttatttctcctatttgatccataaggaaatcaaggcttggaaaagtcaagtgacttgctaataagtgacagagccactcgaatcccaggctgtctgctgtctcgttcccctccatctgatccccacacaggctcacgtactgaagcatctgtgctctgtgccctatcttagcacctactatgtaattcaagagcaaaggggggccccaaggtgaaaataaggcactgaaaggctgtggtctggaagagcccaggtccagcacccctttttcagtatgagccccagttcagccggcctcagcctcttgctgtgatggagatccacaagcctagccaagcttggggagtcactgcaaaaggactgagcccaggagagcggggacagtcatgtgcctctggtaggatgggcacagttactggtaaggtcacagagatctagtgggaggtaccataggtagatacctccaaagattctagatggcacggtggtcaagctagacaaaaagtcagagctggaagggccgtctcattgaaggcaggcaagcaagagaggacaagggatgtagccgcctgacagtgagctacagcactggccccaggatgcaaacccctctctcctcctcatgccactgcctctccccaagtgcaacacctatggccaggatcaggggtacagatggctcgttaccagccaacccttttgaattcttctacttctacctgaccccctctcctcactggcctggggtcaagaagtttgagtctgggagctggattgcctgcaaatagtgaaagcctgaaacataatggtttgccatgttttgaaaaaaaatgcatatttaatttcttcctcatgagataggacagttgctgttctttcttacctggcaatgaccctaaaatgtatatcctctttcctgaatatttagcagagacacacacacctgtccagagcgtttttggtatgcaaagtactttgacattggttgccaaagtcctccattttatagatgaaaaaactaaggctcaggaggcttgagacttgctaaaaggtcacacagcttggaagtgattcttcaaatcctctgctctttctgctgccacctgctgggtctcttggcaagcatggagggaggggctaactgtactttatagagctgggaagcccagtctctgagctgagcagatttgtatgaactgctttgggccaggacctgtaatgagccctggggagggacccagaggcacatctaactggcagcacaaggaggatgagaatttgcaactaaaggcctcacttggacaaaacactttggggtcacaatgcccaggaccgaagacatgttcaaggacagcacgaggcatctttctattgggagacccatgtccttggtaagcctgcacacctggcttcctaatccctgagagcctgcccactgtccagatccagtgagttggtacaaaacgtacagactgaagtccctgggcttgcttttcccatgggtgaggaccagaaccagactctgagcatccttacccctggccacccgaattgttccaagtttgaggtaccccgttcccagagatctgggggtccttctttggagggcttgctttgttctgatggccttcagaaaggaatcacatgaagtataaaaggacaggccccttggtcaccaagttttggctcctcatacagataggactcatccaggttcccagcgaggcactgactaagcgaggctcagagcttccatatcaaattcctcagctttgttctgtgcccagagggggtgggccccattctgggccctgtgaactttgtcttatatatcaccatctgtatcagaattcctcctcaattgcagttaagtgaaaatacgtggaagtctgcttttccatcctgtattctcccacatcactactggctgtgcggcccccgctgcttgccaagcttgggaatccagagaggggcagtagtagagtgggccagttgggacccacccgcagagctgaagaaacacgccagactaactgatgggattccacaccggagcctctgagcgcacaggcaggcatgccaagggggctgcagggtttgtcctttacttatctgcccctttcctagaaaactcctcgtttctgaaattaggcattatatggttccaggacccagccttcaaaattcctggcaggccagcttcaacattccatggccagccctgcctaagccagacttgggtcccagtccctcagtctctccagtggatatcttctgtggtgcatgctgttgagtccaacccaaaggccaaccgaggcacacaggagttgggactggctgccacaaagctagaaagggacaaaacagcacttgcttccctatggccacatggatagtccctggatatccttgctgtggtagaggtcctctacccattccagccactgatagcagggggattttccttcctaaggagaacagatgtaacagctttgcaaagtaccggcccataggaatcaaatgggtgagatcagctttgggcctgaccccagcaagaccagcatctccagaccccagcctttctcctcaggcctaagagagtcagggaaagagaggagactgtcccagagaccttctcctcgggtcagccagatagtctggatctatggtgtgactcaagctcctccttacccagggggggtaaggccaggcctctagctacttggagttgtctgtaataatcttgaaaggcccaagggcctgtccccatcctgacttaaaggcatctgcttccctgtttcatatcacatgacagagaaacctgttctcatggcatgtaacatccctgtgaagagggagcagaaggggatcctctaagtcagc

SEQ ID NO: 286561 - DNA, 5649 bp, Homo sapiens
  misc_feature (2584)..(2584): n is a, c, g, or t
aggcgggaggcaggcagcttcactaggaaggcacagcgggctcccgagttgaggggagaagcctcctgaatatcactgacactgtttctttcccctttccctctgcagatctggagtcacacattgtatgcaactactcaagtcttacaccggtgctggagcagttccctagcagcaccacctctatttgcaagaagagacaacggaagtgcaagggtcactttatgcatctttaatggttttgatttttatttttggtttttgtaaaagctgctttttctaatctcctgcctctccccaactgtccccctcttagcccctgcccttccagctctatccccttcctcctacctgaccaggccatgtcctctctgctcttccctaagtgtcctgtccctggggatcccagtctagaggcaagcagagagtagggtttattgcagtggttcatctgaaggctggattccatttgaagagcataaacagatgtggtccagggtaggaactcagagctgttgagcaggctacatctctaggggagtgttctggttgttttttcttaagcaagattagttcaggacattcccatgtcccagacacaaatgaaatgtctcctgagaaccattgcaacagaccaagaacaaaaccacctgagtatgtaggcgtgttattagcagcttaataccccaggctgagaacctggggaaaaaagtctttagaatttgggggagggtggggggagggagggcattgtggggaaggagagggaagaagggaggagcggtgcttgcctcatggctttggtttgaaaggtctctggccaaagcatctggccctggaccttctgatttgcacagtgatgttaactgacctggcacttcctcaaaaggtgattttgtccttagacctgccaagcggctgcagggtggtaggatcccagcatcccgaggccttggaaggccggatgccctgtgtcatccagacttcagcctctgagctgtcatggacccactctgatgaggagcttcctcctgattggagtgggaacctagggcatttctctcccttttcttttgcccttcccagtgccaggactcacctgtctgaccatagagcttgcaggcaggccaagctcttggttacctgtgccattcatggcccaagtgaaggaaccacattccaggtgggtgctggcagctctgaaggtgaggatagtgaaggaaaagcaatagcaataaacatttcatagactcatggaactgaagggaccttagcaatcatctcatccatttccctatttggcagatgaggaaactgaggcccagagaagcggaaaggacttccctagaccttacagtaaattagcattaaatgcagccttcctacctagtgggcaccttgcttacaaaaatttacctagggacggattggcttggttttgtaaaaattaagtcggcagcgcccatacctggtgagtctggaatggtctctgggctcctgtttctgctcttttcctccacggactccaaaggcgggggttgaagactgggcagaggctacatgggggcggatggcaggaacagaaattgcaaatgaagaaatagcatttggaaattctgtgaagacatctggaacttccgtcctgtacctgactccacctccaggagaaggagcaggtggactggccgaaaaggagaggccatgcttttaggacagtagcccctcatcccgagaggagaggaagaggaggaagacagtgggagtcatcaggagaggagaatgaggatgaggcccaggagacaggctcatctgggagaagagggacccctgggacgaggaggtccctgctagtctcagccaggagcctggattgcccagcagcagcctccggcacccagcgcttggctgggccagcagcccctctgggggtggggcacgaacattttattgtaaaaaatgggatcattgacaacatttgggactttaaaaaactgctttcatttaaaattcatgcaaacttggacatatccttaccccaacctcccatgtctccctaagggagggaaaaatcaggaaacccttgggttggaaggagctcagaagctgtctagccattcccaggagggtaaagcccatcagcctccttggcctagagccaggagtttgggggcccaccttcctgggcttccaaggaactttaggaccagtaagaaaaaattcagctgttctaaattatctgttctgggtgctgatgaggtttcactttaaaacaatagaaagttttccagtgttaattcactttttgcaaatacctccttccaccctctttggttttgtaaaggtgggtgaaggttgttctagattatgtcatacgtgtttgaaaaatgccaaaataataataatgataataataatagaaacctttggatttgtcaggtgcatcacagaggtcaaagcacttcacggcctttcatgtactcgccctgagagggacagggttagagttattacagtcaattgacaaatgaggaaacaggttatggaagggaacaggcccacagtgagcagcatgctggtatccgcnaggcttcccagaaccctgctgcctccatgtgggctggggtggaaccacagagaggagaaaggaagaagaggagacctaggaatgaccttgtaacttttgttctttcaacaccagtaagtaaaactaacagctggacctcacagttcacagaacagttgaacataaattatctggtttaacccgatgaaatagaggttatttctcctatttgatccataaggaaatcaaggcttggaaaagtcaagtgacttgctaataagtgacagagccactcgaatcccaggctgtctgctgtctcgttcccctccatctgatccccacacaggctcacgtactgaagcatctgtgctctgtgccctatcttagcacctactatgtaattcaagagcaaaggggggccccaaggtgaaaataaggcactgaaaggctgtggtctggaagagcccaggtccagcacccctttttcagtatgagccccagttcagccggcctcagcctcttgctgtgatggagatccacaagcctagccaagcttggggagtcactgcaaaaggactgagcccaggagagcggggacagtcatgtgcctctggtaggatgggcacagttactggtaaggtcacagagatctagtgggaggtaccataggtagatacctccaaagattctagatggcacggtggtcaagctagacaaaaagtcagagctggaagggccgtctcattgaaggcaggcaagcaagagaggacaagggatgtagccgcctgacagtgagctacagcactggccccaggatgcaaacccctctctcctcctcatgccactgcctctccccaagtgcaacacctatggccaggatcaggggtacagatggctcgttaccagccaacccttttgaattcttctacttctacctgaccccctctcctcactggcctggggtcaagaagtttgagtctgggagctggattgcctgcaaatagtgaaagcctgaaacataatggtttgccatgttttgaaaaaaaatgcatatttaatttcttcctcatgagataggacagttgctgttctttcttacctggcaatgaccctaaaatgtatatcctctttcctgaatatttagcagagacacacacacctgtccagagcgtttttggtatgcaaagtactttgacattggttgccaaagtcctccattttatagatgaaaaaactaaggctcaggaggcttgagacttgctaaaaggtcacacagcttggaagtgattcttcaaatcctctgctctttctgctgccacctgctgggtctcttggcaagcatggagggaggggctaactgtactttatagagctgggaagcccagtctctgagctgagcagatttgtatgaactgctttgggccaggacctgtaatgagccctggggagggacccagaggcacatctaactggcagcacaaggaggatgagaatttgcaactaaaggcctcacttggacaaaacactttggggtcacaatgcccaggaccgaagacatgttcaaggacagcacgaggcatctttctattgggagacccatgtccttggtaagcctgcacacctggcttcctaatccctgagagcctgcccactgtccagatccagtgagttggtacaaaacgtacagactgaagtccctgggcttgcttttcccatgggtgaggaccagaaccagactctgagcatccttacccctggccacccgaattgttccaagtttgaggtaccccgttcccagagatctgggggtccttctttggagggcttgctttgttctgatggccttcagaaaggaatcacatgaagtataaaaggacaggccccttggtcaccaagttttggctcctcatacagataggactcatccaggttcccagcgaggcactgactaagcgaggctcagagcttccatatcaaattcctcagctttgttctgtgcccagagggggtgggccccattctgggccctgtgaactttgtcttatatatcaccatctgtatcagaattcctcctcaattgcagttaagtgaaaatacgtggaagtctgcttttccatcctgtattctcccacatcactactggctgtgcggcccccgctgcttgccaagcttgggaatccagagaggggcagtagtagagtgggccagttgggacccacccgcagagctgaagaaacacgccagactaactgatgggattccacaccggagcctctgagcgcacaggcaggcatgccaagggggctgcagggtttgtcctttacttatctgcccctttcctagaaaactcctcgtttctgaaattaggcattatatggttccaggacccagccttcaaaattcctggcaggccagcttcaacattccatggccagccctgcctaagccagacttgggtcccagtccctcagtctctccagtggatatcttctgtggtgcatgctgttgagtccaacccaaaggccaaccgaggcacacaggagttgggactggctgccacaaagctagaaagggacaaaacagcacttgcttccctatggccacatggatagtccctggatatccttgctgtggtagaggtcctctacccattccagccactgatagcagggggattttccttcctaaggagaacagatgtaacagctttgcaaagtaccggcccataggaatcaaatgggtgagatcagctttgggcctgaccccagcaagaccagcatctccagaccccagcctttctcctcaggcctaagagagtcagggaaagagaggagactgtcccagagaccttctcctcgggtcagccagatagtctggatctatggtgtgactcaagctcctccttacccagggggggtaaggccaggcctctagctacttggagttgtctgtaataatcttgaaaggcccaagggcctgtccccatcctgacttaaaggcatctgcttccctggtttacctggcagagccgttcttaatggatggaaccaatcctgggtagagactttgttatggatttgtttttt

SEQ ID NO: 286562 - DNA, 1702 bp, Homo sapiens
ggggcagattcaggtcctccccatgctccgccgggcttgctttgttctgatggccttcagaaaggaatcacatgaagtataaaaggacaggccccttggtcaccaagttttggctcctcatacagataggactcatccaggttcccagcgaggcactgactaagcgaggctcagagcttccatatcaaattcctcagctttgttctgtgcccagagggggtgggccccattctgggccctgtgaactttgtcttatatatcaccatctgtatcagaattcctcctcaattgcagttaagtgaaaatacgtggaagtctgcttttccatcctgtattctcccacatcactactggctgtgcggcccccgctgcttgccaagcttgggaatccagagaggggcagtagtagagtgggccagttgggacccacccgcagagctgaagaaacacgccagactaactgatgggattccacaccggagcctctgagcgcacaggcaggcatgccaagggggctgcagggtttgtcctttacttatctgcccctttcctagaaaactcctcgtttctgaaattaggcattatatggttccaggacccagccttcaaaattcctggcaggccagcttcaacattccatggccagccctgcctaagccagacttgggtcccagtccctcagtctctccagtggatatcttctgtggtgcatgctgttgagtccaacccaaaggccaaccgaggcacacaggagttgggactggctgccacaaagctagaaagggacaaaacagcacttgcttccctatggccacatggatagtccctggatatccttgctgtggtagaggtcctctacccattccagccactgatagcagggggattttccttcctaaggagaacagatgtaacagctttgcaaagtaccggcccataggaatcaaatgggtgagatcagctttgggcctgaccccagcaagaccagcatctccagaccccagcctttctcctcaggcctaagagagtcagggaaagagaggagactgtcccagagaccttctcctcgggtcagccagatagtctggatctatggtgtgactcaagctcctccttacccagggggggtaaggccaggcctctagctacttggagttgtctgtaataatcttgaaaggcccaagggcctgtccccatcctgacttaaaggcatctgcttccctgtttcatatcacatgacagagaaacctgttctcatggcatgtaacatccctgtgaagagagcgttgtatatgattttgtattttttaattcattttaatctacaggttggaatctaatttttaaattttattggaactcacattttaaaaagaaataaaatttaaaataataataataataataataataataataaacctttgaccagtgtcttccaagtagtttgatcaaagaatttataggtgttttcaaaacacagtccggagtgtaaagattggaaagccccatggccttgcctgtgtgtatgaagtgtaaatctggttttgttttgttgttttggattcttttgggtttttgttttgttttgaagatcagacagtgatcactctgaaagattgaagccaagaatttgtaactatggtatttactgtaagctgtagaacactcaataactattaaaaaaaaaaattccccccca

SEQ ID NO: 286563 - DNA, 1794 bp, Homo sapiens
tctgtacagcgactacgggagtgacaatgtacaaccagactctgagcatccttacccctggccacccgaattgttccaagtttgaggtaccccgttcccagagatctgggggtccttctttggagggcttgctttgttctgatggccttcagaaaggaatcacatgaagtataaaaggacaggccccttggtcaccaagttttggctcctcatacagataggactcatccaggttcccagcgaggcactgactaagcgaggctcagagcttccatatcaaattcctcagctttgttctgtgcccagagggggtgggccccattctgggccctgtgaactttgtcttatatatcaccatctgtatcagaattcctcctcaattgcagttaagtgaaaatacgtggaagtctgcttttccatcctgtattctcccacatcactactggctgtgcggcccccgctgcttgccaagcttgggaatccagagaggggcagtagtagagtgggccagttgggacccacccgcagagctgaagaaacacgccagactaactgatgggattccacaccggagcctctgagcgcacaggcaggcatgccaagggggctgcagggtttgtcctttacttatctgcccctttcctagaaaactcctcgtttctgaaattaggcattatatggttccaggacccagccttcaaaattcctggcaggccagcttcaacattccatggccagccctgcctaagccagacttgggtcccagtccctcagtctctccagtggatatcttctgtggtgcatgctgttgagtccaacccaaaggccaaccgaggcacacaggagttgggactggctgccacaaagctagaaagggacaaaacagcacttgcttccctatggccacatggatagtccctggatatccttgctgtggtagaggtcctctacccattccagccactgatagcagggggattttccttcctaaggagaacagatgtaacagctttgcaaagtaccggcccataggaatcaaatgggtgagatcagctttgggcctgaccccagcaagaccagcatctccagaccccagcctttctcctcaggcctaagagagtcagggaaagagaggagactgtcccagagaccttctcctcgggtcagccagatagtctggatctatggtgtgactcaagctcctccttacccagggggggtaaggccaggcctctagctacttggagttgtctgtaataatcttgaaaggcccaagggcctgtccccatcctgacttaaaggcatctgcttccctgtttcatatcacatgacagagaaacctgttctcatggcatgtaacatccctgtgaagagagcgttgtatatgattttgtattttttaattcattttaatctacaggttggaatctaatttttaaattttattggaactcacattttaaaaagaaataaaatttaaaataataataataataataataataataataaacctttgaccagtgtcttccaagtagtttgatcaaagaatttataggtgttttcaaaacacagtccggagtgtaaagattggaaagccccatggccttgcctgtgtgtatgaagtgtaaatctggttttgttttgttgttttggattcttttgggtttttgttttgttttgaagatcagacagtgatcactctgaaagattgaagccaagaatttgtaactatggtatttactgtaagctgtagaacactcaataactattaaaaaaaaaaattccccccca

SEQ ID NO: 286564 - DNA, 1390 bp, Homo sapiens
aaggatccgcagtagtggcagcagtagtggtgccactactggctgtgcggcccccgctgcttgccaagcttgggaatccagagaggggcagtagtagagtgggccagttgggacccacccgcagagctgaagaaacacgccagactaactgatgggattccacaccggagcctctgagcgcacaggcaggcatgccaagggggctgcagggtttgtcctttacttatctgcccctttcctagaaaactcctcgtttctgaaattaggcattatatggttccaggacccagccttcaaaattcctggcaggccagcttcaacattccatggccagccctgcctaagccagacttgggtcccagtccctcagtctctccagtggatatcttctgtggtgcatgctgttgagtccaacccaaaggccaaccgaggcacacaggagttgggactggctgccacaaagctagaaagggacaaaacagcacttgcttccctatggccacatggatagtccctggatatccttgctgtggtagaggtcctctacccattccagccactgatagcagggggattttccttcctaaggagaacagatgtaacagctttgcaaagtaccggcccataggaatcaaatgggtgagatcagctttgggcctgaccccagcaagaccagcatctccagaccccagcctttctcctcaggcctaagagagtcagggaaagagaggagactgtcccagagaccttctcctcgggtcagccagatagtctggatctatggtgtgactcaagctcctccttacccagggggggtaaggccaggcctctagctacttggagttgtctgtaataatcttgaaaggcccaagggcctgtccccatcctgacttaaaggcatctgcttccctgtttcatatcacatgacagagaaacctgttctcatggcatgtaacatccctgtgaagagagcgttgtatatgattttgtattttttaattcattttaatctacaggttggaatctaatttttaaattttattggaactcacattttaaaaagaaataaaatttaaaataataataataataataataataataataaacctttgaccagtgtcttccaagtagtttgatcaaagaatttataggtgttttcaaaacacagtccggagtgtaaagattggaaagccccatggccttgcctgtgtgtatgaagtgtaaatctggttttgttttgttgttttggattcttttgggtttttgttttgttttgaagatcagacagtgatcactctgaaagattgaagccaagaatttgtaactatggtatttactgtaagctgtagaacactcaataactattaaaaaaaaaaattccccccca

SEQ ID NO: 286565 - DNA, 2245 bp, Homo sapiens
gcagacttgatggctcccggccccccgacccggcccggcctggcggcgccgcaccggccacctcctgtctcacctgccgccactgcccgccgcgaccgccctctacacccggtgtcccgcgaccggaagagagcaaggccgcgccgcggagcaccacgggatcgaggaagactccgcccgcacccggccgcacggaggtcaccgtggagcggaaaagggtagcgctgcgaacgtcgtaaaatgccgggccgggctgctttccggcaggcgttggagaggctgctttccggcggcgccgggcgagaagcgcgactggagtctggggctgcggcttcccagaggcgcgagtcgcttttccaggagccgaggcccaaacggggccgggcctgaagggtcccccgccagcccgcggccgcgccatcaatcgccgccgcctcgtcccgcttctcggctgaggcgccgcgcggccaggcagcgggtccaggcctcagccgcgcgcccaggggcctccggggccctcccgggtcagcatgcccggggtgaaactgaccacccaggcctactgcaagatggtgctgcacggcgccaagtacccgcactgcgccgtcaacgggctcctggtggccgagaagcagaagccgcgtaaggagcacctccccctgggcggccccggcgcccaccacaccctcttcgtggactgcatccccctcttccacggcaccctggccctcgcccccatgctggaggtggctctcaccctgattgattcatggtgcaaagatcatagctacgtgattgctggttattatcaagctaatgagcgagtaaaggatgccagtccaaaccaggttgcagagaaggtggcctccagaatcgccgagggcttcagcgacactgcgctcatcatggtagacaacaccaagtttacgatggactgcgtagcgcctacgatccacgtgtacgagcaccatgagaacagatggcggtgcagagacccacaccatgactactgtgaagactggccagaggcacagaggatctcagcctcgctcctggacagccggtcctacgagacgctcgtggatttcgataaccacctggatgacattcggaatgactggacaaacccagagatcaataaagctgtcctacacttgtgctaggcaggcaccgctgtgactgggctccgggcctttccactacgttgaagaagaaaacctatttttaaatgtaaataaaatatctggtagcctgtgtggaaagctgaccgttttaagaagtggcatgtgccttgaaagggggcagaatgttcagtcggtcgtgtttttaacacagagtctctagaagaggtgcagacatcccgtctgactgtccctgtggactctctcagttgtatgttgctataatcctccaaatcaaagctctttctgcttgtgcaagattgttcctattaaacagttttaactaaccttttataatctggagagaatactttttaaggcttttgaactatctttttttaaaaaaaaaaaaaagcccacatcttatactccaatgagtgtgtttgtgagtttttatcctgtttgaattttgatgtcgtccaggcgtcctgggatcagggtagacacgtggagtgctggtgctgagctgtttgagaagctctgtgtgggtgtttctgtggtcaggtaggctgggctgtgaacagcactgctccacatggtgtcggctcacagagccaccgcaactctgcccagcgggagtgacaccactgatgccacagaagcctttatcgttaggggcaaaagcagacatctctggtagcaggagctcagtgtggtgctcttcagccacgcagaaagctcacgtgcctgcagggccaggaaagggaaatgatcgtttcttttgtattaggaaaaacaagacttagacttcccgagttgtgcagagtgacgtctgtactttttatacttagaacatttggtcaagttttgtaaccaaaccttagggaattgagagggaaactttatggtacgtttaccttttttcctttttatatgaattattttgtacaaagttcagagagcggtacctttcctactgtcttttctttgactccatggaggaatttgtaacgatcggtgtgacctgaaagggtttgtgatacagcggtcactattttctcttaacacataggaaaaaagttcagacatcgctacaataaatgtgctttatttgatccaccaaa

SEQ ID NO: 286566 - DNA, 576 bp, Homo sapiens
acccacaggtcttcccaccccaggcgctagagcacagacactcttcccaggcctgtgctttgatgtatctgtggccactcagaaagcttcagtcatctgcctccaactttctcagaattccacgtgaaaggcgtcccttccatgtattaaccatgtcttctatgctctgtatacctcttcatgcgtttgaaatgcacatgtttctcagtactctgcaccatctctgttcataccactgtgcatgtggctggccttctctcttgatgctgttacaagccgcccgttttcactgttagatgctgacttcttcatgtttgacccgtagtgactactgtgaagactggccagaggcacagaggatctcagcctcgctcctggacagccggtcctacgagacgctcgtggatttcgataaccacctggatgacattcggaatgactggacaaacccagagatcaataaagctgtcctacacttgtgctaggcaggcaccgctgtgactgggctccgggcctttccactacgttgaagaagaaaacctatttttaaatgtaaataaaatatctggtagcctg

SEQ ID NO: 286567 - DNA, 657 bp, Homo sapiens
cggcacgaggcacgtgcagcctgttggctccgccagtctttctgtcattgcttgttaagtctcagtggtgttgactgtgccttttgtaaacagtgttgaatggcattaactggaatgtggtagcctgactatttctttgacagtccaaaccaggttgcagagaaggtggcctccagaatcgccgagggcttcagcgacactgcgctcatcatggtaagtcgcttctgtgcagcatgtgggaggcccttgcgcctcctctcaccaacctggagcttgctctgcggcggtttcctttccgctaaccccttcactcatttatctgcttgagaccattgccgcctcttgcagttttctctcagctgcagaccagttgaatcccaggccatggcttctgtgcttccgcatcactacacaagtgggagtggggtcccctgccagccgcagcacctgggaacttgttagaaatgcgaattcccaggcacccaccccagaccccactgaatcagaaatgcgggggtttagcccagcagtccatgttaagacaccttctagatgattctggtctgaacatgccaagtgtgagaagcacaattagaacagccagcacagcctctaggggcacagggaaggaaggtccttgtatgtgagcagatgaca

SEQ ID NO: 286568 - DNA, 806 bp, Homo sapiens
aaaaaaaagcaaaaaaaaacactaaaatgtaactgggtgtggtggcctgtgcctatagtcccagctactcaggaggcagaggtgggattgcttgagcctaggaatttgaggttacagtgggctatgattgcatcactacactccagctagggcaacagagcaagaccctatctctaccaagccagtctttctgtcattgcttgttaagtctcagtggtgttgactgtgccttttgtaaacagtgttgaatggcattaactggaatgtggtagcctgactatttctttgacagtccaaaccaggttgcagagaaggtggcctccagaatcgccgagggcttcagcgacactgcgctcatcatggtaagtcgcttctgtgcagcatgtgggaggcccttgcgcctcctctcaccaacctggagcttgctctgcggcggtttcctttccgctaaccccttcactcatttatctgcttgagaccattgccgcctcttgcagttttctctcagctgcagaccagttgaatcccaggccatggcttctgtgcttccgcatcactacacaagtgggagtggggtcccctgccagccgcagcacctgggaacttgttagaaatgcgaattcccaggcacccaccccagaccccactgaatcagaaatgcgggggtttagcccagcagtccatgttaagacaccttctagatgattctggtctgaacatgccaagtgtgagaagcacaattagaacagccagcacagcctctaggggcacagggaaggaaggtccttgtatgtgagcagatgaca

SEQ ID NO: 286569 - DNA, 1467 bp, Homo sapiens
gcagacttgatggctcccggccccccgacccggcccggcctggcggcgccgcaccggccacctcctgtctcacctgccgccactgcccgccgcgaccgccctctacacccggtgtcccgcgaccggaagagagcaaggccgcgccgcggagcaccacgggatcgaggaagactccgcccgcacccggccgcacggaggtcaccgtggagcggaaaagggtagcgctgcgaacgtcgtaaaatgccgggccgggctgctttccggcaggcgttggagaggctgctttccggcggcgccgggcgagaagcgcgactggagtctggggctgcggcttcccagaggcgcgagtcgcttttccaggagccgaggcccaaacggggccgggcctgaagggtcccccgccagcccgcggccgcgccatcaatcgccgccgcctcgtcccgcttctcggctgaggcgccgcgcggccaggcagcgggtccaggcctcagccgcgcgcccaggggcctccggggccctcccgggtcagcatgcccggggtgaaactgaccacccaggcctactgcaagatggtgctgcacggcgccaagtacccgcactgcgccgtcaacgggctcctggtggccgagaagcagaagccgcgtaaggagcacctccccctgggcggccccggcgcccaccacaccctcttcgtggactgcatccccctcttccacggcaccctggccctcgcccccatgctggaggtggctctcaccctgattgattcatggtgcaaagatcatagctacgtgattgctggttattatcaagctaatgagcgagtaaaggatgccagtccaaaccaggttgcagagaaggtggcctccagaatcgccgagggcttcagcgacactgcgctcatcatggtagacaacaccaagtttacgatggactgcgtagcgcctacgatccacgtgtacgagcaccatgagaacagatggcggtgcagagacccacaccatgactactgtgaagactggccagaggcacagaggatctcagcctcgctcctggacagccggtcctacgagacgctcgtggatttcgataaccacctggatgacattcggaatgactggacaaacccagagatcaataaagctgtcctacacttgtgctaggcaggcaccgctgtgactgggctccgggcctttccactacgttgaagaagaaaacctatttttaaatgtaaataaaatatctggtagcctgtgtggaaagctgaccgttttaagaagtggcatgtgccttgaaagggggcagaatgttcagtcggtcgtgtttttaacacagagtctctagaagaggtgcagacatcccgtctgactgtccctgtggactctctcagttgtatgttgctataatcctccaaatcaaagctctttctgcttgtgcaagattgttcctattaaacagttttaacta

SEQ ID NO: 286570 - DNA, 1254 bp, Homo sapiens
gcagacttgatggctcccggccccccgacccggcccggcctggcggcgccgcaccggccacctcctgtctcacctgccgccactgcccgccgcgaccgccctctacacccggtgtcccgcgaccggaagagagcaaggccgcgccgcggagcaccacgggatcgaggaagactccgcccgcacccggccgcacggaggtcaccgtggagcggaaaagggtagcgctgcgaacgtcgtaaaatgccgggccgggctgctttccggcaggcgttggagaggctgctttccggcggcgccgggcgagaagcgcgactggagtctggggctgcggcttcccagaggcgcgagtcgcttttccaggagccgaggcccaaacggggccgggcctgaagggtcccccgccagcccgcggccgcgccatcaatcgccgccgcctcgtcccgcttctcggctgaggcgccgcgcggccaggcagcgggtccaggcctcagccgcgcgcccaggggcctccggggccctcccgggtcagcatgcccggggtgaaactgaccacccaggcctactgcaagatggtgctgcacggcgccaagtacccgcactgcgccgtcaacgggctcctggtggccgagaagcagaagccgcgtaaggagcacctccccctgggcggccccggcgcccaccacaccctcttcgtggactgcatccccctcttccacggcaccctggccctcgcccccatgctggaggtggctctcaccctgattgattcatggtgcaaagatcatagctacgtgattgctggttattatcaagctaatgagcgagtaaaggatgccagtccaaaccaggttgcagagaaggtggcctccagaatcgccgagggcttcagcgacactgcgctcatcatggtagacaacaccaagtttacgatggactgcgtagcgcctacgatccacgtgtacgagcaccatgagaacagatggcggtgcagagacccacaccatgactactgtgaagactggccagaggcacagaggatctcagcctcgctcctggacagccggtcctacgagacgctcgtggatttcgataaccacctggatgacattcggaatgactggacaaacccagagatcaataaagctgtcctacacttgtgctaggcaggcaccgctgtgactgggctccgggcctttccactacgttgaagaagaaaacctatttttaaatgtaaataaaatatctggtagcctg

SEQ ID NO: 286571 - DNA, 2150 bp, Homo sapiens
gcagacttgatggctcccggccccccgacccggcccggcctggcggcgccgcaccggccacctcctgtctcacctgccgccactgcccgccgcgaccgccctctacacccggtgtcccgcgaccggaagagagcaaggccgcgccgcggagcaccacgggatcgaggaagactccgcccgcacccggccgcacggaggtcaccgtggagcggaaaagggtagcgctgcgaacgtcgtaaaatgccgggccgggctgctttccggcaggcgttggagaggctgctttccggcggcgccgggcgagaagcgcgactggagtctggggctgcggcttcccagaggcgcgagtcgcttttccaggagccgaggcccaaacggggccgggcctgaagggtcccccgccagcccgcggccgcgccatcaatcgccgccgcctcgtcccgcttctcggctgaggcgccgcgcggccaggcagcgggtccaggcctcagccgcgcgcccaggggcctccggggccctcccgggtcagcatgcccggggtgaaactgaccacccaggcctactgcaagatggtgctgcacggcgccaagtacccgcactgcgccgtcaacgggctcctggtggccgagaagcagaagccgcgtaaggagcacctccccctgggcggccccggcgcccaccacaccctcttcgtggactgcatccccctcttccacggcaccctggccctcgcccccatgctggaggtggctctcaccctgattgattcatggtgcaaagatcatagctacgtgattgctggttattatcaagctaatgagcgagtaaaggatgccagtccaaaccaggttgcagagaaggtggcctccagaatcgccgagggcttcagcgacactgcgctcatcatgtgactactgtgaagactggccagaggcacagaggatctcagcctcgctcctggacagccggtcctacgagacgctcgtggatttcgataaccacctggatgacattcggaatgactggacaaacccagagatcaataaagctgtcctacacttgtgctaggcaggcaccgctgtgactgggctccgggcctttccactacgttgaagaagaaaacctatttttaaatgtaaataaaatatctggtagcctgtgtggaaagctgaccgttttaagaagtggcatgtgccttgaaagggggcagaatgttcagtcggtcgtgtttttaacacagagtctctagaagaggtgcagacatcccgtctgactgtccctgtggactctctcagttgtatgttgctataatcctccaaatcaaagctctttctgcttgtgcaagattgttcctattaaacagttttaactaaccttttataatctggagagaatactttttaaggcttttgaactatctttttttaaaaaaaaaaaaaagcccacatcttatactccaatgagtgtgtttgtgagtttttatcctgtttgaattttgatgtcgtccaggcgtcctgggatcagggtagacacgtggagtgctggtgctgagctgtttgagaagctctgtgtgggtgtttctgtggtcaggtaggctgggctgtgaacagcactgctccacatggtgtcggctcacagagccaccgcaactctgcccagcgggagtgacaccactgatgccacagaagcctttatcgttaggggcaaaagcagacatctctggtagcaggagctcagtgtggtgctcttcagccacgcagaaagctcacgtgcctgcagggccaggaaagggaaatgatcgtttcttttgtattaggaaaaacaagacttagacttcccgagttgtgcagagtgacgtctgtactttttatacttagaacatttggtcaagttttgtaaccaaaccttagggaattgagagggaaactttatggtacgtttaccttttttcctttttatatgaattattttgtacaaagttcagagagcggtacctttcctactgtcttttctttgactccatggaggaatttgtaacgatcggtgtgacctgaaagggtttgtgatacagcggtcactattttctcttaacacataggaaaaaagttcagacatcgctacaataaatgtgctttatttgatccaccaaa

SEQ ID NO: 286572 - DNA, 2029 bp, Homo sapiens
gcagacttgatggctcccggccccccgacccggcccggcctggcggcgccgcaccggccacctcctgtctcacctgccgccactgcccgccgcgaccgccctctacacccggtgtcccgcgaccggaagagagcaaggccgcgccgcggagcaccacgggatcgaggaagactccgcccgcacccggccgcacggaggtcaccgtggagcggaaaagggtagcgctgcgaacgtcgtaaaatgccgggccgggctgctttccggcaggcgttggagaggctgctttccggcggcgccgggcgagaagcgcgactggagtctggggctgcggcttcccagaggcgcgagtcgcttttccaggagccgaggcccaaacggggccgggcctgaagggtcccccgccagcccgcggccgcgccatcaatcgccgccgcctcgtcccgcttctcggctgaggcgcccaccacaccctcttcgtggactgcatccccctcttccacggcaccctggccctcgcccccatgctggaggtggctctcaccctgattgattcatggtgcaaagatcatagctacgtgattgctggttattatcaagctaatgagcgagtaaaggatgccagtccaaaccaggttgcagagaaggtggcctccagaatcgccgagggcttcagcgacactgcgctcatcatggtagacaacaccaagtttacgatggactgcgtagcgcctacgatccacgtgtacgagcaccatgagaacagatggcggtgcagagacccacaccatgactactgtgaagactggccagaggcacagaggatctcagcctcgctcctggacagccggtcctacgagacgctcgtggatttcgataaccacctggatgacattcggaatgactggacaaacccagagatcaataaagctgtcctacacttgtgctaggcaggcaccgctgtgactgggctccgggcctttccactacgttgaagaagaaaacctatttttaaatgtaaataaaatatctggtagcctgtgtggaaagctgaccgttttaagaagtggcatgtgccttgaaagggggcagaatgttcagtcggtcgtgtttttaacacagagtctctagaagaggtgcagacatcccgtctgactgtccctgtggactctctcagttgtatgttgctataatcctccaaatcaaagctctttctgcttgtgcaagattgttcctattaaacagttttaactaaccttttataatctggagagaatactttttaaggcttttgaactatctttttttaaaaaaaaaaaaaagcccacatcttatactccaatgagtgtgtttgtgagtttttatcctgtttgaattttgatgtcgtccaggcgtcctgggatcagggtagacacgtggagtgctggtgctgagctgtttgagaagctctgtgtgggtgtttctgtggtcaggtaggctgggctgtgaacagcactgctccacatggtgtcggctcacagagccaccgcaactctgcccagcgggagtgacaccactgatgccacagaagcctttatcgttaggggcaaaagcagacatctctggtagcaggagctcagtgtggtgctcttcagccacgcagaaagctcacgtgcctgcagggccaggaaagggaaatgatcgtttcttttgtattaggaaaaacaagacttagacttcccgagttgtgcagagtgacgtctgtactttttatacttagaacatttggtcaagttttgtaaccaaaccttagggaattgagagggaaactttatggtacgtttaccttttttcctttttatatgaattattttgtacaaagttcagagagcggtacctttcctactgtcttttctttgactccatggaggaatttgtaacgatcggtgtgacctgaaagggtttgtgatacagcggtcactattttctcttaacacataggaaaaaagttcagacatcgctacaataaatgtgctttatttgatccaccaaa

SEQ ID NO: 286573 - DNA, 1231 bp, Homo sapiens
agaccattatttcttctttattgatctcagcctcgctcctggacagccggtcctacgagacgctcgtggatttcgataaccacctggatgacattcggaatgactggacaaacccagagatcaataaagctgtcctacacttgtgctaggcaggcaccgctgtgactgggctccgggcctttccactacgttgaagaagaaaacctatttttaaatgtaaataaaatatctggtagcctgtgtggaaagctgaccgttttaagaagtggcatgtgccttgaaagggggcagaatgttcagtcggtcgtgtttttaacacagagtctctagaagaggtgcagacatcccgtctgactgtccctgtggactctctcagttgtatgttgctataatcctccaaatcaaagctctttctgcttgtgcaagattgttcctattaaacagttttaactaaccttttataatctggagagaatactttttaaggcttttgaactatctttttttaaaaaaaaaaaaaagcccacatcttatactccaatgagtgtgtttgtgagtttttatcctgtttgaattttgatgtcgtccaggcgtcctgggatcagggtagacacgtggagtgctggtgctgagctgtttgagaagctctgtgtgggtgtttctgtggtcaggtaggctgggctgtgaacagcactgctccacatggtgtcggctcacagagccaccgcaactctgcccagcgggagtgacaccactgatgccacagaagcctttatcgttaggggcaaaagcagacatctctggtagcaggagctcagtgtggtgctcttcagccacgcagaaagctcacgtgcctgcagggccaggaaagggaaatgatcgtttcttttgtattaggaaaaacaagacttagacttcccgagttgtgcagagtgacgtctgtactttttatacttagaacatttggtcaagttttgtaaccaaaccttagggaattgagagggaaactttatggtacgtttaccttttttcctttttatatgaattattttgtacaaagttcagagagcggtacctttcctactgtcttttctttgactccatggaggaatttgtaacgatcggtgtgacctgaaagggtttgtgatacagcggtcactattttctcttaacacataggaaaaaagttcagacatcgctacaataaatgtgctttatttgatccaccaaa

SEQ ID NO: 286574 - DNA, 1401 bp, Homo sapiens
aattgcccgaagggcattcagactagtctgcgctcatgttattgtacactacatccaacgtttacggaatggactgcgtacggcctatcttcaatccacgtatacttactcaccctaatgtaggcagcagtatggcggtgcaaggagacgcacacccatgagcatacgtgtagtaaggactgtgccgctctcttttacaagatctcactctcctgaccggtcctacgagacgctcgtggatttcgataaccacctggatgacattcggaatgactggacaaacccagagatcaataaagctgtcctacacttgtgctaggcaggcaccgctgtgactgggctccgggcctttccactacgttgaagaagaaaacctatttttaaatgtaaataaaatatctggtagcctgtgtggaaagctgaccgttttaagaagtggcatgtgccttgaaagggggcagaatgttcagtcggtcgtgtttttaacacagagtctctagaagaggtgcagacatcccgtctgactgtccctgtggactctctcagttgtatgttgctataatcctccaaatcaaagctctttctgcttgtgcaagattgttcctattaaacagttttaactaaccttttataatctggagagaatactttttaaggcttttgaactatctttttttaaaaaaaaaaaaaagcccacatcttatactccaatgagtgtgtttgtgagtttttatcctgtttgaattttgatgtcgtccaggcgtcctgggatcagggtagacacgtggagtgctggtgctgagctgtttgagaagctctgtgtgggtgtttctgtggtcaggtaggctgggctgtgaacagcactgctccacatggtgtcggctcacagagccaccgcaactctgcccagcgggagtgacaccactgatgccacagaagcctttatcgttaggggcaaaagcagacatctctggtagcaggagctcagtgtggtgctcttcagccacgcagaaagctcacgtgcctgcagggccaggaaagggaaatgatcgtttcttttgtattaggaaaaacaagacttagacttcccgagttgtgcagagtgacgtctgtactttttatacttagaacatttggtcaagttttgtaaccaaaccttagggaattgagagggaaactttatggtacgtttaccttttttcctttttatatgaattattttgtacaaagttcagagagcggtacctttcctactgtcttttctttgactccatggaggaatttgtaacgatcggtgtgacctgaaagggtttgtgatacagcggtcactattttctcttaacacataggaaaaaagttcagacatcgctacaataaatgtgctttatttgatccaccaaa

SEQ ID NO: 286575 - DNA, 902 bp, Homo sapiens
gcagacttgatggctcccggccccccgacccggcccggcctggcggcgccgcaccggccacctcctgtctcacctgccgccactgcccgccgcgaccgccctctacacccggtgtcccgcgaccggaagagagcaaggccgcgccgcggagcaccacgggatcgaggaagactccgcccgcacccggccgcacggaggtcaccgtggagcggaaaagggtagcgctgcgaacgtcgtaaaatgccgggccgggctgctttccggcaggcgttggagaggctgctttccggcggcgccgggcgagaagcgcgactggagtctggggctgcggcttcccagaggcgcgagtcgcttttccaggagccgaggcccaaacggggccgggcctgaagggtcccccgccagcccgcggccgcgccatcaatcgccgccgcctcgtcccgcttctcggctgaggcgccgcgcggccaggcagcgggtccaggcctcagccgcgcgcccaggggcctccggggccctcccgggtcagcatgcccggggtgaaactgaccacccaggcctactgcaagatggtgctgcacggcgccaagtacccgcactgcgccgtcaacgggctcctggtggccgagaagcagaagccgcgtaaggagcacctccccctgggcggccccggcgcccaccacaccctcttcgtggactgcatccccctcttccacggcaccctggccctcgcccccatgctggaggtggctctcaccctgattgattcatggtgcaaagatcatagctacgtgattgctggttattatcaagctaatgagcgagtaaaggatgccagtccaaaccaggttgcgagagaaggtggcctcctttactcgctcattagcttcatcgtgccgaat

SEQ ID NO: 286576 - DNA, 915 bp, Homo sapiens
gcagacttgatggctcccggccccccgacccggcccggcctggcggcgccgcaccggccacctcctgtctcacctgccgccactgcccgccgcgaccgccctctacacccggtgtcccgcgaccggaagagagcaaggccgcgccgcggagcaccacgggatcgaggaagactccgcccgcacccggccgcacggaggtcaccgtggagcggaaaagggtagcgctgcgaacgtcgtaaaatgccgggccgggctgctttccggcaggcgttggagaggctgctttccggcggcgccgggcgagaagcgcgactggagtctggggctgcggcttcccagaggcgcgagtcgcttttccaggagccgaggcccaaacggggccgggcctgaagggtcccccgccagcccgcggccgcgccatcaatcgccgccgcctcgtcccgcttctcggctgaggcgccgcgcggccaggcagcgggtccaggcctcagccgcgcgcccaggggcctccggggccctcccgggtcagcatgcccggggtgaaactgaccacccaggcctactgcaagatggtgctgcacggcgccaagtacccgcactgcgccgtcaacgggctcctggtggccgagaagcagaagccgcgtaaggagcacctccccctgggcggccccggcgcccaccacaccctcttcgtggactgcatccccctcttccacggcaccctggccctcgcccccatgctggaggtggctctcaccctgattgattcatggtgcaaagatcatagctacgtgattgctggttattatcaagctaatgagcgagtaaaggatgccaggtacgtggatgcagaaccctctgtgggcgaggaagtgagcacgtgttgggcagaccccgtctctcgtgtgcttttcg

SEQ ID NO: 286577 - DNA, 1416 bp, Homo sapiens
gcagacttgatggctcccggccccccgacccggcccggcctggcggcgccgcaccggccacctcctgtctcacctgccgccactgcccgccgcgaccgccctctacacccggtgtcccgcgaccggaagagagcaaggccgcgccgcggagcaccacgggatcgaggaagactccgcccgcacccggccgcacggaggtcaccgtggagcggaaaagggtagcgctgcgaacgtcgtaaaatgccgggccgggctgctttccggcaggcgttggagaggctgctttccggcggcgccgggcgagaagcgcgactggagtctggggctgcggcttcccagaggcgcgagtcgcttttccaggagccgaggcccaaacggggccgggcctgaagggtcccccgccagcccgcggccgcgccatcaatcgccgccgcctcgtcccgcttctcggctgaggcgccgcgcggccaggcagcgggtccaggcctcagccgcgcgcccaggggcctccggggccctcccgggtcagcatgcccggggtgaaactgaccacccaggcctactgcaagatggtgctgcacggcgccaagtacccgcactgcgccgtcaacgggctcctggtggccgagaagcagaagccgcgtaaggagcacctccccctgggcggccccggcgcccaccacaccctcttcgtggactgcatccccctcttccacggcaccctggccctcgcccccatgctggaggtggctctcaccctgattgattcatggtgcaaagatcatagctacgtgattgctggttattatcaagctaatgagcgagtaaaggatgccagtccaaaccaggttgcagagaaggtggcctccagaatcgccgagggcttcagcgacactgcgctcatcatggtagacaacaccaagtttacgatggactgcgtagcgcctacgatccacgtgtacgagcaccatgagaacagatggcggtgcagagacccacaccatgactactgtgaagactggccagaggcacagaggatctcagcctcgctcctggacagccggtcctacgagacgctcgtggatttcgataaccacctggatgacattcggaatgactggacaaacccagagatcaataaagctgtcctacacttgtgctaggcaggcaccgctgtgactgggctccgggcctttccactacgttgaagaagaaaacctatttttaaatttcaatcaaatgcctggtaggaattgctagcgttgcccctgccaactctcagacggagtctcgcactgtcacccgattggagcacaatgccgcagtctcggttcactgcaacctccgcctgctgggttcaagcgattctcctgcctcagcctcccgagtagctgggattacaggcgcccgccacca

SEQ ID NO: 286578 - DNA, 2145 bp, Homo sapiens
gcagacttgatggctcccggccccccgacccggcccggcctggcggcgccgcaccggccacctcctgtctcacctgccgccactgcccgccgcgaccgccctctacacccggtgtcccgcgaccggaagagagcaaggccgcgccgcggagcaccacgggatcgaggaagactccgcccgcacccggccgcacggaggtcaccgtggagcggaaaagggtagcgctgcgaacgtcgtaaaatgccgggccgggctgctttccggcaggcgttggagaggctgctttccggcggcgccgggcgagaagcgcgactggagtctggggctgcggcttcccagaggcgcgagtcgcttttccaggagccgaggcccaaacggggccgggcctgaagggtcccccgccagcccgcggccgcgccatcaatcgccgccgcctcgtcccgcttctcggctgaggcgccgcgcggccaggcagcgggtccaggcctcagccgcgcgcccaggggcctccggggccctcccgggtcagcatgcccggggtgaaactgaccacccaggcctactgcaagatggtgctgcacggcgccaagtacccgcatgcatccccctcttccacggcaccctggccctcgcccccatgctggaggtggctctcaccctgattgattcatggtgcaaagatcatagctacgtgattgctggttattatcaagctaatgagcgagtaaaggatgccagtccaaaccaggttgcagagaaggtggcctccagaatcgccgagggcttcagcgacactgcgctcatcatggtagacaacaccaagtttacgatggactgcgtagcgcctacgatccacgtgtacgagcaccatgagaacagatggcggtgcagagacccacaccatgactactgtgaagactggccagaggcacagaggatctcagcctcgctcctggacagccggtcctacgagacgctcgtggatttcgataaccacctggatgacattcggaatgactggacaaacccagagatcaataaagctgtcctacacttgtgctaggcaggcaccgctgtgactgggctccgggcctttccactacgttgaagaagaaaacctatttttaaatgtaaataaaatatctggtagcctgtgtggaaagctgaccgttttaagaagtggcatgtgccttgaaagggggcagaatgttcagtcggtcgtgtttttaacacagagtctctagaagaggtgcagacatcccgtctgactgtccctgtggactctctcagttgtatgttgctataatcctccaaatcaaagctctttctgcttgtgcaagattgttcctattaaacagttttaactaaccttttataatctggagagaatactttttaaggcttttgaactatctttttttaaaaaaaaaaaaaagcccacatcttatactccaatgagtgtgtttgtgagtttttatcctgtttgaattttgatgtcgtccaggcgtcctgggatcagggtagacacgtggagtgctggtgctgagctgtttgagaagctctgtgtgggtgtttctgtggtcaggtaggctgggctgtgaacagcactgctccacatggtgtcggctcacagagccaccgcaactctgcccagcgggagtgacaccactgatgccacagaagcctttatcgttaggggcaaaagcagacatctctggtagcaggagctcagtgtggtgctcttcagccacgcagaaagctcacgtgcctgcagggccaggaaagggaaatgatcgtttcttttgtattaggaaaaacaagacttagacttcccgagttgtgcagagtgacgtctgtactttttatacttagaacatttggtcaagttttgtaaccaaaccttagggaattgagagggaaactttatggtacgtttaccttttttcctttttatatgaattattttgtacaaagttcagagagcggtacctttcctactgtcttttctttgactccatggaggaatttgtaacgatcggtgtgacctgaaagggtttgtgatacagcggtcactattttctcttaacacataggaaaaaagttcagacatcgctacaataaatgtgctttatttgatccaccaaa

SEQ ID NO: 286579 - DNA, 2326 bp, Homo sapiens
gcagacttgatggctcccggccccccgacccggcccggcctggcggcgccgcaccggccacctcctgtctcacctgccgccactgcccgccgcgaccgccctctacacccggtgtcccgcgaccggaagagagcaaggccgcgccgcggagcaccacgggatcgaggaagactccgcccgcacccggccgcacggaggtcaccgtggagcggaaaagggtagcgctgcgaacgtcgtaaaatgccgggccgggctgctttccggcaggcgttggagaggctgctttccggcggcgccgggcgagaagcgcgactggagtctggggctgcggcttcccagaggcgcgagtcgcttttccaggagccgaggcccaaacggggccgggcctgaagggtcccccgccagcccgcggccgcgccatcaatcgccgccgcctcgtcccgcttctcggctgaggcgccgcgcggccaggcagcgggtccaggcctcagccgcgcgcccaggggcctccggggccctcccgggtcagcatgcccggggtgaaactgaccacccaggcctactgcaagatggtgctgcacggcgccaagtacccgcactgcgccgtcaacgggctcctggtggccgagaagcagaagccgcgtaaggagcacctccccctgggcggccccggcgcccaccacaccctcttcgtggactgcatccccctcttccacggcaccctggccctcgcccccatgctggaggtggctctcaccctgatggagtttcgctcttgtcacccagcctggagtgcagtggcgtgatctcggctcgctgcaacttccgcctcccggattcagattgattcatggtgcaaagatcatagctacgtgattgctggttattatcaagctaatgagcgagtaaaggatgccagtccaaaccaggttgcagagaaggtggcctccagaatcgccgagggcttcagcgacactgcgctcatcatggtagacaacaccaagtttacgatggactgcgtagcgcctacgatccacgtgtacgagcaccatgagaacagatggcggtgcagagacccacaccatgactactgtgaagactggccagaggcacagaggatctcagcctcgctcctggacagccggtcctacgagacgctcgtggatttcgataaccacctggatgacattcggaatgactggacaaacccagagatcaataaagctgtcctacacttgtgctaggcaggcaccgctgtgactgggctccgggcctttccactacgttgaagaagaaaacctatttttaaatgtaaataaaatatctggtagcctgtgtggaaagctgaccgttttaagaagtggcatgtgccttgaaagggggcagaatgttcagtcggtcgtgtttttaacacagagtctctagaagaggtgcagacatcccgtctgactgtccctgtggactctctcagttgtatgttgctataatcctccaaatcaaagctctttctgcttgtgcaagattgttcctattaaacagttttaactaaccttttataatctggagagaatactttttaaggcttttgaactatctttttttaaaaaaaaaaaaaagcccacatcttatactccaatgagtgtgtttgtgagtttttatcctgtttgaattttgatgtcgtccaggcgtcctgggatcagggtagacacgtggagtgctggtgctgagctgtttgagaagctctgtgtgggtgtttctgtggtcaggtaggctgggctgtgaacagcactgctccacatggtgtcggctcacagagccaccgcaactctgcccagcgggagtgacaccactgatgccacagaagcctttatcgttaggggcaaaagcagacatctctggtagcaggagctcagtgtggtgctcttcagccacgcagaaagctcacgtgcctgcagggccaggaaagggaaatgatcgtttcttttgtattaggaaaaacaagacttagacttcccgagttgtgcagagtgacgtctgtactttttatacttagaacatttggtcaagttttgtaaccaaaccttagggaattgagagggaaactttatggtacgtttaccttttttcctttttatatgaattattttgtacaaagttcagagagcggtacctttcctactgtcttttctttgactccatggaggaatttgtaacgatcggtgtgacctgaaagggtttgtgatacagcggtcactattttctcttaacacataggaaaaaagttcagacatcgctacaataaatgtgctttatttgatccaccaaa

SEQ ID NO: 286580 - DNA, 1352 bp, Homo sapiens
gcagacttgatggctcccggccccccgacccggcccggcctggcggcgccgcaccggccacctcctgtctcacctgccgccactgcccgccgcgaccgccctctacacccggtgtcccgcgaccggaagagagcaaggccgcgccgcggagcaccacgggatcgaggaagactccgcccgcacccggccgcacggaggtcaccgtggagcggaaaagggtagcgctgcgaacgtcgtaaaatgccgggccgggctgctttccggcaggcgttggagaggctgctttccggcggcgccgggcgagaagcgcgactggagtctggggctgcggcttcccagaggcgcgagtcgcttttccaggagccgaggcccaaacggggccgggcctgaagggtcccccgccagcccgcggccgcgccatcaatcgccgccgcctcgtcccgcttctcggctgaggcgccgcgcggccaggcagcgggtccaggcctcagccgcgcgcccaggggcctccggggccctcccgggtcagcatgcccggggtgaaactgaccacccaggcctactgcaagatggtgctgcacggcgccaagtacccgcactgcgccgtcaacgggctcctggtggccgagaagcagaagccgcgtaaggagcacctccccctgggcggccccggcgcccaccacaccctcttcgtggactgcatccccctcttccacggcaccctggccctcgcccccatgctggaggtggctctcaccctgattgattcatggtgcaaagatcatagctacgtgattgctggttattatcaagctaatgagcgagtaaaggatgccagtccaaaccaggttgcagagaaggtggcctccagaatcgccgagggcttcagcgacactgcgctcatcatggtaagtcgcttctgtgcagcatgtgggaggcccttgcgcctcctctcaccaacctggagcttgctctgcggcggtttcctttccgctaaccccttcactcatttatctgcttgagaccattgccgcctcttgcagttttctctcagctgcagaccagttgaatcccaggccatggcttctgtgcttccgcatcactacacaagtgggagtggggtcccctgccagccgcagcacctgggaacttgttagaaatgcgaattcccaggcacccaccccagaccccactgaatcagaaatgcgggggtttagcccagcagtccatgttaagacaccttctagatgattctggtctgaacatgccaagtgtgagaagcacaattagaacagccagcacagcctctaggggcacagggaaggaaggtccttgtatgtgagcagatgaca

SEQ ID NO: 286581 - DNA, 5041 bp, Homo sapiens
cgggctccggctgccatggaggaggaagaggaggcgataggcttgctggacaaggttctggaggacgaagatgtgtttctcctggaggagtgcgagctgggaaccccgaccagccccggctcagggtcccccttcctggtggctgtgaaggtggaagcagggaaaggcctggagatgaggaagctggttctctcggggttcttggccagcgaagagatctacattaaccagctggaagccctgttgctgcccatgaaacccctgaaggccaccgccaccacctcccagcccgtgctcaccatccagcagatcgagaccatcttctacaagatccaggacatctatgagatccacaaggagttctatgacaacctgtgccccaaggtgcaacagtgggacagccaggtcaccatgggccacctcttccagaagctggccagccagctcggtgtgtacaaagcgtttgtcgataactataaagtcgctctggagacagctgagaagtgcagccagtccaacaaccagttccagaagatctcagaggaactcaaagtgaaaggtcccaaggactccaaggacagccacacgtctgtcaccatggaagctctgctctacaagcccattgaccgggtcactcggagcaccctagtcctacacgacctgctgaagcacacacctgtggaccaccccgactacccgctgctgcaggatgccctccgcatctcccagaacttcctgtccagcatcaacgaggacatcgacccccgccggactgcagtgacaacgcccaagggggagacgcgacagctggtgaaggacggcttcctggtggaagtgtcagagagctcccggaagctgcggcacgtcttcctctttacagatgtcctactgtgtgccaagctgaagaagacctctgcagggaagcaccagcagtatgactgtaagtggtacatccccctggccgacctggtgtttccatcccccgaggaatctgaggccagcccccaggtgcaccccttcccagaccatgagctggaggacatgaagatgaagatctctgccctcaagagtgaaatccagaaggagaaagccaacaaaggccagagccgggccatcgagcgcctgaagaagaagatgtttgagaatgagttcctgctgctgctcaactcccccacaatcccgttcaggatccacaatcggaatggaaagagttacctgttcctactgtcctcggactacgagaggtcagagtggagagaagcaattcagaaactacagaagaaggatctccaggcctttgtcctgagctcagtggagctccaggtgctcacaggatcctgtttcaagcttaggactgtacacaacattcctgtcaccagcaataaagacgacgatgagtctccaggactctatggcttccttcatgtcatcgtccactctgccaagggatttaagcaatcagccaacctgtactgtaccctggaggtggattccttcggctattttgtcagcaaagccaaaaccagggtgttccgggacacagcggagcccaagtgggatgaggagtttgagatcgagctggagggctcccagtccctgaggatcctgtgctatgagaagtgctatgacaagaccaaggtcaacaaggacaacaatgagatcgtggacaagatcatgggcaaaggacagatccagctggacccacaaaccgtggagaccaagaactggcacacggacgtgattgagatgaacgggatcaaagtggaattttccatgaaattcaccagccgagatatgagcctgaagaggaccccgtccaaaaagcagaccggcgtcttcggtgtgaagatcagcgtggtgacgaagcgggagcgctccaaggtgccctacatcgtccggcagtgtgtggaggaggtggagaagaggggtatcgaggaggttggcatctacaggatatcgggcgtggccacggacatccaggcgctcaaggccgtcttcgatgccaataacaaggacatcctgctgatgctgagtgacatggacatcaacgccatcgccgggacgctcaagctgtacttccgggaactgcccgagccgctcctcacggaccgactctacccagccttcatggagggcatcgccctgtcagaccctgctgccaaggaaaactgcatgatgcacctgctccgctccctgcccgaccccaacctcatcaccttcctcttcctgctggaacacttgaaaagggttgccgagaaggagcccatcaacaaaatgtcacttcacaacctggctaccgtgtttggacccacgttactgagaccctcagaagtggagagcaaagcacacctcacctcggctgcggacatctggtcccatgacgtcatggcgcaggtccaggtcctcctctactacctgcagcacccccccatttccttcgcagaactcaagcggaacacactgtacttctccaccgacgtgtagcccgaggcagggtggctgcgggcgggtggtggaaccagcccctccagcctggggtccaactcagacttgaaagactgcaatagaaaactcccaaacccagcactccagactcgagggaagccagcttccaagaactggaatgcgtacgtcttttgtgccaccttgtacaaagccggctgcccagccccagcctcaccaccgcatcccacctcctgccctccatacctctagttgtgtctgatgctccgtgctgttcgggaattgttttatgtacacttgtcaggcagaaaaggtagtgaccggcccggcgtgggcacacagacagcccgctttgttctttcatttcctccagcactttctttccgcctgagtccagcccaaggccttttattttgcgctgtgtaactgctgccagcttctctcttggccctgctcccagatggcggtctcctggcagcctcccctcagtcttcctccacccgctcttccttcccagcctgcctgcatgcatgtgcacccttggtcttcgctccatcgccttgaaagctctgaagaggccctgggttgccgcggcagcagtggtctgtttgatgctgccgtttgccgctgccggcccctcctcagactccgcctttgggagcacacctgctttgccttgctgcctgtgcaaatgttggacaagcagacacactcacactcgtccccagcttagcacagagctggagcgcccatttctggaattttccgtttgggaatctccacttctggggtttacctgttcggcctcctgcctatcagtgaggcatctctgactgtttcttctactgcttttcagttcccttccctgctgttctatttcctttgagtgtaaagactcacaggtgacctgctatcgagatagccagagggtcaggagagaatgggggaggaggcggtcaggctgctgaggaaacaccacaggctgaacgggggaggaatgcacatgccacgctgggtgtcccgggtcgcggggaggcagctcagctcttaggagcaagttgtgggggcttttcaagaggggccaggcttcctggagggtgactgatgtggccgaagcaggtgtccaggcaggtaggctgcagccaggagctccctggcaccgcaggacctcgtggtactcttgccttagattttacacacactccacagccaagcactgccacggtcctccaggacctgggaagcaaaggcacaggcccacggtggccagccattgtggtgccgccccagcttctggatacagccttttgggtaaacactgggaactccagaagttgtggggagagtggggaatcagacagccgcctctaggggctgggttctgctggggcctccttgttggtgctgtaggcacccgccagggagcagggacccgacttgcagacgcattgcccggtactaggaaggagtgaggtgtgttcccaccgtacacttcccacacgagctgcggctgccagcctcgggccatcagcctaggagagcagatgcagctccaggggctcgacttatagccagttacagctccccggctcttctgtgtggcagagcgtcgtttccgggccctcagggctggggagctcagttcccattgcttgtgctcagggctgagtcttaaagaagggtttgccggccctaacgctgcagcgcgtgcgcggtgagaggccctttttgagcctgtttactcctgtggccttgggcagaacagtaaatactctgtgcacggaggaaagacatgcccaagaggaaggaagtactgaccatcggctgcctgtgagcagcttagcaaggagcccttgctccctgggaaaggcggtgaacttgagtctaaagatgcagtgcctggcccttcctaaggtccctgcctggcatccgagtgtcggtgtgtggcacagaaggctcctgcttgcttccaaagtgatggacaggaaggggcagagtgagtcacggcccagactgggcaccttcacgtctcagcctcagggagccccacagccccaagctcgctgaggcaacgtgagaacaggctatgggaaggctgcaaaggctgagaaatgcaaaggctcatatttataaatcccacccccagagtggggagggtcaggtgccagacctggactaaactgcaccaaggaaacacccagcagggtctcctgtgagccggggaccatgcagcccgaaacctccagtcactgcgcccggcaggagtcaggagccagggactgtgcagcctggaacctccagtcactgtgcccagcagggtgggctgtgcccagcaggagtcaggctaagaaacgccaggtctgcctgttcttgctgggcaatggctgatggctgccagtttctgctgatacacaggtaggatgggacccttcatgaatatctgactttaataagttggtaaggatatatttttttgtctatgttctgtttcaacttatgtagattattataaattgatgtaaaccacgtgagaggaaaatgttaataaaaaatgcaaagccccatcatttgcacaaaa

SEQ ID NO: 286582 - DNA, 798 bp, Homo sapiens
cgggctccggctgccatggaggaggaagaggaggcgataggcttgctggacaaggttctggaggacgaagatgtgtttctcctggaggagtgcgagctgggaaccccgaccagccccggctcagggtcccccttcctggtggctgtgaagggtgcggtggctcacacctgtaatcccagcactttgggaggccgaggcgggcggatcacgaggtcaggagatcgagaccatcctggctaacacggtggaagcagggaaaggcctggagatgaggaagctggttctctcggggttcttggccagcgaagagatctacattaaccagctggaagccctgttgctgcccatgaaacccctgaaggccaccgccaccacctcccagcccgtgctcaccatccagcagatcgagaccatcttctacaagatccaggacatctatgagatccacaaggagttctatgacaacctgtgccccaaggtgcaacagtgggacagccaggtcaccatgggccacctcttccagaagctggccagccagctcggtgtgtacaaagcgtttgtcgataactataaagtcgctctggagacagctgagaagtgcagccagtccaacaaccagttccagaagatctcagaggaactcaaagtgaaaggtcccaaggactccaaggacagccacacgtctgtcaccatggaagctctgctctacaagcccattgaccgggtcactcggagcaccctagtcctacacgactgttgaagcacaacctttggccacccgattaccgctgtgcaggt

SEQ ID NO: 286583 - DNA, 451 bp, Homo sapiens
tttttttttaacaatcccttggggcaattgtccgggtcaaaactttagggagatttttttttaaatggggggtaaccccggggggggaaaatgttaataaaaaatgcaaagccccatcatttgcacaaaactcagccctgtggtgtggatgtttgtgttcgcggtggtccagggaagccaccaatgtaaatatttaactcttccagctgcatccagatgtgagtttccaggaatctgtttacctagttcactccccttgagcctccctgtggcccacgggggctggggcagagctgcggggaggtgggctggagccctctccttgctcttcacaaaggcctccggatcagccagcatccaggctgcttctggctcacctttgccatgtgctgctacagtacaaatgtcccacctggccatcggtgtgccttgaaagtggcatgaagttgtc

SEQ ID NO: 286584 - DNA, 5207 bp, Homo sapiens
gcggccgcagcgggggacccgcgacctggagcagcgggaggccgaggccaagggccgcccgggctcgcccctcgccgcggaggagacccccgggcgcgagcacctgcccccgtggcggcgccgcaggttcctgcgggtgcccgagcgggactcgcccggccacagctcgccggagagagacagcgacggcagccggcacagctccgaccgcgaggacgacttctccgcagacttcagctacgggacggacgagtacgacggagaggggaatgaggagcagaaggggcccccggagggctcagagaccatgccgtacatcgatgagtcgcccaccatgtccccgcagctcagcgcccgcagccagggcgggggggatggcgtctccccgactccacctgagggactggctcctgggcccatgaaacccctgaaggccaccgccaccacctcccagcccgtgctcaccatccagcagatcgagaccatcttctacaagatccaggacatctatgagatccacaaggagttctatgacaacctgtgccccaaggtgcaacagtgggacagccaggtcaccatgggccacctcttccagaagctggccagccagctcggtgtgtacaaagcgtttgtcgataactataaagtcgctctggagacagctgagaagtgcagccagtccaacaaccagttccagaagatctcagaggaactcaaagtgaaaggtcccaaggactccaaggacagccacacgtctgtcaccatggaagctctgctctacaagcccattgaccgggtcactcggagcaccctagtcctacacgacctgctgaagcacacacctgtggaccaccccgactacccgctgctgcaggatgccctccgcatctcccagaacttcctgtccagcatcaacgaggacatcgacccccgccggactgcagtgacaacgcccaagggggagacgcgacagctggtgaaggacggcttcctggtggaagtgtcagagagctcccggaagctgcggcacgtcttcctctttacagatgtcctactgtgtgccaagctgaagaagacctctgcagggaagcaccagcagtatgactgtaagtggtacatccccctggccgacctggtgtttccatcccccgaggaatctgaggccagcccccaggtgcaccccttcccagaccatgagctggaggacatgaagatgaagatctctgccctcaagagtgaaatccagaaggagaaagccaacaaaggccagagccgggccatcgagcgcctgaagaagaagatgtttgagaatgagttcctgctgctgctcaactcccccacaatcccgttcaggatccacaatcggaatggaaagagttacctgttcctactgtcctcggactacgagaggtcagagtggagagaagcaattcagaaactacagaagaaggatctccaggcctttgtcctgagctcagtggagctccaggtgctcacaggatcctgtttcaagcttaggactgtacacaacattcctgtcaccagcaataaagacgacgatgagtctccaggactctatggcttccttcatgtcatcgtccactctgccaagggatttaagcaatcagccaacctgtactgtaccctggaggtggattccttcggctattttgtcagcaaagccaaaaccagggtgttccgggacacagcggagcccaagtgggatgaggagtttgagatcgagctggagggctcccagtccctgaggatcctgtgctatgagaagtgctatgacaagaccaaggtcaacaaggacaacaatgagatcgtggacaagatcatgggcaaaggacagatccagctggacccacaaaccgtggagaccaagaactggcacacggacgtgattgagatgaacgggatcaaagtggaattttccatgaaattcaccagccgagatatgagcctgaagaggaccccgtccaaaaagcagaccggcgtcttcggtgtgaagatcagcgtggtgacgaagcgggagcgctccaaggtgccctacatcgtccggcagtgtgtggaggaggtggagaagaggggtatcgaggaggttggcatctacaggatatcgggcgtggccacggacatccaggcgctcaaggccgtcttcgatgccaataacaaggacatcctgctgatgctgagtgacatggacatcaacgccatcgccgggacgctcaagctgtacttccgggaactgcccgagccgctcctcacggaccgactctacccagccttcatggagggcatcgccctgtcagaccctgctgccaaggaaaactgcatgatgcacctgctccgctccctgcccgaccccaacctcatcaccttcctcttcctgctggaacacttgaaaagggttgccgagaaggagcccatcaacaaaatgtcacttcacaacctggctaccgtgtttggacccacgttactgagaccctcagaagtggagagcaaagcacacctcacctcggctgcggacatctggtcccatgacgtcatggcgcaggtccaggtcctcctctactacctgcagcacccccccatttccttcgcagaactcaagcggaacacactgtacttctccaccgacgtgtagcccgaggcagggtggctgcgggcgggtggtggaaccagcccctccagcctggggtccaactcagacttgaaagactgcaatagaaaactcccaaacccagcactccagactcgagggaagccagcttccaagaactggaatgcgtacgtcttttgtgccaccttgtacaaagccggctgcccagccccagcctcaccaccgcatcccacctcctgccctccatacctctagttgtgtctgatgctccgtgctgttcgggaattgttttatgtacacttgtcaggcagaaaaggtagtgaccggcccggcgtgggcacacagacagcccgctttgttctttcatttcctccagcactttctttccgcctgagtccagcccaaggccttttattttgcgctgtgtaactgctgccagcttctctcttggccctgctcccagatggcggtctcctggcagcctcccctcagtcttcctccacccgctcttccttcccagcctgcctgcatgcatgtgcacccttggtcttcgctccatcgccttgaaagctctgaagaggccctgggttgccgcggcagcagtggtctgtttgatgctgccgtttgccgctgccggcccctcctcagactccgcctttgggagcacacctgctttgccttgctgcctgtgcaaatgttggacaagcagacacactcacactcgtccccagcttagcacagagctggagcgcccatttctggaattttccgtttgggaatctccacttctggggtttacctgttcggcctcctgcctatcagtgaggcatctctgactgtttcttctactgcttttcagttcccttccctgctgttctatttcctttgagtgtaaagactcacaggtgacctgctatcgagatagccagagggtcaggagagaatgggggaggaggcggtcaggctgctgaggaaacaccacaggctgaacgggggaggaatgcacatgccacgctgggtgtcccgggtcgcggggaggcagctcagctcttaggagcaagttgtgggggcttttcaagaggggccaggcttcctggagggtgactgatgtggccgaagcaggtgtccaggcaggtaggctgcagccaggagctccctggcaccgcaggacctcgtggtactcttgccttagattttacacacactccacagccaagcactgccacggtcctccaggacctgggaagcaaaggcacaggcccacggtggccagccattgtggtgccgccccagcttctggatacagccttttgggtaaacactgggaactccagaagttgtggggagagtggggaatcagacagccgcctctaggggctgggttctgctggggcctccttgttggtgctgtaggcacccgccagggagcagggacccgacttgcagacgcattgcccggtactaggaaggagtgaggtgtgttcccaccgtacacttcccacacgagctgcggctgccagcctcgggccatcagcctaggagagcagatgcagctccaggggctcgacttatagccagttacagctccccggctcttctgtgtggcagagcgtcgtttccgggccctcagggctggggagctcagttcccattgcttgtgctcagggctgagtcttaaagaagggtttgccggccctaacgctgcagcgcgtgcgcggtgagaggccctttttgagcctgtttactcctgtggccttgggcagaacagtaaatactctgtgcacggaggaaagacatgcccaagaggaaggaagtactgaccatcggctgcctgtgagcagcttagcaaggagcccttgctccctgggaaaggcggtgaacttgagtctaaagatgcagtgcctggcccttcctaaggtccctgcctggcatccgagtgtcggtgtgtggcacagaaggctcctgcttgcttccaaagtgatggacaggaaggggcagagtgagtcacggcccagactgggcaccttcacgtctcagcctcagggagccccacagccccaagctcgctgaggcaacgtgagaacaggctatgggaaggctgcaaaggctgagaaatgcaaaggctcatatttataaatcccacccccagagtggggagggtcaggtgccagacctggactaaactgcaccaaggaaacacccagcagggtctcctgtgagccggggaccatgcagcccgaaacctccagtcactgcgcccggcaggagtcaggagccagggactgtgcagcctggaacctccagtcactgtgcccagcagggtgggctgtgcccagcaggagtcaggctaagaaacgccaggtctgcctgttcttgctgggcaatggctgatggctgccagtttctgctgatacacaggtaggatgggacccttcatgaatatctgactttaataagttggtaaggatatatttttttgtctatgttctgtttcaacttatgtagattattataaattgatgtaaaccacgtgagaggaaaatgttaataaaaaatgcaaagccccatcatttgcacaaaa

SEQ ID NO: 286585 - DNA, 4820 bp, Homo sapiens
aaagattaattaacagtggagcctgtgtcccatgaaacccctgaaggccaccgccaccacctcccagcccgtgctcaccatccagcagatcgagaccatcttctacaagatccaggacatctatgagatccacaaggagttctatgacaacctgtgccccaaggtgcaacagtgggacagccaggtcaccatgggccacctcttccagaagctggccagccagctcggtgtgtacaaagcgtttgtcgataactataaagtcgctctggagacagctgagaagtgcagccagtccaacaaccagttccagaagatctcagaggaactcaaagtgaaaggtcccaaggactccaaggacagccacacgtctgtcaccatggaagctctgctctacaagcccattgaccgggtcactcggagcaccctagtcctacacgacctgctgaagcacacacctgtggaccaccccgactacccgctgctgcaggatgccctccgcatctcccagaacttcctgtccagcatcaacgaggacatcgacccccgccggactgcagtgacaacgcccaagggggagacgcgacagctggtgaaggacggcttcctggtggaagtgtcagagagctcccggaagctgcggcacgtcttcctctttacagatgtcctactgtgtgccaagctgaagaagacctctgcagggaagcaccagcagtatgactgtaagtggtacatccccctggccgacctggtgtttccatcccccgaggaatctgaggccagcccccaggtgcaccccttcccagaccatgagctggaggacatgaagatgaagatctctgccctcaagagtgaaatccagaaggagaaagccaacaaaggccagagccgggccatcgagcgcctgaagaagaagatgtttgagaatgagttcctgctgctgctcaactcccccacaatcccgttcaggatccacaatcggaatggaaagagttacctgttcctactgtcctcggactacgagaggtcagagtggagagaagcaattcagaaactacagaagaaggatctccaggcctttgtcctgagctcagtggagctccaggtgctcacaggatcctgtttcaagcttaggactgtacacaacattcctgtcaccagcaataaagacgacgatgagtctccaggactctatggcttccttcatgtcatcgtccactctgccaagggatttaagcaatcagccaacctgtactgtaccctggaggtggattccttcggctattttgtcagcaaagccaaaaccagggtgttccgggacacagcggagcccaagtgggatgaggagtttgagatcgagctggagggctcccagtccctgaggatcctgtgctatgagaagtgctatgacaagaccaaggtcaacaaggacaacaatgagatcgtggacaagatcatgggcaaaggacagatccagctggacccacaaaccgtggagaccaagaactggcacacggacgtgattgagatgaacgggatcaaagtggaattttccatgaaattcaccagccgagatatgagcctgaagaggaccccgtccaaaaagcagaccggcgtcttcggtgtgaagatcagcgtggtgacgaagcgggagcgctccaaggtgccctacatcgtccggcagtgtgtggaggaggtggagaagaggggtatcgaggaggttggcatctacaggatatcgggcgtggccacggacatccaggcgctcaaggccgtcttcgatgccaataacaaggacatcctgctgatgctgagtgacatggacatcaacgccatcgccgggacgctcaagctgtacttccgggaactgcccgagccgctcctcacggaccgactctacccagccttcatggagggcatcgccctgtcagaccctgctgccaaggaaaactgcatgatgcacctgctccgctccctgcccgaccccaacctcatcaccttcctcttcctgctggaacacttgaaaagggttgccgagaaggagcccatcaacaaaatgtcacttcacaacctggctaccgtgtttggacccacgttactgagaccctcagaagtggagagcaaagcacacctcacctcggctgcggacatctggtcccatgacgtcatggcgcaggtccaggtcctcctctactacctgcagcacccccccatttccttcgcagaactcaagcggaacacactgtacttctccaccgacgtgtagcccgaggcagggtggctgcgggcgggtggtggaaccagcccctccagcctggggtccaactcagacttgaaagactgcaatagaaaactcccaaacccagcactccagactcgagggaagccagcttccaagaactggaatgcgtacgtcttttgtgccaccttgtacaaagccggctgcccagccccagcctcaccaccgcatcccacctcctgccctccatacctctagttgtgtctgatgctccgtgctgttcgggaattgttttatgtacacttgtcaggcagaaaaggtagtgaccggcccggcgtgggcacacagacagcccgctttgttctttcatttcctccagcactttctttccgcctgagtccagcccaaggccttttattttgcgctgtgtaactgctgccagcttctctcttggccctgctcccagatggcggtctcctggcagcctcccctcagtcttcctccacccgctcttccttcccagcctgcctgcatgcatgtgcacccttggtcttcgctccatcgccttgaaagctctgaagaggccctgggttgccgcggcagcagtggtctgtttgatgctgccgtttgccgctgccggcccctcctcagactccgcctttgggagcacacctgctttgccttgctgcctgtgcaaatgttggacaagcagacacactcacactcgtccccagcttagcacagagctggagcgcccatttctggaattttccgtttgggaatctccacttctggggtttacctgttcggcctcctgcctatcagtgaggcatctctgactgtttcttctactgcttttcagttcccttccctgctgttctatttcctttgagtgtaaagactcacaggtgacctgctatcgagatagccagagggtcaggagagaatgggggaggaggcggtcaggctgctgaggaaacaccacaggctgaacgggggaggaatgcacatgccacgctgggtgtcccgggtcgcggggaggcagctcagctcttaggagcaagttgtgggggcttttcaagaggggccaggcttcctggagggtgactgatgtggccgaagcaggtgtccaggcaggtaggctgcagccaggagctccctggcaccgcaggacctcgtggtactcttgccttagattttacacacactccacagccaagcactgccacggtcctccaggacctgggaagcaaaggcacaggcccacggtggccagccattgtggtgccgccccagcttctggatacagccttttgggtaaacactgggaactccagaagttgtggggagagtggggaatcagacagccgcctctaggggctgggttctgctggggcctccttgttggtgctgtaggcacccgccagggagcagggacccgacttgcagacgcattgcccggtactaggaaggagtgaggtgtgttcccaccgtacacttcccacacgagctgcggctgccagcctcgggccatcagcctaggagagcagatgcagctccaggggctcgacttatagccagttacagctccccggctcttctgtgtggcagagcgtcgtttccgggccctcagggctggggagctcagttcccattgcttgtgctcagggctgagtcttaaagaagggtttgccggccctaacgctgcagcgcgtgcgcggtgagaggccctttttgagcctgtttactcctgtggccttgggcagaacagtaaatactctgtgcacggaggaaagacatgcccaagaggaaggaagtactgaccatcggctgcctgtgagcagcttagcaaggagcccttgctccctgggaaaggcggtgaacttgagtctaaagatgcagtgcctggcccttcctaaggtccctgcctggcatccgagtgtcggtgtgtggcacagaaggctcctgcttgcttccaaagtgatggacaggaaggggcagagtgagtcacggcccagactgggcaccttcacgtctcagcctcagggagccccacagccccaagctcgctgaggcaacgtgagaacaggctatgggaaggctgcaaaggctgagaaatgcaaaggctcatatttataaatcccacccccagagtggggagggtcaggtgccagacctggactaaactgcaccaaggaaacacccagcagggtctcctgtgagccggggaccatgcagcccgaaacctccagtcactgcgcccggcaggagtcaggagccagggactgtgcagcctggaacctccagtcactgtgcccagcagggtgggctgtgcccagcaggagtcaggctaagaaacgccaggtctgcctgttcttgctgggcaatggctgatggctgccagtttctgctgatacacaggtaggatgggacccttcatgaatatctgactttaataagttggtaaggatatatttttttgtctatgttctgtttcaacttatgtagattattataaattgatgtaaaccacgtgagaggaaaatgttaataaaaaatgcaaagccccatcatttgcacaaaa

SEQ ID NO: 286586 - DNA, 5257 bp, Homo sapiens
gcggccgcagcgggggacccgcgacctggagcagcgggaggccgaggccaagggccgcccgggctcgcccctcgccgcggaggagacccccgggcgcgagcacctgcccccgtggcggcgccgcaggttcctgcgggtgcccgagcgggactcgcccggccacagctcgccggagagagacagcgacggcagccggcacagctccgaccgcgaggacgacttctccgcagacttcagctacgggacggacgagtacgacggagaggggaatgaggagcagaaggggcccccggagggctcagagaccatgccgtacatcgatgagtcgcccaccatgtccccgcagctcagcgcccgcagccagggcgggggggatggcgtctccccgactccacctgagggactggctcctggggtggaagcagggaaaggcctggagatgaggaagctggttctctcggggttcttggccagcgaagagatctacattaaccagctggaagccctgttgctgcccatgaaacccctgaaggccaccgccaccacctcccagcccgtgctcaccatccagcagatcgagaccatcttctacaagatccaggacatctatgagatccacaaggagttctatgacaacctgtgccccaaggtgcaacagtgggacagccaggtcaccatgggccacctcttccagaagctggccagccagctcggtgtgtacaaagcgtttgtcgataactataaagtcgctctggagacagctgagaagtgcagccagtccaacaaccagttccagaagatctcagaggaactcaaagtgaaaggtcccaaggactccaaggacagccacacgtctgtcaccatggaagctctgctctacaagcccattgaccgggtcactcggagcaccctagtcctacacgacctgctgaagcacacacctgtggaccaccccgactacccgctgctgcaggatgccctccgcatctcccagaacttcctgtccagcatcaacgaggacatcgacccccgccggactgcagtgacaacgcccaagggggagacgcgacagctggtgaaggacggcttcctggtggaagtgtcagagagctcccggaagctgcggcacgtcttcctctttacagatgtcctactgtgtgccaagctgaagaagacctctgcagggaagcaccagcagtatgactgtaagtggtacatccccctggccgacctggtgtttccatcccccgaggaatctgaggccagcccccaggtgcaccccttcccagaccatgagctggaggacatgaagatgaagatctctgccctcaagagtgaaatccagaaggagaaagccaacaaaggccagagccgggccatcgagcgcctgaagaagaagatgtttgagaatgagttcctgctgctgctcaactcccccacaatcccgttcaggatccacaatcggaatggaaagagttacctgttcctactgtcctcggactacgagaggtcagagtggagagaagcaattcagaaactacagaagaaggatctccaggcctttgtcctgagctcagtggagctccaggtgctcacaggatcctgtttcaagcttaggactgtacacaacattcctgtcaccagcaataaagacgacgatgagtctccaggactctatggcttccttcatgtcatcgtccactctgccaagggatttaagcaatcagccaacctgtactgtaccctggaggtggattccttcggctattttgtcagcaaagccaaaaccagggtgttccgggacacagcggagcccaagtgggatgaggagtttgagatcgagctggagggctcccagtccctgaggatcctgtgctatgagaagtgctatgacaagaccaaggtcaacaaggacaacaatgagatcgtggacaagatcatgggcaaaggacagatccagctggacccacaaaccgtggagaccaagaactggcacacggacgtgattgagatgaacgggatcaaagtggaattttccatgaaattcaccagccgagatatgagcctgaagaggaccccgtccaaaaagcagaccggcgtcttcggtgtgaagatcagcgtggtgacgaagcgggagcgctccaaggtgccctacatcgtccggcagtgtgtggaggaggtggagaagaggggtatcgaggaggttggcatctacaggatatcgggcgtggccacggacatccaggcgctcaaggccgtcttcgatgccaataacaaggacatcctgctgatgctgagtgacatggacatcaacgccatcgccgggacgctcaagctgtacttccgggaactgcccgagccgctcctcacggaccgactctacccagccttcatggagggcatcgccctgtcagaccctgctgccaaggaaaactgcatgatgcacctgctccgctccctgcccgaccccaacctcatcaccttcctcttcctgctggaacacttgaaaagggttgccgagaaggagcccatcaacaaaatgtcacttcacaacctggctaccgtgtttggacccacgttactgagaccctcagaagtggagagcaaagcacacctcacctcggctgcggacatctggtcccatgacgtcatggcgcagaactcaagcggaacacactgtacttctccaccgacgtgtagcccgaggcagggtggctgcgggcgggtggtggaaccagcccctccagcctggggtccaactcagacttgaaagactgcaatagaaaactcccaaacccagcactccagactcgagggaagccagcttccaagaactggaatgcgtacgtcttttgtgccaccttgtacaaagccggctgcccagccccagcctcaccaccgcatcccacctcctgccctccatacctctagttgtgtctgatgctccgtgctgttcgggaattgttttatgtacacttgtcaggcagaaaaggtagtgaccggcccggcgtgggcacacagacagcccgctttgttctttcatttcctccagcactttctttccgcctgagtccagcccaaggccttttattttgcgctgtgtaactgctgccagcttctctcttggccctgctcccagatggcggtctcctggcagcctcccctcagtcttcctccacccgctcttccttcccagcctgcctgcatgcatgtgcacccttggtcttcgctccatcgccttgaaagctctgaagaggccctgggttgccgcggcagcagtggtctgtttgatgctgccgtttgccgctgccggcccctcctcagactccgcctttgggagcacacctgctttgccttgctgcctgtgcaaatgttggacaagcagacacactcacactcgtccccagcttagcacagagctggagcgcccatttctggaattttccgtttgggaatctccacttctggggtttacctgttcggcctcctgcctatcagtgaggcatctctgactgtttcttctactgcttttcagttcccttccctgctgttctatttcctttgagtgtaaagactcacaggtgacctgctatcgagatagccagagggtcaggagagaatgggggaggaggcggtcaggctgctgaggaaacaccacaggctgaacgggggaggaatgcacatgccacgctgggtgtcccgggtcgcggggaggcagctcagctcttaggagcaagttgtgggggcttttcaagaggggccaggcttcctggagggtgactgatgtggccgaagcaggtgtccaggcaggtaggctgcagccaggagctccctggcaccgcaggacctcgtggtactcttgccttagattttacacacactccacagccaagcactgccacggtcctccaggacctgggaagcaaaggcacaggcccacggtggccagccattgtggtgccgccccagcttctggatacagccttttgggtaaacactgggaactccagaagttgtggggagagtggggaatcagacagccgcctctaggggctgggttctgctggggcctccttgttggtgctgtaggcacccgccagggagcagggacccgacttgcagacgcattgcccggtactaggaaggagtgaggtgtgttcccaccgtacacttcccacacgagctgcggctgccagcctcgggccatcagcctaggagagcagatgcagctccaggggctcgacttatagccagttacagctccccggctcttctgtgtggcagagcgtcgtttccgggccctcagggctggggagctcagttcccattgcttgtgctcagggctgagtcttaaagaagggtttgccggccctaacgctgcagcgcgtgcgcggtgagaggccctttttgagcctgtttactcctgtggccttgggcagaacagtaaatactctgtgcacggaggaaagacatgcccaagaggaaggaagtactgaccatcggctgcctgtgagcagcttagcaaggagcccttgctccctgggaaaggcggtgaacttgagtctaaagatgcagtgcctggcccttcctaaggtccctgcctggcatccgagtgtcggtgtgtggcacagaaggctcctgcttgcttccaaagtgatggacaggaaggggcagagtgagtcacggcccagactgggcaccttcacgtctcagcctcagggagccccacagccccaagctcgctgaggcaacgtgagaacaggctatgggaaggctgcaaaggctgagaaatgcaaaggctcatatttataaatcccacccccagagtggggagggtcaggtgccagacctggactaaactgcaccaaggaaacacccagcagggtctcctgtgagccggggaccatgcagcccgaaacctccagtcactgcgcccggcaggagtcaggagccagggactgtgcagcctggaacctccagtcactgtgcccagcagggtgggctgtgcccagcaggagtcaggctaagaaacgccaggtctgcctgttcttgctgggcaatggctgatggctgccagtttctgctgatacacaggtaggatgggacccttcatgaatatctgactttaataagttggtaaggatatatttttttgtctatgttctgtttcaacttatgtagattattataaattgatgtaaaccacgtgagaggaaaatgttaataaaaaatgcaaagccccatcatttgcacaaaa

SEQ ID NO: 286587 - DNA, 3412 bp, Homo sapiens
taagaccctcatcaatagatggagacatacagaaatagtcaaaccacatctacaaaatgccagtatcaggcggcggcttcgaagccaaagtgatgtttggatgtaaagtgaaatattagttggcggatcaaagtggaattttccatgaaattcaccagccgagatatgagcctgaagaggaccccgtccaaaaagcagaccggcgtcttcggtgtgaagatcagcgtggtgacgaagcgggagcgctccaaggtgccctacatcgtccggcagtgtgtggaggaggtggagaagaggggtatcgaggaggttggcatctacaggatatcgggcgtggccacggacatccaggcgctcaaggccgtcttcgatgccaataacaaggacatcctgctgatgctgagtgacatggacatcaacgccatcgccgggacgctcaagctgtacttccgggaactgcccgagccgctcctcacggaccgactctacccagccttcatggagggcatcgccctgtcagaccctgctgccaaggaaaactgcatgatgcacctgctccgctccctgcccgaccccaacctcatcaccttcctcttcctgctggaacacttgaaaagggttgccgagaaggagcccatcaacaaaatgtcacttcacaacctggctaccgtgtttggacccacgttactgagaccctcagaagtggagagcaaagcacacctcacctcggctgcggacatctggtcccatgacgtcatggcgcaggtccaggtcctcctctactacctgcagcacccccccatttccttcgcagaactcaagcggaacacactgtacttctccaccgacgtgtagcccgaggcagggtggctgcgggcgggtggtggaaccagcccctccagcctggggtccaactcagacttgaaagactgcaatagaaaactcccaaacccagcactccagactcgagggaagccagcttccaagaactggaatgcgtacgtcttttgtgccaccttgtacaaagccggctgcccagccccagcctcaccaccgcatcccacctcctgccctccatacctctagttgtgtctgatgctccgtgctgttcgggaattgttttatgtacacttgtcaggcagaaaaggtagtgaccggcccggcgtgggcacacagacagcccgctttgttctttcatttcctccagcactttctttccgcctgagtccagcccaaggccttttattttgcgctgtgtaactgctgccagcttctctcttggccctgctcccagatggcggtctcctggcagcctcccctcagtcttcctccacccgctcttccttcccagcctgcctgcatgcatgtgcacccttggtcttcgctccatcgccttgaaagctctgaagaggccctgggttgccgcggcagcagtggtctgtttgatgctgccgtttgccgctgccggcccctcctcagactccgcctttgggagcacacctgctttgccttgctgcctgtgcaaatgttggacaagcagacacactcacactcgtccccagcttagcacagagctggagcgcccatttctggaattttccgtttgggaatctccacttctggggtttacctgttcggcctcctgcctatcagtgaggcatctctgactgtttcttctactgcttttcagttcccttccctgctgttctatttcctttgagtgtaaagactcacaggtgacctgctatcgagatagccagagggtcaggagagaatgggggaggaggcggtcaggctgctgaggaaacaccacaggctgaacgggggaggaatgcacatgccacgctgggtgtcccgggtcgcggggaggcagctcagctcttaggagcaagttgtgggggcttttcaagaggggccaggcttcctggagggtgactgatgtggccgaagcaggtgtccaggcaggtaggctgcagccaggagctccctggcaccgcaggacctcgtggtactcttgccttagattttacacacactccacagccaagcactgccacggtcctccaggacctgggaagcaaaggcacaggcccacggtggccagccattgtggtgccgccccagcttctggatacagccttttgggtaaacactgggaactccagaagttgtggggagagtggggaatcagacagccgcctctaggggctgggttctgctggggcctccttgttggtgctgtaggcacccgccagggagcagggacccgacttgcagacgcattgcccggtactaggaaggagtgaggtgtgttcccaccgtacacttcccacacgagctgcggctgccagcctcgggccatcagcctaggagagcagatgcagctccaggggctcgacttatagccagttacagctccccggctcttctgtgtggcagagcgtcgtttccgggccctcagggctggggagctcagttcccattgcttgtgctcagggctgagtcttaaagaagggtttgccggccctaacgctgcagcgcgtgcgcggtgagaggccctttttgagcctgtttactcctgtggccttgggcagaacagtaaatactctgtgcacggaggaaagacatgcccaagaggaaggaagtactgaccatcggctgcctgtgagcagcttagcaaggagcccttgctccctgggaaaggcggtgaacttgagtctaaagatgcagtgcctggcccttcctaaggtccctgcctggcatccgagtgtcggtgtgtggcacagaaggctcctgcttgcttccaaagtgatggacaggaaggggcagagtgagtcacggcccagactgggcaccttcacgtctcagcctcagggagccccacagccccaagctcgctgaggcaacgtgagaacaggctatgggaaggctgcaaaggctgagaaatgcaaaggctcatatttataaatcccacccccagagtggggagggtcaggtgccagacctggactaaactgcaccaaggaaacacccagcagggtctcctgtgagccggggaccatgcagcccgaaacctccagtcactgcgcccggcaggagtcaggagccagggactgtgcagcctggaacctccagtcactgtgcccagcagggtgggctgtgcccagcaggagtcaggctaagaaacgccaggtctgcctgttcttgctgggcaatggctgatggctgccagtttctgctgatacacaggtaggatgggacccttcatgaatatctgactttaataagttggtaaggatatatttttttgtctatgttctgtttcaacttatgtagattattataaattgatgtaaaccacgtgagaggaaaatgttaataaaaaatgcaaagccccatcatttgcacaaaa

SEQ ID NO: 286588 - DNA, 3097 bp, Homo sapiens
gcaggtaagcaactgcagaaactcacaagggccgactcacttgcccaggatgacccaacttataacaaggacatcctgctgatgctgagtgacatggacatcaacgccatcgccgggacgctcaagctgtacttccgggaactgcccgagccgctcctcacggaccgactctacccagccttcatggagggcatcgccctgtcagaccctgctgccaaggaaaactgcatgatgcacctgctccgctccctgcccgaccccaacctcatcaccttcctcttcctgctggaacacttgaaaagggttgccgagaaggagcccatcaacaaaatgtcacttcacaacctggctaccgtgtttggacccacgttactgagaccctcagaagtggagagcaaagcacacctcacctcggctgcggacatctggtcccatgacgtcatggcgcaggtccaggtcctcctctactacctgcagcacccccccatttccttcgcagaactcaagcggaacacactgtacttctccaccgacgtgtagcccgaggcagggtggctgcgggcgggtggtggaaccagcccctccagcctggggtccaactcagacttgaaagactgcaatagaaaactcccaaacccagcactccagactcgagggaagccagcttccaagaactggaatgcgtacgtcttttgtgccaccttgtacaaagccggctgcccagccccagcctcaccaccgcatcccacctcctgccctccatacctctagttgtgtctgatgctccgtgctgttcgggaattgttttatgtacacttgtcaggcagaaaaggtagtgaccggcccggcgtgggcacacagacagcccgctttgttctttcatttcctccagcactttctttccgcctgagtccagcccaaggccttttattttgcgctgtgtaactgctgccagcttctctcttggccctgctcccagatggcggtctcctggcagcctcccctcagtcttcctccacccgctcttccttcccagcctgcctgcatgcatgtgcacccttggtcttcgctccatcgccttgaaagctctgaagaggccctgggttgccgcggcagcagtggtctgtttgatgctgccgtttgccgctgccggcccctcctcagactccgcctttgggagcacacctgctttgccttgctgcctgtgcaaatgttggacaagcagacacactcacactcgtccccagcttagcacagagctggagcgcccatttctggaattttccgtttgggaatctccacttctggggtttacctgttcggcctcctgcctatcagtgaggcatctctgactgtttcttctactgcttttcagttcccttccctgctgttctatttcctttgagtgtaaagactcacaggtgacctgctatcgagatagccagagggtcaggagagaatgggggaggaggcggtcaggctgctgaggaaacaccacaggctgaacgggggaggaatgcacatgccacgctgggtgtcccgggtcgcggggaggcagctcagctcttaggagcaagttgtgggggcttttcaagaggggccaggcttcctggagggtgactgatgtggccgaagcaggtgtccaggcaggtaggctgcagccaggagctccctggcaccgcaggacctcgtggtactcttgccttagattttacacacactccacagccaagcactgccacggtcctccaggacctgggaagcaaaggcacaggcccacggtggccagccattgtggtgccgccccagcttctggatacagccttttgggtaaacactgggaactccagaagttgtggggagagtggggaatcagacagccgcctctaggggctgggttctgctggggcctccttgttggtgctgtaggcacccgccagggagcagggacccgacttgcagacgcattgcccggtactaggaaggagtgaggtgtgttcccaccgtacacttcccacacgagctgcggctgccagcctcgggccatcagcctaggagagcagatgcagctccaggggctcgacttatagccagttacagctccccggctcttctgtgtggcagagcgtcgtttccgggccctcagggctggggagctcagttcccattgcttgtgctcagggctgagtcttaaagaagggtttgccggccctaacgctgcagcgcgtgcgcggtgagaggccctttttgagcctgtttactcctgtggccttgggcagaacagtaaatactctgtgcacggaggaaagacatgcccaagaggaaggaagtactgaccatcggctgcctgtgagcagcttagcaaggagcccttgctccctgggaaaggcggtgaacttgagtctaaagatgcagtgcctggcccttcctaaggtccctgcctggcatccgagtgtcggtgtgtggcacagaaggctcctgcttgcttccaaagtgatggacaggaaggggcagagtgagtcacggcccagactgggcaccttcacgtctcagcctcagggagccccacagccccaagctcgctgaggcaacgtgagaacaggctatgggaaggctgcaaaggctgagaaatgcaaaggctcatatttataaatcccacccccagagtggggagggtcaggtgccagacctggactaaactgcaccaaggaaacacccagcagggtctcctgtgagccggggaccatgcagcccgaaacctccagtcactgcgcccggcaggagtcaggagccagggactgtgcagcctggaacctccagtcactgtgcccagcagggtgggctgtgcccagcaggagtcaggctaagaaacgccaggtctgcctgttcttgctgggcaatggctgatggctgccagtttctgctgatacacaggtaggatgggacccttcatgaatatctgactttaataagttggtaaggatatatttttttgtctatgttctgtttcaacttatgtagattattataaattgatgtaaaccacgtgagaggaaaatgttaataaaaaatgcaaagccccatcatttgcacaaaa

SEQ ID NO: 286589 - DNA, 2433 bp, Homo sapiens
tcgaatcgagctcggtaccgattacgctcctagacggcttgtacaaagccggctgcccagccccagcctcaccaccgcatcccacctcctgccctccatacctctagttgtgtctgatgctccgtgctgttcgggaattgttttatgtacacttgtcaggcagaaaaggtagtgaccggcccggcgtgggcacacagacagcccgctttgttctttcatttcctccagcactttctttccgcctgagtccagcccaaggccttttattttgcgctgtgtaactgctgccagcttctctcttggccctgctcccagatggcggtctcctggcagcctcccctcagtcttcctccacccgctcttccttcccagcctgcctgcatgcatgtgcacccttggtcttcgctccatcgccttgaaagctctgaagaggccctgggttgccgcggcagcagtggtctgtttgatgctgccgtttgccgctgccggcccctcctcagactccgcctttgggagcacacctgctttgccttgctgcctgtgcaaatgttggacaagcagacacactcacactcgtccccagcttagcacagagctggagcgcccatttctggaattttccgtttgggaatctccacttctggggtttacctgttcggcctcctgcctatcagtgaggcatctctgactgtttcttctactgcttttcagttcccttccctgctgttctatttcctttgagtgtaaagactcacaggtgacctgctatcgagatagccagagggtcaggagagaatgggggaggaggcggtcaggctgctgaggaaacaccacaggctgaacgggggaggaatgcacatgccacgctgggtgtcccgggtcgcggggaggcagctcagctcttaggagcaagttgtgggggcttttcaagaggggccaggcttcctggagggtgactgatgtggccgaagcaggtgtccaggcaggtaggctgcagccaggagctccctggcaccgcaggacctcgtggtactcttgccttagattttacacacactccacagccaagcactgccacggtcctccaggacctgggaagcaaaggcacaggcccacggtggccagccattgtggtgccgccccagcttctggatacagccttttgggtaaacactgggaactccagaagttgtggggagagtggggaatcagacagccgcctctaggggctgggttctgctggggcctccttgttggtgctgtaggcacccgccagggagcagggacccgacttgcagacgcattgcccggtactaggaaggagtgaggtgtgttcccaccgtacacttcccacacgagctgcggctgccagcctcgggccatcagcctaggagagcagatgcagctccaggggctcgacttatagccagttacagctccccggctcttctgtgtggcagagcgtcgtttccgggccctcagggctggggagctcagttcccattgcttgtgctcagggctgagtcttaaagaagggtttgccggccctaacgctgcagcgcgtgcgcggtgagaggccctttttgagcctgtttactcctgtggccttgggcagaacagtaaatactctgtgcacggaggaaagacatgcccaagaggaaggaagtactgaccatcggctgcctgtgagcagcttagcaaggagcccttgctccctgggaaaggcggtgaacttgagtctaaagatgcagtgcctggcccttcctaaggtccctgcctggcatccgagtgtcggtgtgtggcacagaaggctcctgcttgcttccaaagtgatggacaggaaggggcagagtgagtcacggcccagactgggcaccttcacgtctcagcctcagggagccccacagccccaagctcgctgaggcaacgtgagaacaggctatgggaaggctgcaaaggctgagaaatgcaaaggctcatatttataaatcccacccccagagtggggagggtcaggtgccagacctggactaaactgcaccaaggaaacacccagcagggtctcctgtgagccggggaccatgcagcccgaaacctccagtcactgcgcccggcaggagtcaggagccagggactgtgcagcctggaacctccagtcactgtgcccagcagggtgggctgtgcccagcaggagtcaggctaagaaacgccaggtctgcctgttcttgctgggcaatggctgatggctgccagtttctgctgatacacaggtaggatgggacccttcatgaatatctgactttaataagttggtaaggatatatttttttgtctatgttctgtttcaacttatgtagattattataaattgatgtaaaccacgtgagaggaaaatgttaataaaaaatgcaaagccccatcatttgcacaaaa

SEQ ID NO: 286590 - DNA, 3026 bp, Homo sapiens
  misc_feature (33)..(33): n is a, c, g, or t
  misc_feature (42)..(43): n is a, c, g, or t
  misc_feature (100)..(100): n is a, c, g, or t
  misc_feature (108)..(108): n is a, c, g, or t
  misc_feature (114)..(114): n is a, c, g, or t
agctgcacaggtgcgagctgccggcgttgtacnaggtgaaanngacgtagcattccagttcttggaagctggcttccctcgagtctggagtgctgggttngggagttntctatngagtctttcaagtctgagttggaccccaggctggagggactggttccgccacctgctccgctccctgcccgaccccaacctcatcaccttcctcttcctgctggaacacttgaaaagggttgccgagaaggagcccatcaacaaaatgtcacttcacaacctggctaccgtgtttggacccacgttactgagaccctcagaagtggagagcaaagcacacctcacctcggctgcggacatctggtcccatgacgtcatggcgcaggtccaggtcctcctctactacctgcagcacccccccatttccttcgcagaactcaagcggaacacactgtacttctccaccgacgtgtagcccgaggcagggtggctgcgggcgggtggtggaaccagcccctccagcctggggtccaactcagacttgaaagactgcaatagaaaactcccaaacccagcactccagactcgagggaagccagcttccaagaactggaatgcgtacgtcttttgtgccaccttgtacaaagccggctgcccagccccagcctcaccaccgcatcccacctcctgccctccatacctctagttgtgtctgatgctccgtgctgttcgggaattgttttatgtacacttgtcaggcagaaaaggtagtgaccggcccggcgtgggcacacagacagcccgctttgttctttcatttcctccagcactttctttccgcctgagtccagcccaaggccttttattttgcgctgtgtaactgctgccagcttctctcttggccctgctcccagatggcggtctcctggcagcctcccctcagtcttcctccacccgctcttccttcccagcctgcctgcatgcatgtgcacccttggtcttcgctccatcgccttgaaagctctgaagaggccctgggttgccgcggcagcagtggtctgtttgatgctgccgtttgccgctgccggcccctcctcagactccgcctttgggagcacacctgctttgccttgctgcctgtgcaaatgttggacaagcagacacactcacactcgtccccagcttagcacagagctggagcgcccatttctggaattttccgtttgggaatctccacttctggggtttacctgttcggcctcctgcctatcagtgaggcatctctgactgtttcttctactgcttttcagttcccttccctgctgttctatttcctttgagtgtaaagactcacaggtgacctgctatcgagatagccagagggtcaggagagaatgggggaggaggcggtcaggctgctgaggaaacaccacaggctgaacgggggaggaatgcacatgccacgctgggtgtcccgggtcgcggggaggcagctcagctcttaggagcaagttgtgggggcttttcaagaggggccaggcttcctggagggtgactgatgtggccgaagcaggtgtccaggcaggtaggctgcagccaggagctccctggcaccgcaggacctcgtggtactcttgccttagattttacacacactccacagccaagcactgccacggtcctccaggacctgggaagcaaaggcacaggcccacggtggccagccattgtggtgccgccccagcttctggatacagccttttgggtaaacactgggaactccagaagttgtggggagagtggggaatcagacagccgcctctaggggctgggttctgctggggcctccttgttggtgctgtaggcacccgccagggagcagggacccgacttgcagacgcattgcccggtactaggaaggagtgaggtgtgttcccaccgtacacttcccacacgagctgcggctgccagcctcgggccatcagcctaggagagcagatgcagctccaggggctcgacttatagccagttacagctccccggctcttctgtgtggcagagcgtcgtttccgggccctcagggctggggagctcagttcccattgcttgtgctcagggctgagtcttaaagaagggtttgccggccctaacgctgcagcgcgtgcgcggtgagaggccctttttgagcctgtttactcctgtggccttgggcagaacagtaaatactctgtgcacggaggaaagacatgcccaagaggaaggaagtactgaccatcggctgcctgtgagcagcttagcaaggagcccttgctccctgggaaaggcggtgaacttgagtctaaagatgcagtgcctggcccttcctaaggtccctgcctggcatccgagtgtcggtgtgtggcacagaaggctcctgcttgcttccaaagtgatggacaggaaggggcagagtgagtcacggcccagactgggcaccttcacgtctcagcctcagggagccccacagccccaagctcgctgaggcaacgtgagaacaggctatgggaaggctgcaaaggctgagaaatgcaaaggctcatatttataaatcccacccccagagtggggagggtcaggtgccagacctggactaaactgcaccaaggaaacacccagcagggtctcctgtgagccggggaccatgcagcccgaaacctccagtcactgcgcccggcaggagtcaggagccagggactgtgcagcctggaacctccagtcactgtgcccagcagggtgggctgtgcccagcaggagtcaggctaagaaacgccaggtctgcctgttcttgctgggcaatggctgatggctgccagtttctgctgatacacaggtaggatgggacccttcatgaatatctgactttaataagttggtaaggatatatttttttgtctatgttctgtttcaacttatgtagattattataaattgatgtaaaccacgtgagaggaaaatgttaataaaaaatgcaaagccccatcatttgcacaaaa

SEQ ID NO: 286591 - DNA, 2856 bp, Homo sapiens
  misc_feature (33)..(33): n is a, c, g, or t
  misc_feature (42)..(43): n is a, c, g, or t
  misc_feature (100)..(100): n is a, c, g, or t
  misc_feature (108)..(108): n is a, c, g, or t
  misc_feature (114)..(114): n is a, c, g, or t
agctgcacaggtgcgagctgccggcgttgtacnaggtgaaanngacgtagcattccagttcttggaagctggcttccctcgagtctggagtgctgggttngggagttntctatngagtctttcaagtctgagttggaccccaggctggagtcagcaaggacgaggccaaggacagggagcccagcctccgccttcctgtctccccacaggtccaggtcctcctctactacctgcagcacccccccatttccttcgcagaactcaagcggaacacactgtacttctccaccgacgtgtagcccgaggcagggtggctgcgggcgggtggtggaaccagcccctccagcctggggtccaactcagacttgaaagactgcaatagaaaactcccaaacccagcactccagactcgagggaagccagcttccaagaactggaatgcgtacgtcttttgtgccaccttgtacaaagccggctgcccagccccagcctcaccaccgcatcccacctcctgccctccatacctctagttgtgtctgatgctccgtgctgttcgggaattgttttatgtacacttgtcaggcagaaaaggtagtgaccggcccggcgtgggcacacagacagcccgctttgttctttcatttcctccagcactttctttccgcctgagtccagcccaaggccttttattttgcgctgtgtaactgctgccagcttctctcttggccctgctcccagatggcggtctcctggcagcctcccctcagtcttcctccacccgctcttccttcccagcctgcctgcatgcatgtgcacccttggtcttcgctccatcgccttgaaagctctgaagaggccctgggttgccgcggcagcagtggtctgtttgatgctgccgtttgccgctgccggcccctcctcagactccgcctttgggagcacacctgctttgccttgctgcctgtgcaaatgttggacaagcagacacactcacactcgtccccagcttagcacagagctggagcgcccatttctggaattttccgtttgggaatctccacttctggggtttacctgttcggcctcctgcctatcagtgaggcatctctgactgtttcttctactgcttttcagttcccttccctgctgttctatttcctttgagtgtaaagactcacaggtgacctgctatcgagatagccagagggtcaggagagaatgggggaggaggcggtcaggctgctgaggaaacaccacaggctgaacgggggaggaatgcacatgccacgctgggtgtcccgggtcgcggggaggcagctcagctcttaggagcaagttgtgggggcttttcaagaggggccaggcttcctggagggtgactgatgtggccgaagcaggtgtccaggcaggtaggctgcagccaggagctccctggcaccgcaggacctcgtggtactcttgccttagattttacacacactccacagccaagcactgccacggtcctccaggacctgggaagcaaaggcacaggcccacggtggccagccattgtggtgccgccccagcttctggatacagccttttgggtaaacactgggaactccagaagttgtggggagagtggggaatcagacagccgcctctaggggctgggttctgctggggcctccttgttggtgctgtaggcacccgccagggagcagggacccgacttgcagacgcattgcccggtactaggaaggagtgaggtgtgttcccaccgtacacttcccacacgagctgcggctgccagcctcgggccatcagcctaggagagcagatgcagctccaggggctcgacttatagccagttacagctccccggctcttctgtgtggcagagcgtcgtttccgggccctcagggctggggagctcagttcccattgcttgtgctcagggctgagtcttaaagaagggtttgccggccctaacgctgcagcgcgtgcgcggtgagaggccctttttgagcctgtttactcctgtggccttgggcagaacagtaaatactctgtgcacggaggaaagacatgcccaagaggaaggaagtactgaccatcggctgcctgtgagcagcttagcaaggagcccttgctccctgggaaaggcggtgaacttgagtctaaagatgcagtgcctggcccttcctaaggtccctgcctggcatccgagtgtcggtgtgtggcacagaaggctcctgcttgcttccaaagtgatggacaggaaggggcagagtgagtcacggcccagactgggcaccttcacgtctcagcctcagggagccccacagccccaagctcgctgaggcaacgtgagaacaggctatgggaaggctgcaaaggctgagaaatgcaaaggctcatatttataaatcccacccccagagtggggagggtcaggtgccagacctggactaaactgcaccaaggaaacacccagcagggtctcctgtgagccggggaccatgcagcccgaaacctccagtcactgcgcccggcaggagtcaggagccagggactgtgcagcctggaacctccagtcactgtgcccagcagggtgggctgtgcccagcaggagtcaggctaagaaacgccaggtctgcctgttcttgctgggcaatggctgatggctgccagtttctgctgatacacaggtaggatgggacccttcatgaatatctgactttaataagttggtaaggatatatttttttgtctatgttctgtttcaacttatgtagattattataaattgatgtaaaccacgtgagaggaaaatgttaataaaaaatgcaaagccccatcatttgcacaaaa

SEQ ID NO: 286592 - DNA, 5627 bp, Homo sapiens
gcggccgcagcgggggacccgcgacctggagcagcgggaggccgaggccaagggccgcccgggctcgcccctcgccgcggaggagacccccgggcgcgagcacctgcccccgtggcggcgccgcaggttcctgcgggtgcccgagcgggactcgcccggccacagctcgccggagagagacagcgacggcagccggcacagctccgaccgcgaggacgacttctccgcagacttcagctacgggacggacgagtacgacggagaggggaatgaggagcagaaggggcccccggagggctcagagaccatgccgtacatcgatgagtcgcccaccatgtccccgcagctcagcgcccgcagccagggcgggggggatggcgtctccccgactccacctgagggactggctcctggggtggaagcagggaaaggcctggagatgaggaagctggttctctcggggttcttggccagcgaagagatctacattaaccagctggaagccctgttgctgcccatgaaacccctgaaggccaccgccaccacctcccagcccgtgctcaccatccagcagatcgagaccatcttctacaagatccaggacatctatgagatccacaaggagttctatgacaacctgtgccccaaggtgcaacagtgggacagccaggtcaccatgggccacctcttccagaagctggccagccagctcggtgtgtacaaagcgtttgtcgataactataaagtcgctctggagacagctgagaagtgcagccagtccaacaaccagttccagaagatctcagaggaactcaaagtgaaaggtcccaaggactccaaggacagccacacgtctgtcaccatggaagctctgctctacaagcccattgaccgggtcactcggagcaccctagtcctacacgacctgctgaagcacacacctgtggaccaccccgactacccgctgctgcaggatgccctccgcatctcccagaacttcctgtccagcatcaacgaggacatcgacccccgccggactgcagtgacaacgcccaagggggagacgcgacagctggtgaaggacggcttcctggtggaagtgtcagagagctcccggaagctgcggcacgtcttcctctttacagatgtcctactgtgtgccaagctgaagaagacctctgcagggaagcaccagcagtatgactgtaagtggtacatccccctggccgacctggtgtttccatcccccgaggaatctgaggccagcccccaggtgcaccccttcccagaccatgagctggaggacatgaagatgaagatctctgccctcaagagtgaaatccagaaggagaaagccaacaaaggccagagccgggccatcgagcgcctgaagaagaagatgtttgagaatgagttcctgctgctgctcaactcccccacaatcccgttcaggatccacaatcggaatggaaagagttacctgttcctactgtcctcggactacgagaggtcagagtggagagaagcaattcagaaactacagaagaaggatctccaggcctttgtcctgagctcagtggagctccaggtgctcacaggatcctgtttcaagcttaggactgtacacaacattcctgtcaccagcaataaagacgacgatgagtctccaggactctatggcttccttcatgtcatcgtccactctgccaagggatttaagcaatcagccaacctgtactgtaccctggaggtggattccttcggctattttgtcagcaaagccaaaaccagggtgttccgggacacagcggagcccaagtgggatgaggagtttgagatcgagctggagggctcccagtccctgaggatcctgtgctatgagaagtgctatgacaagaccaaggtcaacaaggacaacaatgagatcgtggacaagatcatgggcaaaggacagatccagctggacccacaaaccgtggagaccaagaactggcacacggacgtgattgagatgaacgggatcaaagtggaattttccatgaaattcaccagccgagatatgagcctgaagaggaccccgtccaaaaagcagaccggcgtcttcggtgtgaagatcagcgtggtgacgaagcgggagcgctccaaggtgccctacatcgtccggcagtgtgtggaggaggtggagaagaggggtatcgaggaggttggcatctacaggatatcgggcgtggccacggacatccaggcgctcaaggccgtcttcgatgccaataacaaggacatcctgctgatgctgagtgacatggacatcaacgccatcgccgggacgctcaagctgtacttccgggaactgcccgagccgctcctcacggaccgactctacccagccttcatggagggcatcgccctgtcagaccctgctgccaaggaaaactgcatgatgcacctgctccgctccctgcccgaccccaacctcatcaccttcctcttcctgctggaacacttgaaaagggttgccgagaaggagcccatcaacaaaatgtcacttcacaacctggctaccgtgtttggacccacgttactgagaccctcagaagtggagagcaaagcacacctcacctcggctgcggacatctggtcccatgacgtcatggcgcaggtccaggtcctcctctactacctgcagcacccccccatttccttcgcagaactcaagcggaacacactgtacttctccaccgacgtgtagcccgaggcagggtggctgcgggcgggtggtggaaccagcccctccagcctggggtccaactcagacttgaaagactgcaatagaaaactcccaaacccagcactccagactcgagggaagccagcttccaagaactggaatgcgtacgtcttttgtgccaccttgtacaaagccggctgcccagccccagcctcaccaccgcatcccacctcctgccctccatacctctagttgtgtctgatgctccgtgctgttcgggaattgttttatgtacacttgtcaggcagaaaaggtagtgaccggcccggcgtgggcacacagacagcccgctttgttctttcatttcctccagcactttctttccgcctgagtccagcccaaggccttttattttgcgctgtgtaactgctgccagcttctctcttggccctgctcccagatggcggtctcctggcagcctcccctcagtcttcctccacccgctcttccttcccagcctgcctgcatgcatgtgcacccttggtcttcgctccatcgccttgaaagctctgaagaggccctgggttgccgcggcagcagtggtctgtttgatgctgccgtttgccgctgccggcccctcctcagactccgcctttgggagcacacctgctttgccttgctgcctgtgcaaatgttggacaagcagacacactcacactcgtccccagcttagcacagagctggagcgcccatttctggaattttccgtttgggaatctccacttctggggtttacctgttcggcctcctgcctatcagtgaggcatctctgactgtttcttctactgcttttcagttcccttccctgctgttctatttcctttgagtgtaaagactcacaggtgacctgctatcgagatagccagagggtcaggagagaatgggggaggaggcggtcaggctgctgaggaaacaccacaggctgaacgggggaggaatgcacatgccacgctgggtgtcccgggtcgcggggaggcagctcagctcttaggagcaagttgtgggggcttttcaagaggggccaggcttcctggagggtgactgatgtggccgaagcaggtgtccaggcaggtaggctgcagccaggagctccctggcaccgcaggacctcgtggtactcttgccttagattttacacacactccacagccaagcactgccacggtcctccaggacctgggaagcaaaggcacaggcccacggtggccagccattgtggtgccgccccagcttctggatacagccttttgggtaaacactgggaactccagaagttgtggggagagtggggaatcagacagccgcctctaggggctgggttctgctggggcctccttgttggtgctgtaggcacccgccagggagcagggacccgacttgcagacgcattgcccggtactaggaaggagtgaggtgtgttcccaccgtacacttcccacacgagctgcggctgccagcctcgggccatcagcctaggagagcagatgcagctccaggggctcgacttatagccagttacagctccccggctcttctgtgtggcagagcgtcgtttccgggccctcagggctggggagctcagttcccattgcttgtgctcagggctgagtcttaaagaagggtttgccggccctaacgctgcagcgcgtgcgcggtgagaggccctttttgagcctgtttactcctgtggccttgggcagaacagtaaatactctgtgcacggaggaaagacatgcccaagaggaaggaagtactgaccatcggctgcctgtgagcagcttagcaaggagcccttgctccctgggaaaggcggtgaacttgagtctaaagatgcagtgcctggcccttcctaaggtccctgcctggcatccgagtgtcggtgtgtggcacagaaggctcctgcttgcttccaaagtgatggacaggaaggggcagagtgagtcacggcccagactgggcaccttcacgtctcagcctcagggagccccacagccccaagctcgctgaggcaacgtgagaacaggctatgggaaggctgcaaaggctgagaaatgcaaaggctcatatttataaatcccacccccagagtggggagggtcaggtgccagacctggactaaactgcaccaaggaaacacccagcagggtctcctgtgagccggggaccatgcagcccgaaacctccagtcactgcgcccggcaggagtcaggagccagggactgtgcagcctggaacctccagtcactgtgcccagcagggtgggctgtgcccagcaggagtcaggctaagaaacgccaggtctgcctgttcttgctgggcaatggctgatggctgccagtttctgctgatacacaggtaggatgggacccttcatgaatatctgactttaataagttggtaaggatatatttttttgtctatgttctgtttcaacttatgtagattattataaattgatgtaaaccacgtgagaggaaaatgttaataaaaaatgcaaagccccatcatttgcacaaaactcagccctgtggtgtggatgtttgtgttcgcggtggtccagggaagccaccaatgtaaatatttaactcttccagctgcatccagatgtgagtttccaggaatctgtttacctagttcactccccttgagcctccctgtggcccacgggggctggggcagagctgcggggaggtgggctggagccctctccttgctcttcacaaaggcctccggatcagccagcatccaggctgcttctggctcacctttgccatgtgctgctacagtacaaatgtcccacctggccatcggtgtgccttgaaagtggcatgaagttgtc

SEQ ID NO: 286593 - DNA, 5250 bp, Homo sapiens
gcggccgcagcgggggacccgcgacctggagcagcgggaggccgaggccaagggccgcccgggctcgcccctcgccgcggaggagacccccgggcgcgagcacctgcccccgtggcggcgccgcaggttcctgcgggtgcccgagcgggactcgcccggccacagctcgccggagagagacagcgacggcagccggcacagctccgaccgcgaggacgacttctccgcagacttcagctacgggacggacgagtacgacggagaggggaatgaggagcagaaggggcccccggagggctcagagaccatgccgtacatcgatgagtcgcccaccatgtccccgcagctcagcgcccgcagccagggcgggggggatggcgtctccccgactccacctgagggactggctcctggggtggaagcagggaaaggcctggagatgaggaagctggttctctcggggttcttggccagcgaagagatctacattaaccagctggaagccctgttgctgcccatgaaacccctgaaggccaccgccaccacctcccagcccgtgctcaccatccagcagatcgagaccatcttctacaagatccaggacatctatgagatccacaaggagttctatgacaacctgtgccccaaggtgcaacagtgggacagccaggtcaccatgggccacctcttccagaagctggccagccagctcggtgtgtacaaagcgtttgtcgataactataaagtcgctctggagacagctgagaagtgcagccagtccaacaaccagttccagaagatctcagaggaactcaaagtgaaaggtcccaaggactccaaggacagccacacgtctgtcaccatggaagctctgctctacaagcccattgaccgggtcactcggagcaccctagtcctacacgacctgctgaagcacacacctgtggaccaccccgactacccgctgctgcaggatgccctccgcatctcccagaacttcctgtccagcatcaacgaggacatcgacccccgccggactgcagtgacaacgcccaagggggagacgcgacagctggtgaaggacggcttcctggtggaagtgtcagagagctcccggaagctgcggcacgtcttcctctttacagatgtcctactgtgtgccaagctgaagaagacctctgcagggaagcaccagcagtatgactgtaagtggtacatccccctggccgacctggtgtttccatcccccgaggaatctgaggccagcccccaggtgcaccccttcccagaccatgagctggaggacatgaagatgaagatctctgccctcaagagtgaaatccagaaggagaaagccaacaaaggccagagccgggccatcgagcgcctgaagaagaagatgtttgagaatgagttcctgctgctgctcaactcccccacaatcccgttcaggatccacaatcggaatggaaagagttacctgttcctactgtcctcggactacgagaggtcagagtggagagaagcaattcagaaactacagaagaaggatctccaggcctttgtcctgagctcagtggagctccaggtgctcacaggatcctgtttcaagcttaggactgtacacaacattcctgtcaccagcaataaagacgacgatgagtctccaggactctatggcttccttcatgtcatcgtccactctgccaagggatttaagcaatcagccaacctgtactgtaccctggaggtggattccttcggctattttgtcagcaaagccaaaaccagggtgttccgggacacagcggagcccaagtgggatgaggagtttgagatcgagctggagggctcccagtccctgaggatcctgtgctatgagaagtgctatgacaagaccaaggtcaacaaggacaacaatgagatcgtggacaagatcatgggcaaaggacagatccagctggacccacaaaccgtggagaccaagaactggcacacggacgtgattgagatgaacgggatcaaagtggaattttccatgaaattcaccagccgagatatgagcctgaagaggaccccgtccaaaaagcagaccggcgtcttcggtgtgaagatcagcgtggtgacgaagcgggagcgctccaaggtgccctacatcgtccggcagtgtgtggaggaggtggagaagaggggtatcgaggaggttggcatctacaggatatcgggcgtggccacggacatccaggcgctcaaggccgtcttcgatgccaataacaaggacatcctgctgatgctgagtgacatggacatcaacgccatcgccgggacgctcaagctgtacttccgggaactgcccgagccgctcctcacggaccgactctacccagccttcatggagggcatcgccctgtcagaccctgctgccaaggaaaactgcatgatgcacctgctccgctccctgcccgaccccaacctcatcaccttcctcttcctgctggaacacttgaaaagggttgccgagaaggagcccatcaacaaaatgtcacttcacaacctggctaccgtgtttggacccacgttactgagaccctcagaagtggagagcaaagcacacctcacctcggctgcggacatctggtcccatgacgtcatggcgcaggtccaggtcctcctctactacctgcagcacccccccatttccttcgcagaactcaagcggaacacactgtacttctccaccgacgtgtagcccgaggcagggtggctgcgggcgggtggtggaaccagcccctccagcctggggtccaactcagacttgaaagactgcaatagaaaactcccaaacccagcactccagactcgagggaagccagcttccaagaactggaatgcgtacgtcttttgtgccaccttgtacaaagccggctgcccagccccagcctcaccaccgcatcccacctcctgccctccatacctctagttgtgtctgatgctccgtgctgttcgggaattgttttatgtacacttgtcaggcagaaaaggtagtgaccggcccggcgtgggcacacagacagcccgctttgttctttcatttcctccagcactttctttccgcctgagtccagcccaaggccttttattttgcgctgtgtaactgctgccagcttctctcttggccctgctcccagatggcggtctcctggcagcctcccctcagtcttcctccacccgctcttccttcccagcctgcctgcatgcatgtgcacccttggtcttcgctccatcgccttgaaagctctgaagaggccctgggttgccgcggcagcagtggtctgtttgatgctgccgtttgccgctgccggcccctcctcagactccgcctttgggagcacacctgctttgccttgctgcctgtgcaaatgttggacaagcagacacactcacactcgtccccagcttagcacagagctggagcgcccatttctggaattttccgtttgggaatctccacttctggggtttacctgttcggcctcctgcctatcagtgaggcatctctgactgtttcttctactgcttttcagttcccttccctgctgttctatttcctttgagtgtaaagactcacaggtgacctgctatcgagatagccagagggtcaggagagaatgggggaggaggcggtcaggctgctgaggaaacaccacaggctgaacgggggaggaatgcacatgccacgctgggtgtcccgggtcgcggggaggcagctcagctcttaggagcaagttgtgggggcttttcaagaggggccaggcttcctggagggtgactgatgtggccgaagcaggtgtccaggcaggtaggctgcagccaggagctccctggcaccgcaggacctcgtggtactcttgccttagattttacacacactccacagccaagcactgccacggtcctccaggacctgggaagcaaaggcacaggcccacggtggccagccattgtggtgccgccccagcttctggatacagccttttgggtaaacactgggaactccagaagttgtggggagagtggggaatcagacagccgcctctaggggctgggttctgctggggcctccttgttggtgctgtaggcacccgccagggagcagggacccgacttgcagacgcattgcccggtactaggaaggagtgaggtgtgttcccaccgtacacttcccacacgagctgcggctgccagcctcgggccatcagcctaggagagcagatgcagctccaggggctcgacttatagccagttacagctccccggctcttctgtgtggcagagcgtcgtttccgggccctcagggctggggagctcagttcccattgcttgtgctcagggctgagtcttaaagaagggtttgccggccctaacgctgcagcgcgtgcgcggtgagaggccctttttgagcctgtttactcctgtggccttgggcagaacagtaaatactctgtgcacggaggaaagacatgcccaagaggaaggaagtactgaccatcggctgcctgtgagcagcttagcaaggagcccttgctccctgggaaaggcggtgaacttgagtctaaagatgcagtgcctggcccttcctaaggtccctgcctggcatccgagtgtcggtgtgtggcacagaaggctcctgcttgcttccaaagtgatggacaggaaggggcagagtgagtcacggcccagactgggcaccttcacgtctcagcctcagggagccccacagccccaagctcgctgaggcaacgtgagaacaggctatgggaaggctgcaaaggctgagaaatgcaaaggctcatatttataaatcccacccccagagtggggagggtcaggtgccagacctggactaaactgcaccaaggaaacacccagcagggtctcctgtgagccggggaccatgcagcccgaaacctccagtcactgcgcccggcaggagtcaggagccagggactgtgcagcctggaacctccagtcactgtgcccagcagggtgggaatggctgatggctgccagtttctgctgatacacaggtaggatgggacccttcatgaatatctgactttaataagttggtaaggatatatttttttgtctatgttctgtttcaacttatgtagattattataaattgatgtaaaccacgtgagaggaaaatgttaataaaaaatgcaaagccccatcatttgcacaaaa

SEQ ID NO: 286594 - DNA, 1205 bp, Homo sapiens
gacccacgcgtcggacgcgtgggtcgacccacgcgtcgcacccgccagggagcagggacccgacttgcagacgcattgcccggtactaggaaggagtgaggtgtgttcccaccgtacacttcccacacgagctgcggctgccagcctcgggccatcagcctaggagagcagatgcagctccaggggctcgacttatagccagttacagctccccggctcttctgtgtggcagagcgtcgtttccgggccctcagggctggggagctcagttcccattgcttgtgctcagggctgagtcttaaagaagggtttgccggccctaacgctgcagcgcgtgcgcggtgagaggccctttttgagcctgtttactcctgtggccttgggcagaacagtaaatactctgtgcacggaggaaagacatgcccaagaggaaggaagtactgaccatcggctgcctgtgagcagcttagcaaggagcccttgctccctgggaaaggcggtgaacttgagtctaaagatgcagtgcctggcccttcctaaggtccctgcctggcatccgagtgtcggtgtgtggcacagaaggctcctgcttgcttccaaagtgatggacaggaaggggcagagtgagtcacggcccagactgggcaccttcacgtctcagcctcagggagccccacagccccaagctcgctgaggcaacgtgagaacaggctatgggaaggctgcaaaggctgagaaatgcaaaggctcatatttataaatcccacccccagagtggggagggtcaggtgccagacctggactaaactgcaccaaggaaacacccagcagggtctcctgtgagccggggaccatgcagcccgaaacctccagtcactgcgcccggcaggagtcaggagccagggactgtgcagcctggaacctccagtcactgtgcccagcagggtgggctgtgcccagcaggagtcaggctaagaaacgccaggtctgcctgttcttgctgggcaatggctgatggctgccagtttctgctgatacacaggtaggatgggacccttcatgaatatctgactttaataagttggtaaggatatatttttttgtctatgttctgtttcaacttatgtagattattataaattgatgtaaaccacgtgagaggaaaatgttaataaaaaatgcaaagccccatcatttgcacaaaa

SEQ ID NO: 286595 - DNA, 3394 bp, Homo sapiens
gcggccgcagcgggggacccgcgacctggagcagcgggaggccgaggccaagggccgcccgggctcgcccctcgccgcggaggagacccccgggcgcgagcacctgcccccgtggcggcgccgcaggttcctgcgggtgcccgagcgggactcgcccggccacagctcgccggagagagacagcgacggcagccggcacagctccgaccgcgaggacgacttctccgcagacttcagctacgggacggacgagtacgacggagaggggaatgaggagcagaaggggcccccggagggctcagagaccatgccgtacatcgatgagtcgcccaccatgtccccgcagctcagcgcccgcagccagggcgggggggatggcgtctccccgactccacctgagggactggctcctggggtggaagcagggaaaggcctggagatgaggaagctggttctctcggggttcttggccagcgaagagatctacattaaccagctggaagccctgttgctgcccatgaaacccctgaaggccaccgccaccacctcccagcccgtgctcaccatccagcagatcgagaccatcttctacaagatccaggacatctatgagatccacaaggagttctatgacaacctgtgccccaaggtgcaacagtgggacagccaggtcaccatgggccacctcttccagaagctggccagccagctcggtgtgtacaaagcgtttgtcgataactataaagtcgctctggagacagctgagaagtgcagccagtccaacaaccagttccagaagatctcagaggaactcaaagtgaaaggtcccaaggactccaaggacagccacacgtctgtcaccatggaagctctgctctacaagcccattgaccgggtcactcggagcaccctagtcctacacgacctgctgaagcacacacctgtggaccaccccgactacccgctgctgcaggatgccctccgcatctcccagaacttcctgtccagcatcaacgaggacatcgacccccgccggactgcagtgacaacgcccaagggggagacgcgacagctggtgaaggacggcttcctggtggaagtgtcagagagctcccggaagctgcggcacgtcttcctctttacagatgtcctactgtgtgccaagctgaagaagacctctgcagggaagcaccagcagtatgactgtaagtggtacatccccctggccgacctggtgtttccatcccccgaggaatctgaggccagcccccaggtgcaccccttcccagaccatgagctggaggacatgaagatgaagatctctgccctcaagagtgaaatccagaaggagaaagccaacaaaggccagagccgggccatcgagcgcctgaagaagaagatgtttgagaatgagttcctgctgctgctcaactcccccacaatcccgttcaggatccacaatcggaatggaaagagttacctgttcctactgtcctcggactacgagaggtcagagtggagagaagcaattcagaaactacagaagaaggatctccaggcctttgtcctgagctcagtggagctccaggtgctcacaggatcctgtttcaagcttaggactgtacacaacattcctgtcaccagcaataaagacgacgatgagtctccaggactctatggcttccttcatgtcatcgtccactctgccaagggatttaagcaatcagccaacctgtactgtaccctggaggtggattccttcggctattttgtcagcaaagccaaaaccagggtgttccgggacacagcggagcccaagtgggatgaggagtttgagatcgagctggagggctcccagtccctgaggatcctgtgctatgagaagtgctatgacaagaccaaggtcaacaaggacaacaatgagatcgtggacaagatcatgggcaaaggacagatccagctggacccacaaaccgtggagaccaagaactggcacacggacgtgattgagatgaacgggatcaaagtggaattttccatgaaattcaccagccgagatatgagcctgaagaggaccccgtccaaaaagcagaccggcgtcttcggtgtgaagatcagcgtggtgacgaagcgggagcgctccaaggtgccctacatcgtccggcagtgtgtggaggaggtggagaagaggggtatcgaggaggttggcatctacaggatatcgggcgtggccacggacatccaggcgctcaaggccgtcttcgatgccaataacaaggacatcctgctgatgctgagtgacatggacatcaacgccatcgccgggacgctcaagctgtacttccgggaactgcccgagccgctcctcacggaccgactctacccagccttcatggagggcatcgccctgtcagaccctgctgccaaggaaaactgcatgatgcacctgctccgctccctgcccgaccccaacctcatcaccttcctcttcctgctggaacacttgaaaagggttgccgagaaggagcccatcaacaaaatgtcacttcacaacctggctaccgtgtttggacccacgttactgagaccctcagaagtggagagcaaagcacacctcacctcggctgcggacatctggtcccatgacgtcatggcgcaggtccaggtcctcctctactacctgcagcacccccccatttccttcgcagaactcaagcggaacacactgtacttctccaccgacgtgtagcccgaggcagggtggctgcgggcgggtggtggaaccagcccctccagcctggggtccaactcagacttgaaagactgcaatagaaaactcccaaacccagcactccagactcgagggaagccagcttccaagaactggaatgcgtacgtcttttgtgccaccttgtacaaagccggctgcccagccccagcctcaccaccgcatcccacctcctgccctccatacctctagttgtgtctgatgctccgtgctgttcgggaattgttttatgtacacttgtcaggcagaaaaggtagtgaccggcccggcgtgggcacacagacagcccgctttgttctttcatttcctccagcactttctttccgcctgagtccagcccaaggccttttattttgcgctgtgtaactgctgccagcttctctcttggccctgctcccagatggcggtctcctggcagcctcccctcagtcttcctccacccgctcttccttcccagcctgcctgcatgcatgtgcacccttggtcttcgctccattgcgcaattcacgcctggggggccaagagtgagactttgtttcacaaaaaaaaaaaatataaaagaattattggaaaacaggacttgccttcatgcttctgtcagtgtac

SEQ ID NO: 286596 - DNA, 2738 bp, Homo sapiens
  misc_feature (2729)..(2729): n is a, c, g, or t
  misc_feature (2737)..(2738): n is a, c, g, or t
gcggccgcagcgggggacccgcgacctggagcagcgggaggccgaggccaagggccgcccgggctcgcccctcgccgcggaggagacccccgggcgcgagcacctgcccccgtggcggcgccgcaggttcctgcgggtgcccgagcgggactcgcccggccacagctcgccggagagagacagcgacggcagccggcacagctccgaccgcgaggacgacttctccgcagacttcagctacgggacggacgagtacgacggagaggggaatgaggagcagaaggggcccccggagggctcagagaccatgccgtacatcgatgagtcgcccaccatgtccccgcagctcagcgcccgcagccagggcgggggggatggcgtctccccgactccacctgagggactggctcctggggtggaagcagggaaaggcctggagatgaggaagctggttctctcggggttcttggccagcgaagagatctacattaaccagctggaagccctgttgctgcccatgaaacccctgaaggccaccgccaccacctcccagcccgtgctcaccatccagcagatcgagaccatcttctacaagatccaggacatctatgagatccacaaggagttctatgacaacctgtgccccaaggtgcaacagtgggacagccaggtcaccatgggccacctcttccagaagctggccagccagctcggtgtgtacaaagcgtttgtcgataactataaagtcgctctggagacagctgagaagtgcagccagtccaacaaccagttccagaagatctcagaggaactcaaagtgaaaggtcccaaggactccaaggacagccacacgtctgtcaccatggaagctctgctctacaagcccattgaccgggtcactcggagcaccctagtcctacacgacctgctgaagcacacacctgtggaccaccccgactacccgctgctgcaggatgccctccgcatctcccagaacttcctgtccagcatcaacgaggacatcgacccccgccggactgcagtgacaacgcccaagggggagacgcgacagctggtgaaggacggcttcctggtggaagtgtcagagagctcccggaagctgcggcacgtcttcctctttacagatgtcctactgtgtgccaagctgaagaagacctctgcagggaagcaccagcagtatgactgtaagtggtacatccccctggccgacctggtgtttccatcccccgaggaatctgaggccagcccccaggtgcaccccttcccagaccatgagctggaggacatgaagatgaagatctctgccctcaagagtgaaatccagaaggagaaagccaacaaaggccagagccgggccatcgagcgcctgaagaagaagatgtttgagaatgagttcctgctgctgctcaactcccccacaatcccgttcaggatccacaatcggaatggaaagagttacctgttcctactgtcctcggactacgagaggtcagagtggagagaagcaattcagaaactacagaagaaggatctccaggcctttgtcctgagctcagtggagctccaggtgctcacaggatcctgtttcaagcttaggactgtacacaacattcctgtcaccagcaataaagacgacgatgagtctccaggactctatggcttccttcatgtcatcgtccactctgccaagggatttaagcaatcagccaacctgtactgtaccctggaggtggattccttcggctattttgtcagcaaagccaaaaccagggtgttccgggacacagcggagcccaagtgggatgaggagtttgagatcgagctggagggctcccagtccctgaggatcctgtgctatgagaagtgctatgacaagaccaaggtcaacaaggacaacaatgagatcgtggacaagatcatgggcaaaggacagatccagctggacccacaaaccgtggagaccaagaactggcacacggacgtgattgagatgaacgggatcaaagtggaattttccatgaaattcaccagccgagatatgagcctgaagaggaccccgtccaaaaagcagaccggcgtcttcggtgtgaagatcagcgtggtgacgaagcgggagcgctccaaggtgccctacatcgtccggcagtgtgtggaggaggtggagaagaggggtatcgaggaggttggcatctacaggatatcgggcgtggccacggacatccaggcgctcaaggccgtcttcgatgccaataacaaggacatcctgctgatgctgagtgacatggacatcaacgccatcgccgggacgctcaagctgtacttccgggaactgcccgagccgctcctcacggaccgactctacccagccttcatggagggcatcgccctgtcagaccctgctgccaaggaaaactgcatgatgcacctgctccgctccctgcccgaccccaacctcatcaccttcctcttcctgctggaacacttgaaaagggttgccgagaaggagcccatcaacaaaatgtcacttcacaacctggctaccgtgtttggacccacgttactgagaccctcagaagtggagagcaaagcacacctcacctcggctgcggacatctggtcccatgacgtcatggcgcagccaggtcctcctctactacccacagccaccatcaccaaaactgggcccagcctaaatgcgtcaatagcanctgctgcnn

SEQ ID NO: 286597 - DNA, 373 bp, Homo sapiens
caggtggctcataaaggatatggtgggccccatgtcccagtctagggccgaatctttacttgttttttaaatgtctttccggcagggtgcggtggctcacacctgtaatcccagcactttgggaggccgaggcgggcggatcacgaggtcaggagatcgagaccatcctggctaacacggtgaaatcccggctctactaaaaatacaaaaagttagctgggcgtggtggcgggagcctgtagtcccagctactcgggaggctgaggcaggagaatggcgtgaacccgggaggcggagcttgcagtgagccgagatcgcgccactgcactctagcctgggcgacagagcgagactccgtctctaaaaaaaaaaa

SEQ ID NO: 286598 - DNA, 620 bp, Homo sapiens
gagagctgtcgtgggggctgccctccacccatcctcacgctccaccccaggcgggagcgctccaaggtgccctacatcgtccggcagtgtgtggaggaggtggagaagaggggtatcgaggaggttggcatctacaggatatcgggcgtggccacggacatccaggcgctcaaggccgtcttcgatgccagtgagtctgggaggcccagccggggcaggtgtggctgtgtctgagcaggctggtgggatggacaggagagctcgggggaaccaggagcctccctggagaggaggcttgctctgcttcagagtccccgtggcaagtgctttctcttgtaatcccctcccctccaatctcttgtcccttgctgcaggtaagcaactgcagaaactcacaagggccgactcacttgcccaggatgacccaacttgtaggttttggttctggacttaaaactcagatctgactccagtgtctttcttgctagttcctgggtgcctggtgagccgcagggaaagagctttgagcctgcacctgctgtctccagggccccaggtcccctctggggcagtgctgcctctgcgtgaagcccaccatggtgaggcctgacctttctggt

SEQ ID NO: 286599 - DNA, 5247 bp, Homo sapiens
ctcgcccctccgcgctcgcaacttcggcctcccccggctcccgcccgccctccctcctttgttgcgcgatgagggtcgggtttcggatctgaccgagccgccgccgcgggatggagccgctcagccaccggggcctgccgcgcctgtcctggatcgacaccctctacagcaacttcagctacgggacggacgagtacgacggagaggggaatgaggagcagaaggggcccccggagggctcagagaccatgccgtacatcgatgagtcgcccaccatgtccccgcagctcagcgcccgcagccagggcgggggggatggcgtctccccgactccacctgagggactggctcctggggtggaagcagggaaaggcctggagatgaggaagctggttctctcggggttcttggccagcgaagagatctacattaaccagctggaagccctgttgctgcccatgaaacccctgaaggccaccgccaccacctcccagcccgtgctcaccatccagcagatcgagaccatcttctacaagatccaggacatctatgagatccacaaggagttctatgacaacctgtgccccaaggtgcaacagtgggacagccaggtcaccatgggccacctcttccagaagctggccagccagctcggtgtgtacaaagcgtttgtcgataactataaagtcgctctggagacagctgagaagtgcagccagtccaacaaccagttccagaagatctcagaggaactcaaagtgaaaggtcccaaggactccaaggacagccacacgtctgtcaccatggaagctctgctctacaagcccattgaccgggtcactcggagcaccctagtcctacacgacctgctgaagcacacacctgtggaccaccccgactacccgctgctgcaggatgccctccgcatctcccagaacttcctgtccagcatcaacgaggacatcgacccccgccggactgcagtgacaacgcccaagggggagacgcgacagctggtgaaggacggcttcctggtggaagtgtcagagagctcccggaagctgcggcacgtcttcctctttacagatgtcctactgtgtgccaagctgaagaagacctctgcagggaagcaccagcagtatgactgtaagtggtacatccccctggccgacctggtgtttccatcccccgaggaatctgaggccagcccccaggtgcaccccttcccagaccatgagctggaggacatgaagatgaagatctctgccctcaagagtgaaatccagaaggagaaagccaacaaaggccagagccgggccatcgagcgcctgaagaagaagatgtttgagaatgagttcctgctgctgctcaactcccccacaatcccgttcaggatccacaatcggaatggaaagagttacctgttcctactgtcctcggactacgagaggtcagagtggagagaagcaattcagaaactacagaagaaggatctccaggcctttgtcctgagctcagtggagctccaggtgctcacaggatcctgtttcaagcttaggactgtacacaacattcctgtcaccagcaataaagacgacgatgagtctccaggactctatggcttccttcatgtcatcgtccactctgccaagggatttaagcaatcagccaacctgtactgtaccctggaggtggattccttcggctattttgtcagcaaagccaaaaccagggtgttccgggacacagcggagcccaagtgggatgaggagtttgagatcgagctggagggctcccagtccctgaggatcctgtgctatgagaagtgctatgacaagaccaaggtcaacaaggacaacaatgagatcgtggacaagatcatgggcaaaggacagatccagctggacccacaaaccgtggagaccaagaactggcacacggacgtgattgagatgaacgggatcaaagtggaattttccatgaaattcaccagccgagatatgagcctgaagaggaccccgtccaaaaagcagaccggcgtcttcggtgtgaagatcagcgtggtgacgaagcgggagcgctccaaggtgccctacatcgtccggcagtgtgtggaggaggtggagaagaggggtatcgaggaggttggcatctacaggatatcgggcgtggccacggacatccaggcgctcaaggccgtcttcgatgccaataacaaggacatcctgctgatgctgagtgacatggacatcaacgccatcgccgggacgctcaagctgtacttccgggaactgcccgagccgctcctcacggaccgactctacccagccttcatggagggcatcgccctgtcagaccctgctgccaaggaaaactgcatgatgcacctgctccgctccctgcccgaccccaacctcatcaccttcctcttcctgctggaacacttgaaaagggttgccgagaaggagcccatcaacaaaatgtcacttcacaacctggctaccgtgtttggacccacgttactgagaccctcagaagtggagagcaaagcacacctcacctcggctgcggacatctggtcccatgacgtcatggcgcaggtccaggtcctcctctactacctgcagcacccccccatttccttcgcagaactcaagcggaacacactgtacttctccaccgacgtgtagcccgaggcagggtggctgcgggcgggtggtggaaccagcccctccagcctggggtccaactcagacttgaaagactgcaatagaaaactcccaaacccagcactccagactcgagggaagccagcttccaagaactggaatgcgtacgtcttttgtgccaccttgtacaaagccggctgcccagccccagcctcaccaccgcatcccacctcctgccctccatacctctagttgtgtctgatgctccgtgctgttcgggaattgttttatgtacacttgtcaggcagaaaaggtagtgaccggcccggcgtgggcacacagacagcccgctttgttctttcatttcctccagcactttctttccgcctgagtccagcccaaggccttttattttgcgctgtgtaactgctgccagcttctctcttggccctgctcccagatggcggtctcctggcagcctcccctcagtcttcctccacccgctcttccttcccagcctgcctgcatgcatgtgcacccttggtcttcgctccatcgccttgaaagctctgaagaggccctgggttgccgcggcagcagtggtctgtttgatgctgccgtttgccgctgccggcccctcctcagactccgcctttgggagcacacctgctttgccttgctgcctgtgcaaatgttggacaagcagacacactcacactcgtccccagcttagcacagagctggagcgcccatttctggaattttccgtttgggaatctccacttctggggtttacctgttcggcctcctgcctatcagtgaggcatctctgactgtttcttctactgcttttcagttcccttccctgctgttctatttcctttgagtgtaaagactcacaggtgacctgctatcgagatagccagagggtcaggagagaatgggggaggaggcggtcaggctgctgaggaaacaccacaggctgaacgggggaggaatgcacatgccacgctgggtgtcccgggtcgcggggaggcagctcagctcttaggagcaagttgtgggggcttttcaagaggggccaggcttcctggagggtgactgatgtggccgaagcaggtgtccaggcaggtaggctgcagccaggagctccctggcaccgcaggacctcgtggtactcttgccttagattttacacacactccacagccaagcactgccacggtcctccaggacctgggaagcaaaggcacaggcccacggtggccagccattgtggtgccgccccagcttctggatacagccttttgggtaaacactgggaactccagaagttgtggggagagtggggaatcagacagccgcctctaggggctgggttctgctggggcctccttgttggtgctgtaggcacccgccagggagcagggacccgacttgcagacgcattgcccggtactaggaaggagtgaggtgtgttcccaccgtacacttcccacacgagctgcggctgccagcctcgggccatcagcctaggagagcagatgcagctccaggggctcgacttatagccagttacagctccccggctcttctgtgtggcagagcgtcgtttccgggccctcagggctggggagctcagttcccattgcttgtgctcagggctgagtcttaaagaagggtttgccggccctaacgctgcagcgcgtgcgcggtgagaggccctttttgagcctgtttactcctgtggccttgggcagaacagtaaatactctgtgcacggaggaaagacatgcccaagaggaaggaagtactgaccatcggctgcctgtgagcagcttagcaaggagcccttgctccctgggaaaggcggtgaacttgagtctaaagatgcagtgcctggcccttcctaaggtccctgcctggcatccgagtgtcggtgtgtggcacagaaggctcctgcttgcttccaaagtgatggacaggaaggggcagagtgagtcacggcccagactgggcaccttcacgtctcagcctcagggagccccacagccccaagctcgctgaggcaacgtgagaacaggctatgggaaggctgcaaaggctgagaaatgcaaaggctcatatttataaatcccacccccagagtggggagggtcaggtgccagacctggactaaactgcaccaaggaaacacccagcagggtctcctgtgagccggggaccatgcagcccgaaacctccagtcactgcgcccggcaggagtcaggagccagggactgtgcagcctggaacctccagtcactgtgcccagcagggtgggctgtgcccagcaggagtcaggctaagaaacgccaggtctgcctgttcttgctgggcaatggctgatggctgccagtttctgctgatacacaggtaggatgggacccttcatgaatatctgactttaataagttggtaaggatatatttttttgtctatgttctgtttcaacttatgtagattattataaattgatgtaaaccacgtgagaggaaaatgttaataaaaaatgcaaagccccatcatttgcacaaaa

SEQ ID NO: 286600 - DNA, 576 bp, Homo sapiens
gcggccgcagcgggggacccgcgacctggagcagcgggaggccgaggccaagggccgcccgggctcgcccctcgccgcggaggagacccccgggcgcgagcacctgcccccgtggcggcgccgcaggttcctgcgggtgcccgagcgggactcgcccggccacagctcgccggagagagacagcgacggcagccggcacagctccgaccgcgaggacgacttctccgcagacttcagctacgggacggacgagtacgacggagaggggaatgaggagcagaaggggcccccggagggctcagagaccatgccgtacatcgatgagtcgcccaccatgtccccgcagctcagcgcccgcagccagggcgggggggatggcgtctccccgactccacctgagggactggctcctggggtggaagcagggaaaggcctggagatgaggaagctggttctctcggggttcttggccagcgaagagatctacattaaccagctggaagccctgttgctgcccatgaaacccctgaagcacgcagcactccagccgtgtacatcagcaatgaacattctaca

SEQ ID NO: 286601 - DNA, 5306 bp, Homo sapiens
gcggccgcagcgggggacccgcgacctggagcagcgggaggccgaggccaagggccgcccgggctcgcccctcgccgcggaggagacccccgggcgcgagcacctgcccccgtggcggcgccgcaggttcctgcgggtgcccgagcgggactcgcccggccacagctcgccggagagagacagcgacggcagccggcacagctccgaccgcgaggacgacttctccgcagacttcagctacgggacggacgagtacgacggagaggggaatgaggagcagaaggggcccccggagggctcagagaccatgccgtacatcgatgagtcgcccaccatgtccccgcagctcagcgcccgcagccagggcgggggggatggcgtctccccgactccacctgagggactggctcctggggtggaagcagggaaaggcctggagatgaggaagctggttctctcggggttcttggccagcgaagagatctacattaaccagctggaagccctgttgctgcccatgaaacccctgaaggccaccgccaccacctcccagcccgtgctcaccatccagcagatcgagaccatcttctacaagatccaggacatctatgagatccacaaggagttctatgacaacctgtgccccaaggtgcaacagtgggacagccaggtcaccatgggccacctcttccagaagctggccagccagctcggtgtgtacaaagcgtttgtcgataactataaagtcgctctggagacagctgagaagtgcagccagtccaacaaccagttccagaagatctcagaggaactcaaagtgaaaggtcccaaggactccaaggacagccacacgtctgtcaccatggaagctctgctctacaagcccattgaccgggtcactcggagcaccctagtcctacacgacctgctgaagcacacacctgtggaccaccccgactacccgctgctgcaggatgccctccgcatctcccagaacttcctgtccagcatcaacgaggacatcgacccccgccggactgcagtgacaacgcccaagggggagacgcgacagctggtgaaggacggcttcctggtggaagtgtcagagagctcccggaagctgcggcacgtcttcctctttacagatgtcctactgtgtgccaagctgaagaagacctctgcagggaagcaccagcagtatgactgtaagtggtacatccccctggccgacctggtgtttccatcccccgaggaatctgaggccagcccccaggtgcaccccttcccagaccatgagctggaggacatgaagatgaagatctctgccctcaagagtgaaatccagaaggagaaagccaacaaaggccagagccgggccatcgagcgcctgaagaagaagatgtttgagaatgagttcctgctgctgctcaactcccccacaatcccgttcaggatccacaatcggaatggaaagagttacctgttcctactgtcctcggactacgagaggtcagagtggagagaagcaattcagaaactacagaagaaggatctccaggcctttgtcctgagctcagtggagctccaggtgctcacaggatcctgtttcaagcttaggactgtacacaacattcctgtcaccagcaataaagacgacgatgagtctccaggactctatggcttccttcatgtcatcgtccactctgccaagggatttaagcaatcagccaacctgtactgtaccctggaggtggattccttcggctattttgtcagcaaagccaaaaccagggtgttccgggacacagcggagcccaagtgggatgaggagtttgagatcgagctggagggctcccagtccctgaggatcctgtgctatgagaagtgctatgacaagaccaaggtcaacaaggacaacaatgagatcgtggacaagatcatgggcaaaggacagatccagctggacccacaaaccgtggagaccaagaactggcacacggacgtgattgagatgaacgggatcaaagtggaattttccatgaaattcaccagccgagatatgagcctgaagaggaccccgtccaaaaagcagaccggcgtcttcggtgtgaagatcagcgtggtgacgaagcgggagcgctccaaggtgccctacatcgtccggcagtgtgtggaggaggtggagaagaggggtatcgaggaggttggcatctacaggatatcgggcgtggccacggacatccaggcgctcaaggccgtcttcgatgccaataacaaggacatcctgctgatgctgagtgacatggacatcaacgccatcgccgggacgctcaagctgtacttccgggaactgcccgagccgctcctcacggaccgactctacccagccttcatggagggcatcgccctgtcagaccctgctgccaaggaaaactgcatgatgcacctgctccgctccctgcccgaccccaacctcatcaccttcctcttcctgctggaacacttgaaaagggttgccgagaaggagcccatcaacaaaatgtcacttcacaacctggctaccgtgtttggacccacgttactgagaccctcagaagtggagagcaaagcacacctcacctcggctgcggacatctggtcccatgacgtcatggcgcaggtccaggtcctcctctactacctgcagcacccccccatttccttcgcagaactcaagcggaacacactgtacttctccaccgacgtgtagcccgaggcagggtggctgcgggcgggtggtggaaccagcccctccagcctggggtccaactcagacttgaaagactgcaatagaaaactcccaaacccagcactccagactcgagggaagccagcttccaagaactggaatgcgtacgtcttttgtgccaccttgtacaaagccggctgcccagccccagcctcaccaccgcatcccacctcctgccctccatacctctagttgtgtctgatgctccgtgctgttcgggaattgttttatgtacacttgtcaggcagaaaaggtagtgaccggcccggcgtgggcacacagacagcccgctttgttctttcatttcctccagcactttctttccgcctgagtccagcccaaggccttttattttgcgctgtgtaactgctgccagcttctctcttggccctgctcccagatggcggtctcctggcagcctcccctcagtcttcctccacccgctcttccttcccagcctgcctgcatgcatgtgcacccttggtcttcgctccatcgccttgaaagctctgaagaggccctgggttgccgcggcagcagtggtctgtttgatgctgccgtttgccgctgccggcccctcctcagactccgcctttgggagcacacctgctttgccttgctgcctgtgcaaatgttggacaagcagacacactcacactcgtccccagcttagcacagagctggagcgcccatttctggaattttccgtttgggaatctccacttctggggtttacctgttcggcctcctgcctatcagtgaggcatctctgactgtttcttctactgcttttcagttcccttccctgctgttctatttcctttgagtgtaaagactcacaggtgacctgctatcgagatagccagagggtcaggagagaatgggggaggaggcggtcaggctgctgaggaaacaccacaggctgaacgggggaggaatgcacatgccacgctgggtgtcccgggtcgcggggaggcagctcagctcttaggagcaagttgtgggggcttttcaagaggggccaggcttcctggagggtgactgatgtggccgaagcaggtgtccaggcaggtaggctgcagccaggagctccctggcaccgcaggacctcgtggtactcttgccttagattttacacacactccacagccaagcactgccacggtcctccaggacctgggaagcaaaggcacaggcccacggtggccagccattgtggtgccgccccagcttctggatacagccttttgggtaaacactgggaactccagaagttgtggggagagtggggaatcagacagccgcctctaggggctgggttctgctggggcctccttgttggtgctgtaggcacccgccagggagcagggacccgacttgcagacgcattgcccggtactaggaaggagtgaggtgtgttcccaccgtacacttcccacacgagctgcggctgccagcctcgggccatcagcctaggagagcagatgcagctccaggggctcgacttatagccagttacagctccccggctcttctgtgtggcagagcgtcgtttccgggccctcagggctggggagctcagttcccattgcttgtgctcagggctgagtcttaaagaagggtttgccggccctaacgctgcagcgcgtgcgcggtgagaggccctttttgagcctgtttactcctgtggccttgggcagaacagtaaatactctgtgcacggaggaaagacatgcccaagaggaaggaagtactgaccatcggctgcctgtgagcagcttagcaaggagcccttgctccctgggaaaggcggtgaacttgagtctaaagatgcagtgcctggcccttcctaaggtccctgcctggcatccgagtgtcggtgtgtggcacagaaggctcctgcttgcttccaaagtgatggacaggaaggggcagagtgagtcacggcccagactgggcaccttcacgtctcagcctcagggagccccacagccccaagctcgctgaggcaacgtgagaacaggctatgggaaggctgcaaaggctgagaaatgcaaaggctcatatttataaatcccacccccagagtggggagggtcaggtgccagacctggactaaactgcaccaaggaaacacccagcagggtctcctgtgagccggggaccatgcagcccgaaacctccagtcactgcgcccggcaggagtcaggagccagggactgtgcagcctggaacctccagtcactgtgcccagcagggtgggctgtgcccagcaggagtcaggctaagaaacgccaggtctgcctgttcttgctgggcaatggctgatggctgccagtttctgctgatacacaggtaggatgggacccttcatgaatatctgactttaataagttggtaaggatatatttttttgtctatgttctgtttcaacttatgtagattattataaattgatgtaaaccacgtgagaggaaaatgttaataaaaaatgcaaagccccatcatttgcacaaaa

SEQ ID NO: 286602 - DNA, 5135 bp, Homo sapiens
cgggctccggctgccatggaggaggaagaggaggcgataggcttgctggacaaggttctggaggacgaagatgtgtttctcctggaggagtgcgagctgggaaccccgaccagccccggctcagggtcccccttcctggtggctgtgaagggtgcggtggctcacacctgtaatcccagcactttgggaggccgaggcgggcggatcacgaggtcaggagatcgagaccatcctggctaacacggtggaagcagggaaaggcctggagatgaggaagctggttctctcggggttcttggccagcgaagagatctacattaaccagctggaagccctgttgctgcccatgaaacccctgaaggccaccgccaccacctcccagcccgtgctcaccatccagcagatcgagaccatcttctacaagatccaggacatctatgagatccacaaggagttctatgacaacctgtgccccaaggtgcaacagtgggacagccaggtcaccatgggccacctcttccagaagctggccagccagctcggtgtgtacaaagcgtttgtcgataactataaagtcgctctggagacagctgagaagtgcagccagtccaacaaccagttccagaagatctcagaggaactcaaagtgaaaggtcccaaggactccaaggacagccacacgtctgtcaccatggaagctctgctctacaagcccattgaccgggtcactcggagcaccctagtcctacacgacctgctgaagcacacacctgtggaccaccccgactacccgctgctgcaggatgccctccgcatctcccagaacttcctgtccagcatcaacgaggacatcgacccccgccggactgcagtgacaacgcccaagggggagacgcgacagctggtgaaggacggcttcctggtggaagtgtcagagagctcccggaagctgcggcacgtcttcctctttacagatgtcctactgtgtgccaagctgaagaagacctctgcagggaagcaccagcagtatgactgtaagtggtacatccccctggccgacctggtgtttccatcccccgaggaatctgaggccagcccccaggtgcaccccttcccagaccatgagctggaggacatgaagatgaagatctctgccctcaagagtgaaatccagaaggagaaagccaacaaaggccagagccgggccatcgagcgcctgaagaagaagatgtttgagaatgagttcctgctgctgctcaactcccccacaatcccgttcaggatccacaatcggaatggaaagagttacctgttcctactgtcctcggactacgagaggtcagagtggagagaagcaattcagaaactacagaagaaggatctccaggcctttgtcctgagctcagtggagctccaggtgctcacaggatcctgtttcaagcttaggactgtacacaacattcctgtcaccagcaataaagacgacgatgagtctccaggactctatggcttccttcatgtcatcgtccactctgccaagggatttaagcaatcagccaacctgtactgtaccctggaggtggattccttcggctattttgtcagcaaagccaaaaccagggtgttccgggacacagcggagcccaagtgggatgaggagtttgagatcgagctggagggctcccagtccctgaggatcctgtgctatgagaagtgctatgacaagaccaaggtcaacaaggacaacaatgagatcgtggacaagatcatgggcaaaggacagatccagctggacccacaaaccgtggagaccaagaactggcacacggacgtgattgagatgaacgggatcaaagtggaattttccatgaaattcaccagccgagatatgagcctgaagaggaccccgtccaaaaagcagaccggcgtcttcggtgtgaagatcagcgtggtgacgaagcgggagcgctccaaggtgccctacatcgtccggcagtgtgtggaggaggtggagaagaggggtatcgaggaggttggcatctacaggatatcgggcgtggccacggacatccaggcgctcaaggccgtcttcgatgccaataacaaggacatcctgctgatgctgagtgacatggacatcaacgccatcgccgggacgctcaagctgtacttccgggaactgcccgagccgctcctcacggaccgactctacccagccttcatggagggcatcgccctgtcagaccctgctgccaaggaaaactgcatgatgcacctgctccgctccctgcccgaccccaacctcatcaccttcctcttcctgctggaacacttgaaaagggttgccgagaaggagcccatcaacaaaatgtcacttcacaacctggctaccgtgtttggacccacgttactgagaccctcagaagtggagagcaaagcacacctcacctcggctgcggacatctggtcccatgacgtcatggcgcaggtccaggtcctcctctactacctgcagcacccccccatttccttcgcagaactcaagcggaacacactgtacttctccaccgacgtgtagcccgaggcagggtggctgcgggcgggtggtggaaccagcccctccagcctggggtccaactcagacttgaaagactgcaatagaaaactcccaaacccagcactccagactcgagggaagccagcttccaagaactggaatgcgtacgtcttttgtgccaccttgtacaaagccggctgcccagccccagcctcaccaccgcatcccacctcctgccctccatacctctagttgtgtctgatgctccgtgctgttcgggaattgttttatgtacacttgtcaggcagaaaaggtagtgaccggcccggcgtgggcacacagacagcccgctttgttctttcatttcctccagcactttctttccgcctgagtccagcccaaggccttttattttgcgctgtgtaactgctgccagcttctctcttggccctgctcccagatggcggtctcctggcagcctcccctcagtcttcctccacccgctcttccttcccagcctgcctgcatgcatgtgcacccttggtcttcgctccatcgccttgaaagctctgaagaggccctgggttgccgcggcagcagtggtctgtttgatgctgccgtttgccgctgccggcccctcctcagactccgcctttgggagcacacctgctttgccttgctgcctgtgcaaatgttggacaagcagacacactcacactcgtccccagcttagcacagagctggagcgcccatttctggaattttccgtttgggaatctccacttctggggtttacctgttcggcctcctgcctatcagtgaggcatctctgactgtttcttctactgcttttcagttcccttccctgctgttctatttcctttgagtgtaaagactcacaggtgacctgctatcgagatagccagagggtcaggagagaatgggggaggaggcggtcaggctgctgaggaaacaccacaggctgaacgggggaggaatgcacatgccacgctgggtgtcccgggtcgcggggaggcagctcagctcttaggagcaagttgtgggggcttttcaagaggggccaggcttcctggagggtgactgatgtggccgaagcaggtgtccaggcaggtaggctgcagccaggagctccctggcaccgcaggacctcgtggtactcttgccttagattttacacacactccacagccaagcactgccacggtcctccaggacctgggaagcaaaggcacaggcccacggtggccagccattgtggtgccgccccagcttctggatacagccttttgggtaaacactgggaactccagaagttgtggggagagtggggaatcagacagccgcctctaggggctgggttctgctggggcctccttgttggtgctgtaggcacccgccagggagcagggacccgacttgcagacgcattgcccggtactaggaaggagtgaggtgtgttcccaccgtacacttcccacacgagctgcggctgccagcctcgggccatcagcctaggagagcagatgcagctccaggggctcgacttatagccagttacagctccccggctcttctgtgtggcagagcgtcgtttccgggccctcagggctggggagctcagttcccattgcttgtgctcagggctgagtcttaaagaagggtttgccggccctaacgctgcagcgcgtgcgcggtgagaggccctttttgagcctgtttactcctgtggccttgggcagaacagtaaatactctgtgcacggaggaaagacatgcccaagaggaaggaagtactgaccatcggctgcctgtgagcagcttagcaaggagcccttgctccctgggaaaggcggtgaacttgagtctaaagatgcagtgcctggcccttcctaaggtccctgcctggcatccgagtgtcggtgtgtggcacagaaggctcctgcttgcttccaaagtgatggacaggaaggggcagagtgagtcacggcccagactgggcaccttcacgtctcagcctcagggagccccacagccccaagctcgctgaggcaacgtgagaacaggctatgggaaggctgcaaaggctgagaaatgcaaaggctcatatttataaatcccacccccagagtggggagggtcaggtgccagacctggactaaactgcaccaaggaaacacccagcagggtctcctgtgagccggggaccatgcagcccgaaacctccagtcactgcgcccggcaggagtcaggagccagggactgtgcagcctggaacctccagtcactgtgcccagcagggtgggctgtgcccagcaggagtcaggctaagaaacgccaggtctgcctgttcttgctgggcaatggctgatggctgccagtttctgctgatacacaggtaggatgggacccttcatgaatatctgactttaataagttggtaaggatatatttttttgtctatgttctgtttcaacttatgtagattattataaattgatgtaaaccacgtgagaggaaaatgttaataaaaaatgcaaagccccatcatttgcacaaaa

SEQ ID NO: 286603 - DNA, 4627 bp, Homo sapiens
ctggaagagcactccggagcggctgcccgatgctggagtccgtgcggcagcatcagcaaggtggctgagtggccgggctgctggtgggcgccggggagcctggagcgatggctgcacgctcccgccgcggggacagaggctgccatggagattctcctcattattcgcttctgctgtaactgcacctatgctctgctctacaagcccattgaccgggtcactcggagcaccctagtcctacacgacctgctgaagcacacacctgtggaccaccccgactacccgctgctgcaggatgccctccgcatctcccagaacttcctgtccagcatcaacgaggacatcgacccccgccggactgcagtgacaacgcccaagggggagacgcgacagctggtgaaggacggcttcctggtggaagtgtcagagagctcccggaagctgcggcacgtcttcctctttacagatgtcctactgtgtgccaagctgaagaagacctctgcagggaagcaccagcagtatgactgtaagtggtacatccccctggccgacctggtgtttccatcccccgaggaatctgaggccagcccccaggtgcaccccttcccagaccatgagctggaggacatgaagatgaagatctctgccctcaagagtgaaatccagaaggagaaagccaacaaaggccagagccgggccatcgagcgcctgaagaagaagatgtttgagaatgagttcctgctgctgctcaactcccccacaatcccgttcaggatccacaatcggaatggaaagagttacctgttcctactgtcctcggactacgagaggtcagagtggagagaagcaattcagaaactacagaagaaggatctccaggcctttgtcctgagctcagtggagctccaggtgctcacaggatcctgtttcaagcttaggactgtacacaacattcctgtcaccagcaataaagacgacgatgagtctccaggactctatggcttccttcatgtcatcgtccactctgccaagggatttaagcaatcagccaacctgtactgtaccctggaggtggattccttcggctattttgtcagcaaagccaaaaccagggtgttccgggacacagcggagcccaagtgggatgaggagtttgagatcgagctggagggctcccagtccctgaggatcctgtgctatgagaagtgctatgacaagaccaaggtcaacaaggacaacaatgagatcgtggacaagatcatgggcaaaggacagatccagctggacccacaaaccgtggagaccaagaactggcacacggacgtgattgagatgaacgggatcaaagtggaattttccatgaaattcaccagccgagatatgagcctgaagaggaccccgtccaaaaagcagaccggcgtcttcggtgtgaagatcagcgtggtgacgaagcgggagcgctccaaggtgccctacatcgtccggcagtgtgtggaggaggtggagaagaggggtatcgaggaggttggcatctacaggatatcgggcgtggccacggacatccaggcgctcaaggccgtcttcgatgccaataacaaggacatcctgctgatgctgagtgacatggacatcaacgccatcgccgggacgctcaagctgtacttccgggaactgcccgagccgctcctcacggaccgactctacccagccttcatggagggcatcgccctgtcagaccctgctgccaaggaaaactgcatgatgcacctgctccgctccctgcccgaccccaacctcatcaccttcctcttcctgctggaacacttgaaaagggttgccgagaaggagcccatcaacaaaatgtcacttcacaacctggctaccgtgtttggacccacgttactgagaccctcagaagtggagagcaaagcacacctcacctcggctgcggacatctggtcccatgacgtcatggcgcaggtccaggtcctcctctactacctgcagcacccccccatttccttcgcagaactcaagcggaacacactgtacttctccaccgacgtgtagcccgaggcagggtggctgcgggcgggtggtggaaccagcccctccagcctggggtccaactcagacttgaaagactgcaatagaaaactcccaaacccagcactccagactcgagggaagccagcttccaagaactggaatgcgtacgtcttttgtgccaccttgtacaaagccggctgcccagccccagcctcaccaccgcatcccacctcctgccctccatacctctagttgtgtctgatgctccgtgctgttcgggaattgttttatgtacacttgtcaggcagaaaaggtagtgaccggcccggcgtgggcacacagacagcccgctttgttctttcatttcctccagcactttctttccgcctgagtccagcccaaggccttttattttgcgctgtgtaactgctgccagcttctctcttggccctgctcccagatggcggtctcctggcagcctcccctcagtcttcctccacccgctcttccttcccagcctgcctgcatgcatgtgcacccttggtcttcgctccatcgccttgaaagctctgaagaggccctgggttgccgcggcagcagtggtctgtttgatgctgccgtttgccgctgccggcccctcctcagactccgcctttgggagcacacctgctttgccttgctgcctgtgcaaatgttggacaagcagacacactcacactcgtccccagcttagcacagagctggagcgcccatttctggaattttccgtttgggaatctccacttctggggtttacctgttcggcctcctgcctatcagtgaggcatctctgactgtttcttctactgcttttcagttcccttccctgctgttctatttcctttgagtgtaaagactcacaggtgacctgctatcgagatagccagagggtcaggagagaatgggggaggaggcggtcaggctgctgaggaaacaccacaggctgaacgggggaggaatgcacatgccacgctgggtgtcccgggtcgcggggaggcagctcagctcttaggagcaagttgtgggggcttttcaagaggggccaggcttcctggagggtgactgatgtggccgaagcaggtgtccaggcaggtaggctgcagccaggagctccctggcaccgcaggacctcgtggtactcttgccttagattttacacacactccacagccaagcactgccacggtcctccaggacctgggaagcaaaggcacaggcccacggtggccagccattgtggtgccgccccagcttctggatacagccttttgggtaaacactgggaactccagaagttgtggggagagtggggaatcagacagccgcctctaggggctgggttctgctggggcctccttgttggtgctgtaggcacccgccagggagcagggacccgacttgcagacgcattgcccggtactaggaaggagtgaggtgtgttcccaccgtacacttcccacacgagctgcggctgccagcctcgggccatcagcctaggagagcagatgcagctccaggggctcgacttatagccagttacagctccccggctcttctgtgtggcagagcgtcgtttccgggccctcagggctggggagctcagttcccattgcttgtgctcagggctgagtcttaaagaagggtttgccggccctaacgctgcagcgcgtgcgcggtgagaggccctttttgagcctgtttactcctgtggccttgggcagaacagtaaatactctgtgcacggaggaaagacatgcccaagaggaaggaagtactgaccatcggctgcctgtgagcagcttagcaaggagcccttgctccctgggaaaggcggtgaacttgagtctaaagatgcagtgcctggcccttcctaaggtccctgcctggcatccgagtgtcggtgtgtggcacagaaggctcctgcttgcttccaaagtgatggacaggaaggggcagagtgagtcacggcccagactgggcaccttcacgtctcagcctcagggagccccacagccccaagctcgctgaggcaacgtgagaacaggctatgggaaggctgcaaaggctgagaaatgcaaaggctcatatttataaatcccacccccagagtggggagggtcaggtgccagacctggactaaactgcaccaaggaaacacccagcagggtctcctgtgagccggggaccatgcagcccgaaacctccagtcactgcgcccggcaggagtcaggagccagggactgtgcagcctggaacctccagtcactgtgcccagcagggtgggctgtgcccagcaggagtcaggctaagaaacgccaggtctgcctgttcttgctgggcaatggctgatggctgccagtttctgctgatacacaggtaggatgggacccttcatgaatatctgactttaataagttggtaaggatatatttttttgtctatgttctgtttcaacttatgtagattattataaattgatgtaaaccacgtgagaggaaaatgttaataaaaaatgcaaagccccatcatttgcacaaaa

SEQ ID NO: 286604 - DNA, 3212 bp, Homo sapiens
cctggagtggaggacggggtggggcctgggaactggccggcgttggtgcctctgtgcagcctagaagctgaggctttgtcggaacatgcttttacgtgtgaaaagtgtgcaatgccttccagagaggggcttagcgatggagaggttccagtcggaaggaagctgcaggccacatgataacaaggacatcctgctgatgctgagtgacatggacatcaacgccatcgccgggacgctcaagctgtacttccgggaactgcccgagccgctcctcacggaccgactctacccagccttcatggagggcatcgccctgtcagaccctgctgccaaggaaaactgcatgatgcacctgctccgctccctgcccgaccccaacctcatcaccttcctcttcctgctggaacacttgaaaagggttgccgagaaggagcccatcaacaaaatgtcacttcacaacctggctaccgtgtttggacccacgttactgagaccctcagaagtggagagcaaagcacacctcacctcggctgcggacatctggtcccatgacgtcatggcgcaggtccaggtcctcctctactacctgcagcacccccccatttccttcgcagaactcaagcggaacacactgtacttctccaccgacgtgtagcccgaggcagggtggctgcgggcgggtggtggaaccagcccctccagcctggggtccaactcagacttgaaagactgcaatagaaaactcccaaacccagcactccagactcgagggaagccagcttccaagaactggaatgcgtacgtcttttgtgccaccttgtacaaagccggctgcccagccccagcctcaccaccgcatcccacctcctgccctccatacctctagttgtgtctgatgctccgtgctgttcgggaattgttttatgtacacttgtcaggcagaaaaggtagtgaccggcccggcgtgggcacacagacagcccgctttgttctttcatttcctccagcactttctttccgcctgagtccagcccaaggccttttattttgcgctgtgtaactgctgccagcttctctcttggccctgctcccagatggcggtctcctggcagcctcccctcagtcttcctccacccgctcttccttcccagcctgcctgcatgcatgtgcacccttggtcttcgctccatcgccttgaaagctctgaagaggccctgggttgccgcggcagcagtggtctgtttgatgctgccgtttgccgctgccggcccctcctcagactccgcctttgggagcacacctgctttgccttgctgcctgtgcaaatgttggacaagcagacacactcacactcgtccccagcttagcacagagctggagcgcccatttctggaattttccgtttgggaatctccacttctggggtttacctgttcggcctcctgcctatcagtgaggcatctctgactgtttcttctactgcttttcagttcccttccctgctgttctatttcctttgagtgtaaagactcacaggtgacctgctatcgagatagccagagggtcaggagagaatgggggaggaggcggtcaggctgctgaggaaacaccacaggctgaacgggggaggaatgcacatgccacgctgggtgtcccgggtcgcggggaggcagctcagctcttaggagcaagttgtgggggcttttcaagaggggccaggcttcctggagggtgactgatgtggccgaagcaggtgtccaggcaggtaggctgcagccaggagctccctggcaccgcaggacctcgtggtactcttgccttagattttacacacactccacagccaagcactgccacggtcctccaggacctgggaagcaaaggcacaggcccacggtggccagccattgtggtgccgccccagcttctggatacagccttttgggtaaacactgggaactccagaagttgtggggagagtggggaatcagacagccgcctctaggggctgggttctgctggggcctccttgttggtgctgtaggcacccgccagggagcagggacccgacttgcagacgcattgcccggtactaggaaggagtgaggtgtgttcccaccgtacacttcccacacgagctgcggctgccagcctcgggccatcagcctaggagagcagatgcagctccaggggctcgacttatagccagttacagctccccggctcttctgtgtggcagagcgtcgtttccgggccctcagggctggggagctcagttcccattgcttgtgctcagggctgagtcttaaagaagggtttgccggccctaacgctgcagcgcgtgcgcggtgagaggccctttttgagcctgtttactcctgtggccttgggcagaacagtaaatactctgtgcacggaggaaagacatgcccaagaggaaggaagtactgaccatcggctgcctgtgagcagcttagcaaggagcccttgctccctgggaaaggcggtgaacttgagtctaaagatgcagtgcctggcccttcctaaggtccctgcctggcatccgagtgtcggtgtgtggcacagaaggctcctgcttgcttccaaagtgatggacaggaaggggcagagtgagtcacggcccagactgggcaccttcacgtctcagcctcagggagccccacagccccaagctcgctgaggcaacgtgagaacaggctatgggaaggctgcaaaggctgagaaatgcaaaggctcatatttataaatcccacccccagagtggggagggtcaggtgccagacctggactaaactgcaccaaggaaacacccagcagggtctcctgtgagccggggaccatgcagcccgaaacctccagtcactgcgcccggcaggagtcaggagccagggactgtgcagcctggaacctccagtcactgtgcccagcagggtgggctgtgcccagcaggagtcaggctaagaaacgccaggtctgcctgttcttgctgggcaatggctgatggctgccagtttctgctgatacacaggtaggatgggacccttcatgaatatctgactttaataagttggtaaggatatatttttttgtctatgttctgtttcaacttatgtagattattataaattgatgtaaaccacgtgagaggaaaatgttaataaaaaatgcaaagccccatcatttgcacaaaa

SEQ ID NO: 286605 - DNA, 3134 bp, Homo sapiens
tcgctgatgatggtcaaggctgtttccggggagtaaaacatctacaggatatccggcgttctcctgagggcaggcgctcaaggccaacttcgatgccaataacaaggacatcctgctgatgctgagtgacatggacatcaacgccatcgccgggacgctcaagctgtacttccgggaactgcccgagccgctcctcacggaccgactctacccagccttcatggagggcatcgccctgtcagaccctgctgccaaggaaaactgcatgatgcacctgctccgctccctgcccgaccccaacctcatcaccttcctcttcctgctggaacacttgaaaagggttgccgagaaggagcccatcaacaaaatgtcacttcacaacctggctaccgtgtttggacccacgttactgagaccctcagaagtggagagcaaagcacacctcacctcggctgcggacatctggtcccatgacgtcatggcgcaggtccaggtcctcctctactacctgcagcacccccccatttccttcgcagaactcaagcggaacacactgtacttctccaccgacgtgtagcccgaggcagggtggctgcgggcgggtggtggaaccagcccctccagcctggggtccaactcagacttgaaagactgcaatagaaaactcccaaacccagcactccagactcgagggaagccagcttccaagaactggaatgcgtacgtcttttgtgccaccttgtacaaagccggctgcccagccccagcctcaccaccgcatcccacctcctgccctccatacctctagttgtgtctgatgctccgtgctgttcgggaattgttttatgtacacttgtcaggcagaaaaggtagtgaccggcccggcgtgggcacacagacagcccgctttgttctttcatttcctccagcactttctttccgcctgagtccagcccaaggccttttattttgcgctgtgtaactgctgccagcttctctcttggccctgctcccagatggcggtctcctggcagcctcccctcagtcttcctccacccgctcttccttcccagcctgcctgcatgcatgtgcacccttggtcttcgctccatcgccttgaaagctctgaagaggccctgggttgccgcggcagcagtggtctgtttgatgctgccgtttgccgctgccggcccctcctcagactccgcctttgggagcacacctgctttgccttgctgcctgtgcaaatgttggacaagcagacacactcacactcgtccccagcttagcacagagctggagcgcccatttctggaattttccgtttgggaatctccacttctggggtttacctgttcggcctcctgcctatcagtgaggcatctctgactgtttcttctactgcttttcagttcccttccctgctgttctatttcctttgagtgtaaagactcacaggtgacctgctatcgagatagccagagggtcaggagagaatgggggaggaggcggtcaggctgctgaggaaacaccacaggctgaacgggggaggaatgcacatgccacgctgggtgtcccgggtcgcggggaggcagctcagctcttaggagcaagttgtgggggcttttcaagaggggccaggcttcctggagggtgactgatgtggccgaagcaggtgtccaggcaggtaggctgcagccaggagctccctggcaccgcaggacctcgtggtactcttgccttagattttacacacactccacagccaagcactgccacggtcctccaggacctgggaagcaaaggcacaggcccacggtggccagccattgtggtgccgccccagcttctggatacagccttttgggtaaacactgggaactccagaagttgtggggagagtggggaatcagacagccgcctctaggggctgggttctgctggggcctccttgttggtgctgtaggcacccgccagggagcagggacccgacttgcagacgcattgcccggtactaggaaggagtgaggtgtgttcccaccgtacacttcccacacgagctgcggctgccagcctcgggccatcagcctaggagagcagatgcagctccaggggctcgacttatagccagttacagctccccggctcttctgtgtggcagagcgtcgtttccgggccctcagggctggggagctcagttcccattgcttgtgctcagggctgagtcttaaagaagggtttgccggccctaacgctgcagcgcgtgcgcggtgagaggccctttttgagcctgtttactcctgtggccttgggcagaacagtaaatactctgtgcacggaggaaagacatgcccaagaggaaggaagtactgaccatcggctgcctgtgagcagcttagcaaggagcccttgctccctgggaaaggcggtgaacttgagtctaaagatgcagtgcctggcccttcctaaggtccctgcctggcatccgagtgtcggtgtgtggcacagaaggctcctgcttgcttccaaagtgatggacaggaaggggcagagtgagtcacggcccagactgggcaccttcacgtctcagcctcagggagccccacagccccaagctcgctgaggcaacgtgagaacaggctatgggaaggctgcaaaggctgagaaatgcaaaggctcatatttataaatcccacccccagagtggggagggtcaggtgccagacctggactaaactgcaccaaggaaacacccagcagggtctcctgtgagccggggaccatgcagcccgaaacctccagtcactgcgcccggcaggagtcaggagccagggactgtgcagcctggaacctccagtcactgtgcccagcagggtgggctgtgcccagcaggagtcaggctaagaaacgccaggtctgcctgttcttgctgggcaatggctgatggctgccagtttctgctgatacacaggtaggatgggacccttcatgaatatctgactttaataagttggtaaggatatatttttttgtctatgttctgtttcaacttatgtagattattataaattgatgtaaaccacgtgagaggaaaatgttaataaaaaatgcaaagccccatcatttgcacaaaa

SEQ ID NO: 286606 - DNA, 6107 bp, Homo sapiens
gcggccgcagcgggggacccgcgacctggagcagcgggaggccgaggccaagggccgcccgggctcgcccctcgccgcggaggagacccccgggcgcgagcacctgcccccgtggcggcgccgcaggttcctgcgggtgcccgagcgggactcgcccggccacagctcgccggagagagacagcgacggcagccggcacagctccgaccgcgaggacgacttctccgcagacttcagctacgggacggacgagtacgacggagaggggaatgaggagcagaaggggcccccggagggctcagagaccatgccgtacatcgatgagtcgcccaccatgtccccgcagctcagcgcccgcagccagggcgggggggatggcgtctccccgactccacctgagggactggctcctggggtggaagcagggaaaggcctggagatgaggaagctggttctctcggggttcttggccagcgaagagatctacattaaccagctggaagccctgttgctgcccatgaaacccctgaaggccaccgccaccacctcccagcccgtgctcaccatccagcagatcgagaccatcttctacaagatccaggacatctatgagatccacaaggagttctatgacaacctgtgccccaaggtgcaacagtgggacagccaggtcaccatgggccacctcttccagaagctggccagccagctcggtgtgtacaaagcgtttgtcgataactataaagtcgctctggagacagctgagaagtgcagccagtccaacaaccagttccagaagatctcagaggaactcaaagtgaaaggtcccaaggactccaaggacagccacacgtctgtcaccatggaagctctgctctacaagcccattgaccgggtcactcggagcaccctagtcctacacgacctgctgaagcacacacctgtggaccaccccgactacccgctgctgcaggatgccctccgcatctcccagaacttcctgtccagcatcaacgaggacatcgacccccgccggactgcagtgacaacgcccaagggggagacgcgacagctggtgaaggacggcttcctggtggaagtgtcagagagctcccggaagctgcggcacgtcttcctctttacagatgtcctactgtgtgccaagctgaagaagacctctgcagggaagcaccagcagtatgactgtaagtggtacatccccctggccgacctggtgtttccatcccccgaggaatctgaggccagcccccaggtgcaccccttcccagaccatgagctggaggacatgaagatgaagatctctgccctcaagagtgaaatccagaaggagaaagccaacaaaggccagagccgggccatcgagcgcctgaagaagaagatgtttgagaatgagttcctgctgctgctcaactcccccacaatcccgttcaggatccacaatcggaatggaaagagttacctgttcctactgtcctcggactacgagaggtcagagtggagagaagcaattcagaaactacagaagaaggatctccaggcctttgtcctgagctcagtggagctccaggtgctcacaggatcctgtttcaagcttaggactgtacacaacattcctgtcaccagcaataaagacgacgatgagtctccaggactctatggcttccttcatgtcatcgtccactctgccaagggatttaagcaatcagccaacctgtactgtaccctggaggtggattccttcggctattttgtcagcaaagccaaaaccagggtgttccgggacacagcggagcccaagtgggatgaggagtttgagatcgagctggagggctcccagtccctgaggatcctgtgctatgagaagtgctatgacaagaccaaggtcaacaaggacaacaatgagatcgtggacaagatcatgggcaaaggacagatccagctggacccacaaaccgtggagaccaagaactggcacacggacgtgattgagatgaacgggatcaaagtggaattttccatgaaattcaccagccgagatatgagcctgaagaggaccccgtccaaaaagcagaccggcgtcttcggtgtgaagatcagcgtggtgacgaagcgggagcgctccaaggtgccctacatcgtccggcagtgtgtggaggaggtggagaagaggggtatcgaggaggttggcatctacaggatatcgggcgtggccacggacatccaggcgctcaaggccgtcttcgatgccaataacaaggacatcctgctgatgctgagtgacatggacatcaacgccatcgccgggacgctcaagctgtacttccgggaactgcccgagccgctcctcacggaccgactctacccagccttcatggagggcatcgccctgtcagaccctgctgccaaggaaaactgcatgatgcacctgctccgctccctgcccgaccccaacctcatcaccttcctcttcctgctggaacacttgaaaagggttgccgagaaggagcccatcaacaaaatgtcacttcacaacctggctaccgtgtttggacccacgttactgagaccctcagaagtggagagcaaagcacacctcacctcggctgcggacatctggtcccatgacgtcatggcgcaggtccaggtcctcctctactacctgcagcacccccccatttccttcgcagaactcaagcggaacacactgtacttctccaccgacgtgtagcccgaggcagggtggctgcgggcgggtggtggaaccagcccctccagcctggggtccaactcagacttgaaagactgcaatagaaaactcccaaacccagcactccagactcgagggaagccagcttccaagaactggaatgcgtacgtcttttgtgccaccttgtacaaagccggctgcccagccccagcctcaccaccgcatcccacctcctgccctccatacctctagttgtgtctgatgctccgtgctgttcgggaattgttttatgtacacttgtcaggcagaaaaggtagtgaccggcccggcgtgggcacacagacagcccgctttgttctttcatttcctccagcactttctttccgcctgagtccagcccaaggccttttattttgcgctgtgtaactgctgccagcttctctcttggccctgctcccagatggcggtctcctggcagcctcccctcagtcttcctccacccgctcttccttcccagcctgcctgcatgcatgtgcacccttggtcttcgctccatcgccttgaaagctctgaagaggccctgggttgccgcggcagcagtggtctgtttgatgctgccgtttgccgctgccggcccctcctcagactccgcctttgggagcacacctgctttgccttgctgcctgtgcaaatgttggacaagcagacacactcacactcgtccccagcttagcacagagctggagcgcccatttctggaattttccgtttgggaatctccacttctggggtttacctgttcggcctcctgcctatcagtgaggcatctctgactgtttcttctactgcttttcagttcccttccctgctgttctatttcctttgagtgtaaagactcacaggtgacctgctatcgagatagccagagggtcaggagagaatgggggaggaggcggtcaggctgctgaggaaacaccacaggctgaacgggggaggaatgcacatgccacgctgggtgtcccgggtcgcggggaggcagctcagctcttaggagcaagttgtgggggcttttcaagaggggccaggcttcctggagggtgactgatgtggccgaagcaggtgtccaggcaggtaggctgcagccaggagctccctggcaccgcaggacctcgtggtactcttgccttagattttacacacactccacagccaagcactgccacggtcctccaggacctgggaagcaaaggcacaggcccacggtggccagccattgtggtgccgccccagcttctggatacagccttttgggtaaacactgggaactccagaagttgtggggagagtggggaatcagacagccgcctctaggggctgggttctgctggggcctccttgttggtgctgtaggcacccgccagggagcagggacccgacttgcagacgcattgcccggtactaggaaggagtgaggtgtgttcccaccgtacacttcccacacgagctgcggctgccagcctcgggccatcagcctaggagagcagatgcagctccaggggctcgacttatagccagttacagctccccggctcttctgtgtggcagagcgtcgtttccgggccctcagggctggggagctcagttcccattgcttgtgctcagggctgagtcttaaagaagggtttgccggccctaacgctgcagcgcgtgcgcggtgagaggccctttttgagcctgtttactcctgtggccttgggcagaacagtaaatactctgtgcacggaggaaagacatgcccaagaggaaggaagtactgaccatcggctgcctgtgagcagcttagcaaggagcccttgctccctgggaaaggcggtgaacttgagtctaaagatgcagtgcctggcccttcctaaggtccctgcctggcatccgagtgtcggtgtgtggcacagaaggctcctgcttgcttccaaagtgatggacaggaaggggcagagtgagtcacggcccagactgggcaccttcacgtctcagcctcagggagccccacagccccaagctcgctgaggcaacgtgagaacaggctatgggaaggctgcaaaggctgagaaatgcaaaggctcatatttataaatcccacccccagagtggggagggtcaggtgccagacctggactaaactgcaccaaggaaacacccagcagggtctcctgtgagccggggaccatgcagcccgaaacctccagtcactgcgcccggcaggagtcaggagccagggactgtgcagcctggaacctccagtcactgtgcccagcagggtgggctgtgcccagcaggagtcaggctaagaaacgccaggtctgcctgttcttgctgggcaatggctgatggctgccagtttctgctgatacacaggtaggatgggacccttcatgaatatctgactttaataagttggtaaggatatatttttttgtctatgttctgtttcaacttatgtagattattataaattgatgtaaaccacgtgagaggaaaatgttaataaaaaatgcaaagccccatcatttgcacaaaaaaaaaaaaaaacaaacacacaaaccaaaaaaaaaaaaaaaaaaaaaaaaacacaaataacaaacaaacaaacaaaaacaaaaccaaaaacacaaaaaaaaaaaaacaagaaaaaaagaaaccaaaataaaagaacaaaagggggagggaggcggcgagcacgaaaaaaaggctcagacaagaggggaaagacaacccacaagcgcgcccacgcagaaacgaggggagacagcgcagcgcgcagccgccagcgcgcagccataagcaagacgcagcggcaaggagaaccggaaaactcacggggagacgggagagagacacgcagagtcgagcgtgaaaaggcatgaagaaagaagctataagcgcggggcgggataagaagcagaagaaacacacgagacagcgagaacagggggccgggaaaaggaagaaaagactaggggagaggcacagaaggatccgacagaaaggcgcggttagcctgaagggagagccgggcagagcaatcgcgaaggtattatactaacaaaagtacacgggtggggtgcgagagcaagaaggaggacgacgcgcgaggagcggcgtcggggtatgcatcgggagtcagtggccgcttggtgaaggatgaggccctgcggggggtggcggtgaagaggtaacgtgggagaacggacgatacatgggggacgaacgaaccgttagtgcggagtgggctggggacggagaagaggggaggagcaagcaacggacgaagcgcggagacggcaggtcggccaggagcagtaagagcgtagtgggtaga

SEQ ID NO: 286607 - DNA, 5227 bp, Homo sapiens
gcggccgcagcgggggacccgcgacctggagcagcgggaggccgaggccaagggccgcccgggctcgcccctcgccgcggaggagacccccgggcgcgagcacctgcccccgtggcggcgccgcaggttcctgcgggtgcccgagcgggactcgcccggccacagctcgccggagagagacagcgacggcagccggcacagctccgaccgcgaggacgacttctccgcagacttcagctacgggacggacgagtacgacggagaggggaatgaggagcagaaggggcccccggagggctcagagaccatgccgtacatcgatgagtcgcccaccatgtccccgcagctcagcgcccgcagccagggcgggggggatggcgtctccccgactccacctgagggactggctcctggggtggaagcagggaaaggcctggagatgaggaagctggttctctcggggttcttggccagcgaagagatctacattaaccagctggaagccctgttgctgcccatgaaacccctgaaggccaccgccaccacctcccagcccgtgctcaccatccagcagatcgagaccatcttctacaagatccaggacatctatgagatccacaaggagttctatgacaacctgtgccccaaggtgcaacagtgggacagccaggtcaccatgggccacctcttccagaagctggccagccagctcggtgtgtacaaagcgtttgtcgataactataaagtcgctctggagacagctgagaagtgcagccagtccaacaaccagttccagaagatctcagaggaactcaaagtgaaaggtcccaaggactccaaggacagccacacgtctgtcaccatggaagctctgctctacaagcccattgaccgggtcactcggagcaccctagtcctacacgacctgctgaagcacacacctgtggaccaccccgactacccgctgctgcaggatgccctccgcatctcccagaacttcctgtccagcatcaacgaggacatcgacccccgccggactgcagtgacaacgcccaagggggagacgcgacagctggtgaaggacggcttcctggtggaagtgtcagagagctcccggaagctgcggcacgtcttcctctttacagatgtcctactgtgtgccaagctgaagaagacctctgcagggaagcaccagcagtatgactgtaagtggtacatccccctggccgacctggtgtttccatcccccgaggaatctgaggccagcccccaggtgcaccccttcccagaccatgagctggaggacatgaagatgaagatctctgccctcaagagtgaaatccagaaggagaaagccaacaaaggccagagccgggccatcgagcgcctgaagaagaagatgtttgagaatgagttcctgctgctgctcaactcccccacaatcccgttcaggatccacaatcggaatggaaagagttacctgttcctactgtcctcggactacgagaggtcagagtggagagaagcaattcagaaactacagaagaaggatctccaggcctttgtcctgagctcagtggagctccaggtgctcacaggatcctgtttcaagcttaggactgtacacaacattcctgtcaccagcaataaagacgacgatgagtctccaggactctatggcttccttcatgtcatcgtccactctgccaagggatttaagcaatcagccaacctgtactgtaccctggaggtggattccttcggctattttgtcagcaaagccaaaaccagggtgttccgggacacagcggagcccaagtgggatgaggagtttgagatcgagctggagggctcccagtccctgaggatcctgtgctatgagaagtgctatgacaagaccaaggtcaacaaggacaacaatgagatcgtggacaagatcatgggcaaaggacagatccagctggacccacaaaccgtggagaccaagaactggcacacggacgtgattgagatgaacgggatcaaagtggaattttccatgaaattcaccagccgagatatgagcctgaagaggaccccgtccaaaaagcagaccggcgtcttcggtgtgaagatcagcgtggtgacgaagcgggagcgctccaaggtgccctacatcgtccggcagtgtgtggaggaggtggagaagaggggtatcgaggaggttggcatctacaggatatcgggcgtggccacggacatccaggcgctcaaggccgtcttcgatgccaataacaaggacatcctgctgatgctgagtgacatggacatcaacgccatcgccgggacgctcaagctgtacttccgggaactgcccgagccgctcctcacggaccgactctacccagccttcatggagggcatcgccctgtcagaccctgctgccaaggaaaactgcatgatgcacctgctccgctccctgcccgaccccaacctcatcaccttcctcttcctgctggaacacttgaaaagggttgccgagaaggagcccatcaacaaaatgtcacttcacaacctggctaccgtgtttggacccacgttactgagaccctcagaagtggagagcaaagcacacctcacctcggctgcggacatctggtcccatgacgtcatggcgcaggtccaggtcctcctctactacctgcagcacccccccatttccttcgcagaactcaagcggaacacactgtacttctccaccgacgtgtagcccgaggcagggtggctgcgggcgggtggtggaaccagcccctccagcctggggtccaactcagacttgaaagactgcaatagaaaactcccaaacccagcactccagactcgagggaagccagcttccaagaactggaatgcgtacgtcttttgtgccaccttgtacaaagccggctgcccagccccagcctcaccaccgcatcccacctcctgccctccatacctctagttgtgtctgatgctccgtgctgttcgggaattgttttatgtacacttgtcaggcagaaaaggtagtgaccggcccggcgtgggcacacagacagcccgctttgttctttcatttcctccagcactttctttccgcctgagtccagcccaaggccttttattttgcgctgtgtaactgctgccagcttctctcttggccctgctcccagatggcggtctcctggcagcctcccctcagtcttcctccacccgctcttccttcccagcctgcctgcatgcatgtgcacccttggtcttcgctccatcgccttgaaagctctgaagaggccctgggttgccgcggcagcagtggtctgtttgatgctgccgtttgccgctgccggcccctcctcagactccgcctttgggagcacacctgctttgccttgctgcctgtgcaaatgttggacaagcagacacactcacactcgtccccagcttagcacagagctggagcgcccatttctggaattttccgtttgggaatctccacttctggggtttacctgttcggcctcctgcctatcagtgaggcatctctgactgtttcttctactgcttttcagttcccttccctgctgttctatttcctttgagtgtaaagactcacaggtgacctgctatcgagatagccagagggtcaggagagaatgggggaggaggcggtcaggctgctgaggaaacaccacaggctgaacgggggaggaatgcacatgccacgctgggtgtcccgggtcgcggggaggcagctcagctcttaggagcaagttgtgggggcttttcaagaggggccaggcttcctggagggtgactgatgtggccgaagcaggtgtccaggcaggtaggctgcagccaggagctccctggcaccgcaggacctcgtggtactcttgccttagattttacacacactccacagccaagcactgccacggtcctccaggacctgggaagcaaaggcacaggcccacggtggccagccattgtggtgccgccccagcttctggatacagccttttgggtaaacactgggaactccagaagttgtggggagagtggggaatcagacagccgcctctaggggctgggttctgctggggcctccttgttggtgctgtaggcacccgccagggagcagggacccgacttgcagacgcattgcccggtactaggaaggagtgaggtgtgttcccaccgtacacttcccacacgagctgcggctgccagcctcgggccatcagcctaggagagcagatgcagctccaggggctcgacttatagccagttacagctccccggctcttctgtgtggcagagcgtcgtttccgggccctcagggctggggagctcagttcccattgcttgtgctcagggctgagtcttaaagaagggtttgccggccctaacgctgcagcgcgtgcgcggtgagaggccctttttgagcctgtttactcctgtggccttgggcagaacagtaaatactctgtgcacggaggaaagacatgcccaagaggaaggaagtactgaccatcggctgcctgtgagcagcttagcaaggagcccttgctccctgggaaaggcggtgaacttgagtctaaagatgcagtgcctggcccttcctaaggtccctgcctggcatccgagtgtcggtgtgtggcacagaaggctcctgcttgcttccaaagtgatggacaggaaggggcagagtgagtcacggcccagactgggcaccttcacgtctcagcctcagggagccccacagccccaagctcgctgaggcaacgtgagaacaggctatgggaaggctgcaaaggctgagaaatgcaaaggctcatatttataaatcccacccccagagtggggagggtcaggtgccagacctggactaaactgcaccaaggaaacacccagcagggtctcctgtgagccggggaccatgcagcccgaaacctccagtcactgcgcccggcaggagtcaggagccagggactgtgcagcctggaacctccagtcactgtgcccagcagggtgggctgtgcccagcaggagtcaggctaagaaacgccaggtctgcctgttcttgctgggcaatggctgatggctgccagtttctgctgatacacaggtaggatgggacccttcatgaatatctgactttaataagttggtaaggatatatgtcgcatttccgtgaattttgtagtagtag

SEQ ID NO: 286608 - DNA, 3968 bp, Homo sapiens
gcggccgcagcgggggacccgcgacctggagcagcgggaggccgaggccaagggccgcccgggctcgcccctcgccgcggaggagacccccgggcgcgagcacctgcccccgtggcggcgccgcaggttcctgcgggtgcccgagcgggactcgcccggccacagctcgccggagagagacagcgacggcagccggcacagctccgaccgcgaggacgacttctccgcagacttcagctacgggacggacgagtacgacggagaggggaatgaggagcagaaggggcccccggagggctcagagaccatgccgtacatcgatgagtcgcccaccatgtccccgcagctcagcgcccgcagccagggcgggggggatggcgtctccccgactccacctgagggactggctcctggggtggaagcagggaaaggcctggagatgaggaagctggttctctcggggttcttggccagcgaagagatctacattaaccagctggaagccctgttgctgcccatgaaacccctgaaggccaccgccaccacctcccagcccgtgctcaccatccagcagatcgagaccatcttctacaagatccaggacatctatgagatccacaaggagttctatgacaacctgtgccccaaggtgcaacagtgggacagccaggtcaccatgggccacctcttccagaagctggccagccagctcggtgtgtacaaagcgtttgtcgataactataaagtcgctctggagacagctgagaagtgcagccagtccaacaaccagttccagaagatctcagaggaactcaaagtgaaaggtcccaaggactccaaggacagccacacgtctgtcaccatggaagctctgctctacaagcccattgaccgggtcactcggagcaccctagtcctacacgacctgctgaagcacacacctgtggaccaccccgactacccgctgctgcaggatgccctccgcatctcccagaacttcctgtccagcatcaacgaggacatcgacccccgccggactgcagtgacaacgcccaagggggagacgcgacagctggtgaaggacggcttcctggtggaagtgtcagagagctcccggaagctgcggcacgtcttcctctttacagatgtcctactgtgtgccaagctgaagaagacctctgcagggaagcaccagcagtatgactgtaagtggtacatccccctggccgacctggtgtttccatcccccgaggaatctgaggccagcccccaggtgcaccccttcccagaccatgagctggaggacatgaagatgaagatctctgccctcaagagtgaaatccagaaggagaaagccaacaaaggccagagccgggccatcgagcgcctgaagaagaagatgtttgagaatgagttcctgctgctgctcaactcccccacaatcccgttcaggatccacaatcggaatggaaagagttacctgttcctactgtcctcggactacgagaggtcagagtggagagaagcaattcagaaactacagaagaaggatctccaggcctttgtcctgagctcagtggagctccaggtgctcacaggatcctgtttcaagcttaggactgtacacaacattcctgtcaccagcaataaagacgacgatgagtctccaggactctatggcttccttcatgtcatcgtccactctgccaagggatttaagcaatcagccaacctgtactgtaccctggaggtggattccttcggctattttgtcagcaaagccaaaaccagggtgttccgggacacagcggagcccaagtgggatgaggagtttgagatcgagctggagggctcccagtccctgaggatcctgtgctatgagaagtgctatgacaagaccaaggtcaacaaggacaacaatgagatcgtggacaagatcatgggcaaaggacagatccagctggacccacaaaccgtggagaccaagaactggcacacggacgtgattgagatgaacgggatcaaagtggaattttccatgaaattcaccagccgagatatgagcctgaagaggaccccgtccaaaaagcagaccggcgtcttcggtgtgaagatcagcgtggtgacgaagcgggagcgctccaaggtgccctacatcgtccggcagtgtgtggaggaggtggagaagaggggtatcgaggaggttggcatctacaggatatcgggcgtggccacggacatccaggcgctcaaggccgtcttcgatgccaataacaaggacatcctgctgatgctgagtgacatggacatcaacgccatcgccgggacgctcaagctgtacttccgggaactgcccgagccgctcctcacggaccgactctacccagccttcatggagggcatcgccctgtcagaccctgctgccaaggaaaactgcatgatgcacctgctccgctccctgcccgaccccaacctcatcaccttcctcttcctgctggaacacttgaaaagggttgccgagaaggagcccatcaacaaaatgtcacttcacaacctggctaccgtgtttggacccacgttactgagaccctcagaagtggagagcaaagcacacctcacctcggctgcggacatctggtcccatgacgtcatggcgcaggtccaggtcctcctctactacctgcagcacccccccatttccttcgcagaactcaagcggaacacactgtacttctccaccgacgtgtagcccgaggcagggtggctgcgggcgggtggtggaaccagcccctccagcctggggtccaactcagacttgaaagactgcaatagaaaactcccaaacccagcactccagactcgagggaagccagcttccaagaactggaatgcgtacgtcttttgtgccaccttgtacaaagccggctgcccagccccagcctcaccaccgcatcccacctcctgccctccatacctctagttgtgtctgatgctccgtgctgttcgggaattgttttatgtacacttgtcaggcagaaaaggtagtgaccggcccggcgtgggcacacagacagcccgctttgttctttcatttcctccagcactttctttccgcctgagtccagcccaaggccttttattttgcgctgtgtaactgctgccagcttctctcttggccctgctcccagatggcggtctcctggcagcctcccctcagtcttcctccacccgctcttccttcccagcctgcctgcatgcatgtgcacccttggtcttcgctccatcgccttgaaagctctgaagaggccctgggttgccgcggcagcagtggtctgtttgatgctgccgtttgccgctgccggcccctcctcagactccgcctttgggagcacacctgctttgccttgctgcctgtgcaaatgttggacaagcagacacactcacactcgtccccagcttagcacagagctggagcgcccatttctggaattttccgtttgggaatctccacttctggggtttacctgttcggcctcctgcctatcagtgaggcatctctgactgtttcttctactgcttttcagttcccttccctgctgttctatttcctttgagtgtaaagactcacaggtgacctgctatcgagatagccagagggtcaggagagaatgggggaggaggcggtcaggctgctgaggaaacaccacaggctgaacgggggaggaatgcacatgccacgctgggtgtcccgggtcgcggggaggcagctcagctcttaggagcaagttgtgggggcttttcaagaggggccaggcttcctggagggtgactgatgtggccgaagcaggtgtccaggcaggtaggctgcagccaggagctccctggcaccgcaggacctcgtggtactctacacccagatcacacaaatagcacgcaccccactcattcccgactcccgctcatagctg

SEQ ID NO: 286609 - DNA, 3048 bp, Homo sapiens
gcggccgcagcgggggacccgcgacctggagcagcgggaggccgaggccaagggccgcccgggctcgcccctcgccgcggaggagacccccgggcgcgagcacctgcccccgtggcggcgccgcaggttcctgcgggtgcccgagcgggactcgcccggccacagctcgccggagagagacagcgacggcagccggcacagctccgaccgcgaggacgacttctccgcagacttcagctacgggacggacgagtacgacggagaggggaatgaggagcagaaggggcccccggagggctcagagaccatgccgtacatcgatgagtcgcccaccatgtccccgcagctcagcgcccgcagccagggcgggggggatggcgtctccccgactccacctgagggactggctcctggggtggaagcagggaaaggcctggagatgaggaagctggttctctcggggttcttggccagcgaagagatctacattaaccagctggaagccctgttgctgcccatgaaacccctgaaggccaccgccaccacctcccagcccgtgctcaccatccagcagatcgagaccatcttctacaagatccaggacatctatgagatccacaaggagttctatgacaacctgtgccccaaggtgcaacagtgggacagccaggtcaccatgggccacctcttccagaagctggccagccagctcggtgtgtacaaagcgtttgtcgataactataaagtcgctctggagacagctgagaagtgcagccagtccaacaaccagttccagaagatctcagaggaactcaaagtgaaaggtcccaaggactccaaggacagccacacgtctgtcaccatggaagctctgctctacaagcccattgaccgggtcactcggagcaccctagtcctacacgacctgctgaagcacacacctgtggaccaccccgactacccgctgctgcaggatgccctccgcatctcccagaacttcctgtccagcatcaacgaggacatcgacccccgccggactgcagtgacaacgcccaagggggagacgcgacagctggtgaaggacggcttcctggtggaagtgtcagagagctcccggaagctgcggcacgtcttcctctttacagatgtcctactgtgtgccaagctgaagaagacctctgcagggaagcaccagcagtatgactgtaagtggtacatccccctggccgacctggtgtttccatcccccgaggaatctgaggccagcccccaggtgcaccccttcccagaccatgagctggaggacatgaagatgaagatctctgccctcaagagtgaaatccagaaggagaaagccaacaaaggccagagccgggccatcgagcgcctgaagaagaagatgtttgagaatgagttcctgctgctgctcaactcccccacaatcccgttcaggatccacaatcggaatggaaagagttacctgttcctactgtcctcggactacgagaggtcagagtggagagaagcaattcagaaactacagaagaaggatctccaggcctttgtcctgagctcagtggagctccaggtgctcacaggatcctgtttcaagcttaggactgtacacaacattcctgtcaccagcaataaagacgacgatgagtctccaggactctatggcttccttcatgtcatcgtccactctgccaagggatttaagcaatcagccaacctgtactgtaccctggaggtggattccttcggctattttgtcagcaaagccaaaaccagggtgttccgggacacagcggagcccaagtgggatgaggagtttgagatcgagctggagggctcccagtccctgaggatcctgtgctatgagaagtgctatgacaagaccaaggtcaacaaggacaacaatgagatcgtggacaagatcatgggcaaaggacagatccagctggacccacaaaccgtggagaccaagaactggcacacggacgtgattgagatgaacgggatcaaagtggaattttccatgaaattcaccagccgagatatgagcctgaagaggaccccgtccaaaaagcagaccggcgtcttcggtgtgaagatcagcgtggtgacgaagcgggagcgctccaaggtgccctacatcgtccggcagtgtgtggaggaggtggagaagaggggtatcgaggaggttggcatctacaggatatcgggcgtggccacggacatccaggcgctcaaggccgtcttcgatgccaataacaaggacatcctgctgatgctgagtgacatggacatcaacgccatcgccgggacgctcaagctgtacttccgggaactgcccgagccgctcctcacggaccgactctacccagccttcatggagggcatcgccctgtcagaccctgctgccaaggaaaactgcatgatgcacctgctccgctccctgcccgaccccaacctcatcaccttcctcttcctgctggaacacttgaaaagggttgccgagaaggagcccatcaacaaaatgtcacttcacaacctggctaccgtgtttggacccacgttactgagaccctcagaagtggagagcaaagcacacctcacctcggctgcggacatctggtcccatgacgtcatggcgcaggtccaggtcctcctctactacctgcagcacccccccatttccttcgcagaactcaagcggaacacactgtacttctccaccgacgtgtagcccgaggcagggtggctgcgggcgggtggtggaaccagcccctccagcctggggtccaactcagacttgaaagactgcaatagaaaactcccaaacccagcactccagactcgagggaagccagcttccaagaactggaatgcgtacgtcttttgtgccaccttgtacaaagccggctgcccagccccagcctcaccaccgcatcccacctcctgccctccatacctctagttgtgtctgatgctccgtgctgttcgggaatcggggactgtcgggctatcggcaacggatcctctaga

SEQ ID NO: 286610 - DNA, 2034 bp, Homo sapiens
gcggccgcagcgggggacccgcgacctggagcagcgggaggccgaggccaagggccgcccgggctcgcccctcgccgcggaggagacccccgggcgcgagcacctgcccccgtggcggcgccgcaggttcctgcgggtgcccgagcgggactcgcccggccacagctcgccggagagagacagcgacggcagccggcacagctccgaccgcgaggacgacttctccgcagacttcagctacgggacggacgagtacgacggagaggggaatgaggagcagaaggggcccccggagggctcagagaccatgccgtacatcgatgagtcgcccaccatgtccccgcagctcagcgcccgcagccagggcgggggggatggcgtctccccgactccacctgagggactggctcctggggtggaagcagggaaaggcctggagatgaggaagctggttctctcggggttcttggccagcgaagagatctacattaaccagctggaagccctgttgctgcccatgaaacccctgaaggccaccgccaccacctcccagcccgtgctcaccatccagcagatcgagaccatcttctacaagatccaggacatctatgagatccacaaggagttctatgacaacctgtgccccaaggtgcaacagtgggacagccaggtcaccatgggccacctcttccagaagctggccagccagctcggtgtgtacaaagcgtttgtcgataactataaagtcgctctggagacagctgagaagtgcagccagtccaacaaccagttccagaagatctcagaggaactcaaagtgaaaggtcccaaggactccaaggacagccacacgtctgtcaccatggaagctctgctctacaagcccattgaccgggtcactcggagcaccctagtcctacacgacctgctgaagcacacacctgtggaccaccccgactacccgctgctgcaggatgccctccgcatctcccagaacttcctgtccagcatcaacgaggacatcgacccccgccggactgcagtgacaacgcccaagggggagacgcgacagctggtgaaggacggcttcctggtggaagtgtcagagagctcccggaagctgcggcacgtcttcctctttacagatgtcctactgtgtgccaagctgaagaagacctctgcagggaagcaccagcagtatgactgtaagtggtacatccccctggccgacctggtgtttccatcccccgaggaatctgaggccagcccccaggtgcaccccttcccagaccatgagctggaggacatgaagatgaagatctctgccctcaagagtgaaatccagaaggagaaagccaacaaaggccagagccgggccatcgagcgcctgaagaagaagatgtttgagaatgagttcctgctgctgctcaactcccccacaatcccgttcaggatccacaatcggaatggaaagagttacctgttcctactgtcctcggactacgagaggtcagagtggagagaagcaattcagaaactacagaagaaggatctccaggcctttgtcctgagctcagtggagctccaggtgctcacaggatcctgtttcaagcttaggactgtacacaacattcctgtcaccagcaataaagacgacgatgagtctccaggactctatggcttccttcatgtcatcgtccactctgccaagggatttaagcaatcagccaacctgtactgtaccctggaggtggattccttcggctattttgtcagcaaagccaaaaccagggtgttccgggacacagcggagcccaagtgggatgaggagtttgagatcgagctggagggctcccagtccctgaggatcctgtgctatgagaagtgctatgacaagaccaaggtcaacaaggacaacaatgagatcgtggacaagatcatgggcaaaggacagatccaggtgaggccagggcgccggggcgaggctgagggagcctccaggaggtggttccagttgaaaaggaattctggtca

SEQ ID NO: 286611 - DNA, 319 bp, Homo sapiens
ggggctcccgccccgccctcgcccctgccccggccgccccgcgctcctcccggggacctggttcccggcctcctcgcccctccgcgctcgcaacttcggcctcccccggctcccgcccgccctccctcctttgttgcgcgatgagggtcgggtttcggatctgaccgagccgccgccgcgggatggagccgctcagccaccggggcctgccgcgcctgtcctggatcgacaccctctacagcagtacgtgtgccgggcgggggcgggaccccaggatcgggatcgggaccccaggatggagatcgggaccccaggatcg

SEQ ID NO: 286612 - DNA, 3121 bp, Homo sapiens
gagcaagccgagtggagggaggcaaaggccaggctgaggatcagggtggcccgggtggcagcggggaggcgctgcatgctggaggctgtgctgagtgcccggtgcaggtgagccggtcctgcggagttgtgccgagtgcctgctgcagtctcatttccagttcctccatgacgtggcaagtgaagacaggaatgaaaggaatgtaaagcagcttttctctgaagagaagaagagagagagacacagccaagaccgaggctgggccaagatggcgtctgtgtttcgaagcgaggagatgtgtttgtcacaactgtttctccaggtggaagctgcatattgctgtgtggctgagctcggagagctcggattggttcagttcaaagatttaaatatgaatgtgaacagctttcaaaggaaatttgtgaatgaagtcagaaggtgtgaatcactggagagaatcctccgttttctggaagacgagatgcaaaatgagattgtagttcagttgctcgagaaaagcccactgaccccgctcccacgggaaatgattaccctggagactgttctagaaaaactggaaggagagttacaggaagccaaccagaaccagcaggccttgaaacaaagcttcctagaactgacagaactgaaatacctcctgaagaaaacccaagacttctttgagacggaaaccaatttagctgatgatttctttactgaggacacttctggcctcctggagttgaaagcagtgcctgcatatatgaccggaaagttggggttcatagccggtgtgatcaacagggagaggatggcttcctttgagcggttactgtggcgaatctgccgaggaaacgtgtacttgaagttcagtgagatggacgcccctctggaggatcctgtgacgaaagaagaaattcagaagaacatattcatcatattttaccaaggagagcagctcaggcagaaaatcaagaagatctgtgatgggtttcgagccactgtctacccttgcccagagcctgcggtggagcgcagagagatgttggagagcgtcaatgtgaggctggaagatttaatcaccgtcataacacaaacagagtctcaccgccagcgcctgctgcaggaagccgctgccaactggcactcctggctcatcaaggtgcagaagatgaaagctgtctaccacatcctgaacatgtgcaacatcgacgtcacccagcagtgtgtcatcgccgagatctggttcccggtggcagatgccacacgtatcaagagggcactggagcaaggcatggaactaagtggctcctccatggcccccatcatgaccacagtgcaatctaaaacagcccctcccacatttaacaggaccaataaattcacagctggcttccagaatattgttgatgcctatggtgtcggcagctaccgggagataaacccagccccctacaccatcatcactttccccttcctgttcgctgtgatgtttggagactgtggtcatggaaccgtgatgctcctggctgcactttggatgattctgaatgagagacgcttgctctcccagaagacagacaatgagatttggaacaccttcttccacgggcgctatctgatcctacttatgggcatcttctccatctacacgggtttgatctacaatgactgcttctccaagtccttgaacatctttggctcttcttggagtgtccaacccatgttcagaaacggcacatggaatactcatgtaatggaggaaagtctatatctgcagctggacccagccataccaggagtgtattttggaaatccatacccgtttgggattgatccgatttggaacttggcttcaaacaaactcacatttctgaactcgtataaaatgaagatgtcggtgatcctgggaattgtccagatggtttttggtgtcatcctcagccttttcaatcacatatacttcagaagaactctcaacatcattctgcaatttatccctgagatgatttttatcctgtgtctgtttggatacctggttttcatgatcattttcaaatggtgctgctttgacgtccacgtatctcagcacgcccccagcatcctcatccacttcatcaacatgtttctgtttaactacagtgactcttccaacgcacccctctacaaacatcagcaagaagtccaaagtttctttgtggttatggctttgatttctgtgccgtggatgcttctgattaagccgtttattcttagagccagtcatcggaaatcccagctgcaggcatccaggatccaagaagatgccactgagaacattgaaggtgatagctccagcccttctagccgttctggccagaggacttctgcagatacccacggggctctggacgaccatggagaagagttcaactttggagacgtctttgtccaccaagccatccacaccatcgagtactgcctgggctgcatttcaaacacagcctcctacctgcggctctgggccctcagcctggctcatgcacaactgtctgaagtgctctggactatggtgatgaacagcggccttcagacgcgaggctggggaggaatcgtcggggtttttattatttttgccgtatttgctgtcctgacagtagccatccttctgatcatggagggcctctctgctttcctgcacgccctgcgactgcactgggttgagttccagaacaagttctatgtcggggatggttacaagttttctccattctcctttaaacacatcctggatggcacagccgaggagtaggctgagggctgcacctcccacggtggtcaccatgccaatgaaggaagttcagtcttgtctttgatatcagcccctgcaaggcgctcaatgggaaggttgttcttggctcacctgaagcatgaaactgtgtattatttggacgtcagcctgtggatttgatacgacttaaccacgtcagaggaaggactttggcaagtgatattgtcttcatgtggggtattaattctcaaataataaagtaattgacaaatgaggggagaatgctaaacagatgtcttcttgcaatattttaaatattgtatttgagaaaataaacatctgagtcattca

SEQ ID NO: 286613 - DNA, 2033 bp, Homo sapiens
ctgggactccttttccagtggccaaagacgcagttattctaggataggctggccatctaactaaagtcagcaaacgatgtcttagcagaaaaggggatgcagaatgctttgcagcaagaactcacctgtttcctttggaatatattaaacacaggtttcgagccactgtctacccttgcccagagcctgcggtggagcgcagagagatgttggagagcgtcaatgtgaggctggaagatttaatcaccgtcataacacaaacagagtctcaccgccagcgcctgctgcaggaagccgctgccaactggcactcctggctcatcaaggtgcagaagatgaaagctgtctaccacatcctgaacatgtgcaacatcgacgtcacccagcagtgtgtcatcgccgagatctggttcccggtggcagatgccacacgtatcaagagggcactggagcaaggcatggaactaagtggctcctccatggcccccatcatgaccacagtgcaatctaaaacagcccctcccacatttaacaggaccaataaattcacagctggcttccagaatattgttgatgcctatggtgtcggcagctaccgggagataaacccagccccctacaccatcatcactttccccttcctgttcgctgtgatgtttggagactgtggtcatggaaccgtgatgctcctggctgcactttggatgattctgaatgagagacgcttgctctcccagaagacagacaatgagatttggaacttggcttcaaacaaactcacatttctgaactcgtataaaatgaagatgtcggtgatcctgggaattgtccagatggtttttggtgtcatcctcagccttttcaatcacatatacttcagaagaactctcaacatcattctgcaatttatccctgagatgatttttatcctgtgtctgtttggatacctggttttcatgatcattttcaaatggtgctgctttgacgtccacgtatctcagcacgcccccagcatcctcatccacttcatcaacatgtttctgtttaactacagtgactcttccaacgcacccctctacaaacatcagcaagaagtccaaagtttctttgtggttatggctttgatttctgtgccgtggatgcttctgattaagccgtttattcttagagccagtcatcggaaatcccagctgcaggcatccaggatccaagaagatgccactgagaacattgaaggtgatagctccagcccttctagccgttctggccagaggacttctgcagatacccacggggctctggacgaccatggagaagagttcaactttggagacgtctttgtccaccaagccatccacaccatcgagtactgcctgggctgcatttcaaacacagcctcctacctgcggctctgggccctcagcctggctcatgcacaactgtctgaagtgctctggactatggtgatgaacagcggccttcagacgcgaggctggggaggaatcgtcggggtttttattatttttgccgtatttgctgtcctgacagtagccatccttctgatcatggagggcctctctgctttcctgcacgccctgcgactgcactgggttgagttccagaacaagttctatgtcggggatggttacaagttttctccattctcctttaaacacatcctggatggcacagccgaggagtaggctgagggctgcacctcccacggtggtcaccatgccaatgaaggaagttcagtcttgtctttgatatcagcccctgcaaggcgctcaatgggaaggttgttcttggctcacctgaagcatgaaactgtgtattatttggacgtcagcctgtggatttgatacgacttaaccacgtcagaggaaggactttggcaagtgatattgtcttcatgtggggtattaattctcaaataataaagtaattgacaaatgaggggagaatgctaaacagatgtcttcttgcaatattttaaatattgtatttgagaaaataaacatctgagtcattca

SEQ ID NO: 286614 - DNA, 1094 bp, Homo sapiens
ctgggactccttttccagtggccaaagacgcagttattctaggataggctggccatctaactaaagtcagcaaacgatgtcttagcagaaaaggggatgcagaatgctttgcagcaagaactcacctgtttcctttggaatatattaaacacaggtttcgagccactgtctacccttgcccagagcctgcggtggagcgcagagagatgttggagagcgtcaatgtgaggctggaagatttaatcaccgtcataacacaaacagagtctcaccgccagcgcctgctgcaggaagccgctgccaactggcactcctggctcatcaaggtgcagaagatgaaagctgtctaccacatcctgaacatgtgcaacatcgacgtcacccagcagtgtgtcatcgccgagatctggttcccggtggcagatgccacacgtatcaagagggcactggagcaaggcatggaactaagtggctcctccatggcccccatcatgaccacagtgcaatctaaaacagcccctcccacatttaacaggaccaataaattcacagctggcttccagaatattgttgatgcctatggtgtcggcagctaccgggagataaacccagccatccttctgatcatggagggcctctctgctttcctgcacgccctgcgactgcactgggttgagttccagaacaagttctatgtcggggatggttacaagttttctccattctcctttaaacacatcctggatggcacagccgaggagtaggctgagggctgcacctcccacggtggtcaccatgccaatgaaggaagttcagtcttgtctttgatatcagcccctgcaaggcgctcaatgggaaggttgttcttggctcacctgaagcatgaaactgtgtattatttggacgtcagcctgtggatttgatacgacttaaccacgtcagaggaaggactttggcaagtgatattgtcttcatgtggggtattaattctcaaataataaagtaattgacaaatgaggggagaatgctaaacagatgtcttcttgcaatattttaaatattgtatttgagaaaataaacatctgagtcattca

SEQ ID NO: 286615 - DNA, 320 bp, Homo sapiens
ttctgcagatacccacggggctctggacgaccatggagaagaggtatctgggacgagagcccctgaggaagactccccagtttgtacaaattctagaatggacataggcagtagagctgggtgggtctggagggccccacggggcagtagccctgtcactgctgagtcctgggaagctgtgaaggtctcagggaaggggacctactagctagtctaagaggatcagaacagctatttagcaaccaatctgggcacattttaatatttctagtccaagtaccgctgcatctgtatgtgtcaggtgaatatcagcctcggat

SEQ ID NO: 286616 - DNA, 2285 bp, Homo sapiens
ctgggactccttttccagtggccaaagacgcagttattctaggataggctggccatctaactaaagtcagcaaacgatgtcttagcagaaaaggggatgcagaatgctttgcagcaagaactcacctgtttcctttggaatatattaaacacaggtttcgagccactgtctacccttgcccagagcctgcggtggagcgcagagagatgttggagagcgtcaatgtgaggctggaagatttaatcaccgtcataacacaaacagagtctcaccgccagcgcctgctgcaggaagccgctgccaactggcactcctggctcatcaaggtgcagaagatgaaagctgtctaccacatcctgaacatgtgcaacatcgacgtcacccagcagtgtgtcatcgccgagatctggttcccggtggcagatgccacacgtatcaagagggcactggagcaaggcatggaactaagtggctcctccatggcccccatcatgaccacagtgcaatctaaaacagcccctcccacatttaacaggaccaataaattcacagctggcttccagaatattgttgatgcctatggtgtcggcagctaccgggagataaacccagccccctacaccatcatcactttccccttcctgttcgctgtgatgtttggagactgtggtcatggaaccgtgatgctcctggctgcactttggatgattctgaatgagagacgcttgctctcccagaagacagacaatgagatttggaacaccttcttccacgggcgctatctgatcctacttatgggcatcttctccatctacacgggtttgatctacaatgactgcttctccaagtccttgaacatctttggctcttcttggagtgtccaacccatgttcagaaacggcacatggaatactcatgtaatggaggaaagtctatatctgcagctggacccagccataccaggagtgtattttggaaatccatacccgtttgggattgatccgatttggaacttggcttcaaacaaactcacatttctgaactcgtataaaatgaagatgtcggtgatcctgggaattgtccagatggtttttggtgtcatcctcagccttttcaatcacatatacttcagaagaactctcaacatcattctgcaatttatccctgagatgatttttatcctgtgtctgtttggatacctggttttcatgatcattttcaaatggtgctgctttgacgtccacgtatctcagcacgcccccagcatcctcatccacttcatcaacatgtttctgtttaactacagtgactcttccaacgcacccctctacaaacatcagcaagaagtccaaagtttctttgtggttatggctttgatttctgtgccgtggatgcttctgattaagccgtttattcttagagccagtcatcggaaatcccagctgcaggcatccaggatccaagaagatgccactgagaacattgaaggtgatagctccagcccttctagccgttctggccagaggacttctgcagatacccacggggctctggacgaccatggagaagagttcaactttggagacgtctttgtccaccaagccatccacaccatcgagtactgcctgggctgcatttcaaacacagcctcctacctgcggctctgggccctcagcctggctcatgcacaactgtctgaagtgctctggactatggtgatgaacagcggccttcagacgcgaggctggggaggaatcgtcggggtttttattatttttgccgtatttgctgtcctgacagtagccatccttctgatcatggagggcctctctgctttcctgcacgccctgcgactgcactgggttgagttccagaacaagttctatgtcggggatggttacaagttttctccattctcctttaaacacatcctggatggcacagccgaggagtaggctgagggctgcacctcccacggtggtcaccatgccaatgaaggaagttcagtcttgtctttgatatcagcccctgcaaggcgctcaatgggaaggttgttcttggctcacctgaagcatgaaactgtgtattatttggacgtcagcctgtggatttgatacgacttaaccacgtcagaggaaggactttggcaagtgatattgtcttcatgtggggtattaattctcaaataataaagtaattgacaaatgaggggagaatgctaaacagatgtcttcttgcaatattttaaatattgtatttgagaaaataaacatctgagtcattca

SEQ ID NO: 286617 - DNA, 1532 bp, Homo sapiens
gaaaggcttaaggaaacccgcatgcaaatcgtggagctgtggcagggaatctgaggtgggggccccgaggctgtgctgaggcctcaggcgttgtgtgtctcccctccgcagccccctacaccatcatcactttccccttcctgttcgctgtgatgtttggagactgtggtcatggaaccgtgatgctcctggctgcactttggatgattctgaatgagagacgcttgctctcccagaagacagacaatgagatttggaacttggcttcaaacaaactcacatttctgaactcgtataaaatgaagatgtcggtgatcctgggaattgtccagatggtttttggtgtcatcctcagccttttcaatcacatatacttcagaagaactctcaacatcattctgcaatttatccctgagatgatttttatcctgtgtctgtttggatacctggttttcatgatcattttcaaatggtgctgctttgacgtccacgtatctcagcacgcccccagcatcctcatccacttcatcaacatgtttctgtttaactacagtgactcttccaacgcacccctctacaaacatcagcaagaagtccaaagtttctttgtggttatggctttgatttctgtgccgtggatgcttctgattaagccgtttattcttagagccagtcatcggaaatcccagctgcaggcatccaggatccaagaagatgccactgagaacattgaaggtgatagctccagcccttctagccgttctggccagaggacttctgcagatacccacggggctctggacgaccatggagaagagttcaactttggagacgtctttgtccaccaagccatccacaccatcgagtactgcctgggctgcatttcaaacacagcctcctacctgcggctctgggccctcagcctggctcatgcacaactgtctgaagtgctctggactatggtgatgaacagcggccttcagacgcgaggctggggaggaatcgtcggggtttttattatttttgccgtatttgctgtcctgacagtagccatccttctgatcatggagggcctctctgctttcctgcacgccctgcgactgcactgggttgagttccagaacaagttctatgtcggggatggttacaagttttctccattctcctttaaacacatcctggatggcacagccgaggagtaggctgagggctgcacctcccacggtggtcaccatgccaatgaaggaagttcagtcttgtctttgatatcagcccctgcaaggcgctcaatgggaaggttgttcttggctcacctgaagcatgaaactgtgtattatttggacgtcagcctgtggatttgatacgacttaaccacgtcagaggaaggactttggcaagtgatattgtcttcatgtggggtattaattctcaaataataaagtaattgacaaatgaggggagaatgctaaacagatgtcttcttgcaatattttaaatattgtatttgagaaaataaacatctgagtcattca

SEQ ID NO: 286618 - DNA, 2247 bp, Homo sapiens
ctgggactccttttccagtggccaaagacgcagttattctaggataggctggccatctaactaaagtcagcaaacgatgtcttagcagaaaaggggatgcagaatgctttgcagcaagaactcacctgtttcctttggaatatattaaacacaggtttcgagccactgtctacccttgcccagagcctgcggtggagcgcagagagatgttggagagcgtcaatgtgaggctggaagatttaatcaccgtcataacacaaacagagtctcaccgccagcgcctgctgcaggaagccgctgccaactggcactcctggctcatcaaggtgcagaagatgaaagctgtctaccacatcctgaacatgtgcaacatcgacgtcacccagcagtgtgtcatcgccgagatctggttcccggtggcagatgccacacgtatcaagagggcactggagcaaggcatggaactaagtggctcctccatggcccccatcatgaccacagtgcaatctaaaacagcccctcccacatttaacaggaccaataaattcacagctggcttccagaatattgttgatgcctatggtgtcggcagctaccgggagataaacccagccccctacaccatcatcactttccccttcctgttcgctgtgatgtttggagactgtggtcatggaaccgtgatgctcctggctgcactttggatgattctgaatgagagacgcttgctctcccagaagacagacaatgagatttggaacaccttcttccacgggcgctatctgatcctacttatgggcatcttctccatctacacgggtttgatctacaatgactgcttctccaagtccttgaacatctttggctcttcttggagtgtccaacccatgttcagaaacggcacatggaatactcatgtaatggaggaaagtctatatctgcagctggacccagccataccaggagtgtattttggaaatccatacccgtttgggattgatccgatttggaacttggcttcaaacaaactcacatttctgaactcgtataaaatgaagatgtcggtgatcctgggaattgtccagatggtttttggtgtcatcctcagccttttcaatcacatatacttcagaagaactctcaacatcattctgcaatttatccctgagatgatttttatcctgtgtctgtttggatacctggttttcatgatcattttcaaatggtgctgctttgacgtccacgtatctcagcacgcccccagcatcctcatccacttcatcaacatgtttctgtttaactacagtgactcttccaacgcacccctctacaaacatcagcaagaagtccaaagtttctttgtggttatggctttgatttctgtgccgtggatgcttctgattaagccgtttattcttagagccagtcatcggaaatcccagctgcaggcatccaggatccaagaagatgccactgagaacattgaaggtgatagctccagcccttctagccgttctggccagaggacttctgcagatacccacggggctctggacgaccatggagaagagttcaactttggagacgtctttgtccaccaagccatccacaccatcgagtactgcctgggctgcatttcaaacacagcctcctacctgcggctctgggccctcagcctggctcatgcacaactgtctgaagtgctctggactatggtgatgaacagcggccttcagacgcgaggctggggaggaatcgtcggggtttttattatttttgccgtatttgctgtcctgacagtagccatccttctgatcatggagggcctctctgctttcctgcacgccctgcgactgcactgggttgagttccagaacaagttctatgtcggggatggttacaagttttctccattctcctttaaacacatcctggatggcacagccgaggagtaggctgagggctgcacctcccacggtggtcaccatgccaatgaaggaagttcagtcttgtctttgatatcagcccctgcaaggcgctcaatgggaaggttgttcttggctcacctgaagcatgaaactgtgtattatttggacgtcagcctgtggatttgatacgacttaaccacgtcagaggaaggactttggcaagtgatattgtcttcatgtggggtattaattctcaaataatatgttaccgacaagccccgcccctaattaatgtgaaacgaaacgtttcggaattata

SEQ ID NO: 286619 - DNA, 1292 bp, Homo sapiens
  misc_feature (1)..(3): n is a, c, g, or t
  misc_feature (5)..(5): n is a, c, g, or t
  misc_feature (918)..(918): n is a, c, g, or t
  misc_feature (920)..(920): n is a, c, g, or t
  misc_feature (1067)..(1067): n is a, c, g, or t
nnnanggaactagaatctggggacaactgcttggtgctgggggaatcagagtgcaggccccaggtttgtgctcagaccccacctgcttaattgcctccactaacgtgacagtcttgccggtgcctggaggcccaaagatgatgtagggggctggacgggtggtgcccgtaacaatgtgcctcatggcctgcagctgctctgggtttgactccagactccggtcgtacagcctggcagagggaccaggaatgtgaacttgaagtcatccagtgacccagaggcctccctgactccaccccctgtgcccacactccaagtggctccagaagctccctgcccacagtctcacttgagtttcacatctgagggcagcagcgggacgtcccgaggtgccacaggaaagagcatgggccacagcagccagcgccctgtcagctccagggcacggtgctggactcgcagcggctggcggttgaaggtaaagttcaccttgaaggtcagcccatccacaaagcggctcaggaggctttgggcagagagaggtggtaagagtttgttggggcaggggaggtgggcaataaagggccagaactttctccaccaaccagtgtcccaacccctctttccaagacctctatgcaagttctctagaagaggaagctgccgtagcatctcagggtacccctgaggaaaagtctcctgctctgccccggggtctcatttatctcagggagaaacactcctcctcccctggggtcagaagtctgtagacccttccagcagctcagggttcccccaacacccacctcatggaaaagctcagcttgacacggtccaattccaccttgtgcacaaagcccttatatgtgatggggtcctcctggtgtgtctccgaggacaaaagggcaaacaggtggncnccccgtagcactgaggggcggctctcagtcactccaggaacctatggggtgtgaacacaagcaagcttctgtcccagggatggacgctggagggcccagcccccaggttccccagacctttaagggacaaggactgagactggcctnctaacctaagactcagggagttatgctatccctgcacccctctttcctttcataccagcaggagtcaggggaagaggaagaagacaaatcctccgaagctgcccagagatgccgagcccaggaacccggagcctccagtgcagctgccctcttggccagctcagttcctgctctgcctataaaaatcctgttcatcagttaatcgggttgctaaaaaaataattt

SEQ ID NO: 286620 - DNA, 450 bp, Homo sapiens
cagaagaggtgtgggaagaaagactccggtcgtacagcctggcagagggaccaggaatgtgaacttgaagtcatccagtgacccagaggcctccctgactccaccccctgtgcccacactccaagtggctccagaagctccctgcccacagtctcacttgagtttcacatctgagggcagcagcgggacgtcccgaggtgccacaggaaagagcatgggccacagcagccagcgccctgtcagctccagggcacggtgctggactcgcagcggctggcggttgaaggagtcaggggaagaggaagaagacaaatcctccgaagctgcccagagatgccgagcccaggaacccggagcctccagtgcagctgccctcttggccagctcagttcctgctctgcctataaaaatcctgttcatcagttaatcgggttgctaaaaaaataattt

SEQ ID NO: 286621 - DNA, 464 bp, Homo sapiens
gcagattgttgcaccattagaagctaggttgatccacagacagatggctgaaagtggaaaagaaaaaataaaatggacaaccaccattattattagctcatctcttaagattcctgggttgtaacttacgaatacttccagtacacaacacagtaaatgctattaatcttatgtgcactatagcaaagactacctccaaaccatacatagatagcatttgctacagaatgataacagctaaagcttacatcattgagcaaagtcctgtttggaaaacacttcagaagataaaactgaatagtgattcagttaacccaaattagagtaccaacttaatgtttttctcgaagaatgtgaaaataattagacctgttaaattataatattcaaatatctatttaaagacatttatattaatttgaaataataacatatacaattaaaagtgattttattttaggagt

SEQ ID NO: 286622 - DNA, 744 bp, Homo sapiens
tctcttatttagcacaagtcattcttttatacagagcacttcaaagaactacctaaattattttgttgtgtaggaattccattatagtactttctattccttatgagtttagggcttggacacatgtggtatacttagttattttggttgattttgagtttataacaaaatttcatctctataacaaagtgacattttatattcaattcacctttcctaggagttgcatttttattaatggatactaaggaatgtcttctgtcaactgaagaaatatttctagccaaaattgagaaatttattaacattcaccaaaatagttttttggttttgtctgctgccctccatgggcctgaagaatggaaactgatgttcaggattcagcagagattcctgggttgtaacttacgaatacttccagtacacaacacagtaaatgctattaatcttatgtgcactatagcaaagactacctccaaaccatacatagatagcatttgctacagaatgataacagctaaagcttacatcattgagcaaagtcctgtttggaaaacacttcagaagataaaactgaatagtgattcagttaacccaaattagagtaccaacttaatgtttttctcgaagaatgtgaaaataattagacctgttaaattataatattcaaatatctatttaaagacatttatattaatttgaaataataacatatacaattaaaagtgattttattttaggagt

SEQ ID NO: 286623 - DNA, 587 bp, Homo sapiens
tctcttatttagcacaagtcattcttttatacagagcacttcaaagaactacctaaattattttgttgtgtaggaattccattatagtactttctattccttatgagtttagggcttggacacatgtggtatacttagttattttggttgattttgagtttataacaaaatttcatctctataacaaagtgacattttatattcaattcacctttcctaggagttgcatttttattaatggatactaaggaatgtcttctgtcaactgaagaaatatttctagccaaaattgagaaatttattaacattcaccaaaatagttttttggttttgtctgctgccctccatgggcctgaagaatggaaactgatgttcaggattcagcagaggtatggaagaatagcattatagacttatttttcttatattgtatttatttcagttcttaattcttttaggtaagttttgttttgctagatgatgaacactgtgatgttaacctatcaaatttaatgaaacatgggccaaatagctattctatgaatcgaggtgacagggttcatgatgttgcaagggcttctccaaga

SEQ ID NO: 286624 - DNA, 586 bp, Homo sapiens
gtcctctgcaaagtgtgcccagacacctccaaccccctaggcagacttaggtcttccttgcttttatacttggaacatatccccattaaagcaatttttatatattctactttttggcgtgcatgtttaaaattccttgatagaaactaagtattttcgtgttgactactctagtaactcacacagagtatttagcacaaagatgatcaagagatttgctgaaagaatgaaagtcaggtatttttaaatgtcaccgtgtgaaaacaccttatttctgtaaataatgctgcatctttatatcttcttccagactacctccaaaccatacatagatagcatttgctacagaatgataacagctaaagcttacatcattgagcaaagtcctgtttggaaaacacttcagaagataaaactgaatagtgattcagttaacccaaattagagtaccaacttaatgtttttctcgaagaatgtgaaaataattagacctgttaaattataatattcaaatatctatttaaagacatttatattaatttgaaataataacatatacaattaaaagtgattttattttaggagt

SEQ ID NO: 286625 - DNA, 490 bp, Homo sapiens
cttaattcttttaggtaagttttgttttgctagatgatgaacactgtgatgttaacctatcaaatttaatgaaacatgggccaaatagctattctatgaatcgaggtgacagggttcatgatgttgcaagggcttctccaagaccaagccaaaagtgaacacttttttagtcagtgatgttctggctataaagccatctcaaatcctctgtggagtaaggcagggcatgaatgcatagacaaataacaaacaatagagatttgtctcttctttccactttcttaagagaacagatgtcagcaagttatatgatctgtataacatgaattgtttttcagattcctgggttgtaacttacgaatacttccagtacacaacacagtaaatgctattaatcttatgtgcactatagcaaaggtgagtcacccgtggaatatgacacatacacacatacattttaaggtttttaacttccaattgtcaccctttt

SEQ ID NO: 286626 - DNA, 1285 bp, Homo sapiens
gacggaagcaaaggagccaagaccatggcgaaagccggggataagagcggcagcagcgggaagaaaagtctaaaacggaaagccgctgccgaagaacttcaggaggctgcaggcgctggggatggggcgacggaaaacggggtccaacccccgaaagcggctgcctttccgccaggctttagcatttcggagattaaaaacaaacagcggcgacacttaatgttcacgcggtggaaacagcagcagcggaaggaaaagttggcagctaagaaaaaacttaaaaaagaaagagaggctcttggcgataaggctccaccaaagcctgtacccaagaccattgacaaccagcgagtgtatgatgaaaccacagtagaccctaatgatgaagaggtcgcttatgatgaagctacagatgaatttgcttcttacttcaacaaacagacttctcccaagattctcatcacaacatcagatagacctcatgggagaacagtacgactctgtgaacagctctccacagttataccaaactcacatgtttattacagaagaggactggctctgaaaaaaattattccacagtgcatcgcaagagatttcacagacctgattgttattaatgaagatcgtaaaaccccaaatggacttattttgagtcacttgccaaatggcccaactgctcattttaaaatgagcagtgttcgtcttcgtaaagaaattaagagaagaggcaaggaccccacagaacacatacctgaaataattctgaataattttacaacacggctgggtcattcaattggacgtatgtttgcatctctctttcctcataatcctcaatttatcggaaggcaggttgccacattccacaatcaacgggattacatattcttcagatttcacagatacatattcaggagtgaaaagaaagtgggaattcaggaacttggaccacgttttaccttaaaattaaggtctcttcagaaaggaacctttgattctaaatatggagagtatgaatgggtccataagccccgggaaatggatacaagtagaagaaaattccatttataaagtactgagagaatgatattggattttgctgaacaggcctatcttgaactttggtaaattatttttgacagaatactcttttcaaaatggcatttgctgatttcataaacctttcacgtctggacgaattaccaaatgccatgaattgccactgtgtgtttatgtagaaaatacaaataaaagttattttgatggcttaggtttccttaaa

SEQ ID NO: 286627 - DNA, 801 bp, Homo sapiens
cgcaattaattctttagtcagatctcatcaataattaaaatggtcagtcaatctaggtccccatcagatataaagcccgcgcccatataaaccctacacatcgcacgtcaaataattcgacgtgcgtattatacacctccaaaaactgaatgtaatatttgtgaaatccctatccagtggacctaactgactatttttaaaagaacaaagttgcttttccacaattgcctaaagaagcatcaccagtccccctaaggaccacacaccttaataaatttgcactattatcaaaagccggccggatcattaaactcgaaaagaaagaagataccttcctccccctaaaatcctccataaaaacgaaagacaaggttgccacatccatcaatcagggggataacaaattcctcagatttcacaaatacatattcaggagtgaaaagaaagtgggaattcaggaacttggaccacgttttaccttaaaattaaggtctcttcagaaaggaacctttgattctaaatatggagagtatgaatgggtccataagccccgggaaatggatacaagtagaagaaaattccatttataaagtactgagagaatgatattggattttgctgaacaggcctatcttgaactttggtaaattatttttgacagaatactcttttcaaaatggcatttgctgatttcataaacctttcacgtctggacgaattaccaaatgccatgaattgccactgtgtgtttatgtagaaaatacaaataaaagttattttgatggcttaggtttccttaaa

SEQ ID NO: 286628 - DNA, 1468 bp, Homo sapiens
gacggaagcaaaggagccaagaccatggcgaaagccggggataagagcggcagcagcgggaagaaaagtctaaaacggaaagccgctgccgaagaacttcaggaggctgcaggcgctggggatggggcgacggaaaacggggtccaacccccgaaagcggctgcctttccgccaggctttagcatttcggagattaaaaacaaacagcggcgacacttaatgttcacgcggtggaaacagcagcagcggaaggaaaagttggcagctaagaaaaaacttaaaaaagaaagagaggctcttggcgataaggctccaccaaagcctgtacccaagaccattgacaaccagcgagtgtatgatgaaaccacagtagaccctaatgatgaagaggtcgcttatgatgaagctacagatgaatttgcttcttacttcaacaaacagacttctcccaagattctcatcacaacatcagatagacctcatgggagaacagtacgactctgtgaacagctctccacagttataccaaactcacatgtttattacagaagaggactggctctgaaaaaaattattccacagtgcatcgcaagagatttcacagacctgattgttattaatgaagatcgtaaaaccccaaatggacttattttgagtcacttgccaaatggcccaactgctcattttaaaatgagcagtgttcgtcttcgtaaagaaattaagagaagaggcaaggaccccacagaacacatacctgaaataattctgaataattttacaacacggctgggtcattcaattggacgtatgtttgcatctctctttcctcataatcctcaatttatcggaaggcaggttgccacattccacaatcaacgggattacatattcttcagatttcacagatacatattcaggagtgaaaagaaagtgggaattcaggaacttggaccacgttttaccttaaaattaaggtctcttcagaaaggaacctttgattctaaatatggagagtatgaatgggtccataagccccgggaaatggatacaagtagaagaaaattccatttataaagtactgagagaatgatattggattttgctgaacaggcctatcttgaactttggtaaattatttttgacagaatactcttttcaaaatggcatttgctgatttcataaacctttcacgtctggacgaattaccaaatgccatgaattgccactgtgtgtttatgtagaaaatacaaataaaagttattttgatggcttaggtttccttaaaaaaaaaaaaaaaaaaaaaaaaaaaaaaaaaaaaaaagcagaataaaacaagaaaagaacagaaccgaaaccaaagaccaccaagcacacagaaatgccacagagaaagaacgaagcacacaacccacgcaaaaggagaaacgaaaggagcagagaaaaaaataaaccaacagaagagggagac

SEQ ID NO: 286629 - DNA, 1205 bp, Homo sapiens
gacggaagcaaaggagccaagagcctctctttctttttttaagttttttcttagctgccaacttttccttccgcaagcggctgcctttccgccaggctttagcatttcggagattaaaaacaaacagcggcgacacttaatgttcacgcggtggaaacagcagcagcggaaggaaaagttggcagctaagaaaaaacttaaaaaagaaagagaggctcttggcgataaggctccaccaaagcctgtacccaagaccattgacaaccagcgagtgtatgatgaaaccacagtagaccctaatgatgaagaggtcgcttatgatgaagctacagatgaatttgcttcttacttcaacaaacagacttctcccaagattctcatcacaacatcagatagacctcatgggagaacagtacgactctgtgaacagctctccacagttataccaaactcacatgtttattacagaagaggactggctctgaaaaaaattattccacagtgcatcgcaagagatttcacagacctgattgttattaatgaagatcgtaaaaccccaaatggacttattttgagtcacttgccaaatggcccaactgctcattttaaaatgagcagtgttcgtcttcgtaaagaaattaagagaagaggcaaggaccccacagaacacatacctgaaataattctgaataattttacaacacggctgggtcattcaattggacgtatgtttgcatctctctttcctcataatcctcaatttatcggaaggcaggttgccacattccacaatcaacgggattacatattcttcagatttcacagatacatattcaggagtgaaaagaaagtgggaattcaggaacttggaccacgttttaccttaaaattaaggtctcttcagaaaggaacctttgattctaaatatggagagtatgaatgggtccataagccccgggaaatggatacaagtagaagaaaattccatttataaagtactgagagaatgatattggattttgctgaacaggcctatcttgaactttggtaaattatttttgacagaatactcttttcaaaatggcatttgctgatttcataaacctttcacgtctggacgaattaccaaatgccatgaattgccactgtgtgtttatgtagaaaatacaaataaaagttattttgatggcttaggtttccttaaa

SEQ ID NO: 286630 - DNA, 428 bp, Homo sapiens
atgaatatgtaccacataagatttttattcttttttgaaaactattcaaaatttttgttattttgttttgcagagaacagtacgactctgtgaacagctctccacagttataccaaactcacatgtttattacagaagaggactggctctgaaaaaaattattccacagtgcatcgcaagagatttcacagacctgattgttattaatgaagatcgtaaaaccccaagtatcctttttttttttaaggaggttttcctgtcctctccctcaccccccttaaaaatatatttaaaagaataaggaaatattgcctataactttcagaaaataatttttttatcagaaaattgtatctctttccaagagtctataaactgatttttcctttgtattcaccaaacatttatcaggcacatgctacagccaa

SEQ ID NO: 286631 - DNA, 1793 bp, Homo sapiens
gacggaagcaaaggagccaagaccatggcgaaagccggggataagagcggcagcagcgggaagaaaagtctaaaacggaaagccgctgccgaagaacttcaggaggctgcaggcgctggggatggggcgacggaaaacggggtccaacccccgaaagcggctgcctttccgccaggctttagcatttcggagattaaaaacaaacagcggcgacacttaatgttcacgcggtggaaacagcagcagcggaaggaaaagttggcagctaagaaaaaacttaaaaaagaaagagaggctcttggcgataaggctccaccaaagcctgtacccaagaccattgacaaccagcgagtgtatgatgaaaccacagtagaccctaatgatgaagaggtcgcttatgatgaagctacagatgaatttgcttcttacttcaacaaacagacttctcccaagattctcatcacaacatcagatagacctcatgggagaacagtacgactctgtgaacagctctccacagttataccaaactcacatgtttattacagaagaggactggctctgaaaaaaattattccacagtgcatcgcaagagatttcacagacctgattgttattaatgaagatcgtaaaaccccaaatggacttattttgagtcacttgccaaatggcccaactgctcattttaaaatgagcagtgttcgtcttcgtaaagaaattaagagaagaggcaaggaccccacagaacacatacctgaaataattctgaataattttacaacacggctgggtcattcaattggacgtatgtttgcatctctctttcctcataatcctcaatttatcggaaggcaggttgccacattccacaatcaacgggattacatattcttcagatttcacagatacatattcaggagtgaaaagaaagtgggaattcaggaacttggaccacgttttaccttaaaattaaggtctcttcagaaaggaacctttgattctaaatatggagagtatgaatgggtccataagccccgggaaatggatacaagtagaagaaaattccatttataaagtactgagagaatgatattggattttgctgaacaggcctatcttgaactttggtaaattatttttgacagaatactcttttcaaaatggcatttgctgatttcataaacctttcacgtctggacgaattaccaaatgccatgaattgccactgtgtgtttatgtagaaaatacaaataaaagttattttgatggcttaggtttccttaaacttagttctcttgtttttgggtaactgtgaataattaagttggaatcaagattcagattaactttcctatttgcatagaacacatgagaggaataaaatggttggtaaatattggctaacccttgatttttataccagattaaccttggattcccagtgtctggcacagttttaatagcttaaatggaggccaggtttctggatgttttaacattctcttaagccttcagaagggtaaaaaatttaaagcaaaatgatctaccagggtttaaagcaaagttgcaaattactgaagctaatctttgcttcctgattttgaggtttttggttttttgtgcccacgttgtggggagctcttttttacctcattacatggtgctgtagtactccattcaggcactgaaacaaagttaaccctataagtaactcatggatggaaacccgtagaacttaacagcctcctcctgaccttaaaagaataaaggttcacagtttacctttaattccc

SEQ ID NO: 286632 - DNA, 908 bp, Homo sapiens
gacggaagcaaaggagccaagaccatggcgaaagccggggataagagcggcagcagcgggaagaaaagtctaaaacggaaagccgctgccgaagaacttcaggaggctgcaggcgctggggatggggcgacggaaaacggggtccaacccccgaaagcggctgcctttccgccaggctttagcatttcggagattaaaaacaaacagcggcgacacttaatgttcacgcggtggaaacagcagcagcggaaggaaaagttggcagctaagaaaaaacttaaaaaagaaagagaggctcttggcgataaggctccaccaaagcctgtacccaagaccattgacaaccagcgagtgtatgatgaaaccacagtagaccctaatgatgaagaggtcgcttatgatgaagctacagatgaatttgcttcttacttcaacaaacagacttctcccaagattctcatcacaacatcagatagacctcatgggagaacagtacgactctgtgaacagctctccacagttataccaaactcacatgtttattacagaagaggactggctctgaaaaaaattattccacagtgcatcgcaagagatttcacagacctgattgttattaatgaagatcgtaaaaccccaaatggacttattttgagtcacttgccaaatggcccaactgctcattttaaaatgagcagtgttcgtcttcgtaaagaaattaagagaagaggcaaggaccccacagaacacatacctgaaataattctgaataattttacaacacggctgggtcattcaattggacgtatgtttgcatctctctttcctcataatcctcaatttatcggaaggcaggttgcccacaattttccccccacaaccccccaaaaaaaaattttttttccccc

SEQ ID NO: 286633 - DNA, 1394 bp, Homo sapiens
  misc_feature (105)..(105): n is a, c, g, or t
agcaaccatgtactctgcgagcatgggggacaaggcgattgcagcatcagtgatgtgtgcgagacgcaggatggagattagcctcgcgccaccccgttagtcagnaggcacaatgtacaacgcatcggctgcaggcgtcgtctcgagcgcgtatgcgtggcagaataggactacaccgaggaggtagcaaactcagcggatgatctgcgtttgcacctctatccaggctcgcgtctcctcatcttctactccagcaaggacttcacatcatccaacattcgccgagaggagacgacttcactggtccaaccgctgcgagcgaacaatatatccatcgacacaaggatgcggtgcgtatcatgaacaagaaccgcatttagagatagtgtagtagagttcatgaagccgatatgtgatctaccgaattcattggtccgccggattcattgacaaccagcgagtgtatgatgaaaccacagtagaccctaatgatgaagaggtcgcttatgatgaagctacagatgaatttgcttcttacttcaacaaacagacttctcccaagattctcatcacaacatcagatagacctcatgggagaacagtacgactctgtgaacagctctccacagttataccaaactcacatgtttattacagaagaggactggctctgaaaaaaattattccacagtgcatcgcaagagatttcacagacctgattgttattaatgaagatcgtaaaaccccaaatggacttattttgagtcacttgccaaatggcccaactgctcattttaaaatgagcagtgttcgtcttcgtaaagaaattaagagaagaggcaaggaccccacagaacacatacctgaaataattctgaataattttacaacacggctgggtcattcaattggacgtatgtttgcatctctctttcctcataatcctcaatttatcggaaggcaggttgccacattccacaatcaacgggattacatattcttcagatttcacagatacatattcaggagtgaaaagaaagtgggaattcaggaacttggaccacgttttaccttaaaattaaggtctcttcagaaaggaacctttgattctaaatatggagagtatgaatgggtccataagccccgggaaatggatacaagtagaagaaaattccatttataaagtactgagagaatgatattggattttgctgaacaggcctatcttgaactttggtaaattatttttgacagaatactcttttcaaaatggcatttgctgatttcataaacctttcacgtctggacgaattaccaaatgccatgaattgccactgtgtgtttatgtagaaaatacaaataaaagttattttgatggcttaggtttccttaaa

SEQ ID NO: 286634 - DNA, 2825 bp, Homo sapiens
aaaaaaaaaagaaaaaaaaaaaactcttgtgtagcctgaggcggcggtagcatggagggggagagtacgtcggcggtgctctcgggctttgtgctcggcgcactcgctttccagcacctcaacacggactcggacacggaaggttttcttcttggggaagtaaaaggtgaagccaagaacagcattactgattcccaaatggatgatgttgaagttgtttatacaattgacattcagaaatatattccatgctatcagctttttagcttttataattcttcaggcgaagtaaatgagcaagcactgaagaaaatattatcaaatgtcaaaaagaatgtggtaggttggtacaaattccgtcgtcattcagatcagatcatgacgtttagagagaggctgcttcacaaaaacttgcaggagcatttttcaaaccaagaccttgtttttctgctattaacaccaagtataataacagaaagctgctctactcatcgactggaacattccttatataaacctcaaaaaggactttttcacagggtacctttagtggttgccaatctgggcatgtctgaacaactgggttataaaactgtatcaggttcctgtatgtccactggttttagccgagcagtacaaacacacagctctaaattttttgaagaagatggatccttaaaggaggtacataagataaatgaaatgtatgcttcattacaagaggaattaaagagtatatgcaaaaaagtggaagacagtgaacaagcagtagataaactagtaaaggatgtaaacagattaaaacgagaaattgagaaaaggagaggagcacagattcaggcagcaagagagaagaacatccaaaaagaccctcaggagaacatttttctttgtcaggcattacggaccttttttccaaattctgaatttcttcattcatgtgttatgtctttaaaaaatagacatgtttctaaaagtagctgtaactacaaccaccatctcgatgtagtagacaatctgaccttaatggtagaacacactgacattcctgaagctagtccagctagtacaccacaaatcattaagcataaagccttagacttagatgacagatggcaattcaagagatctcggttgttagatacacaagacaaacgatctaaagcagatactggtagtagtaaccaagataaagcatccaaaatgagcagcccagaaacagatgaagaaattgaaaagatgaagggttttggtgaatattcacggtctcctacattttgatccttttaaccttacaaggagatttttttatttggctgatgggtaaagccaaacatttctattgtttttactatgttgagctacttgcagtaagttcatttgtttttactatgttcacctgtttgcagtaatacacagataactcttagtgcatttacttcacaaagtactttttcaaacatcagatgcttttatttccaaacctttttttcacctttcactaagttgttgaggggaaggcttacacagacacattctttagaattggaaaagtgagaccaggcacagtggctcacacctgtaatcccagcacttagggaagacaagtcaggaggattgattgaagctaggagttagagaccagcctgggcaacgtattgagaccatgtctattaaaaaataaaatggaaaagcaagaatagccttattttcaaaatatggaaagaaatttatatgaaaatttatctgagtcattaaaattctccttaagtgatacttttttagaagtacattatggctagagttgccagataaaatgctggatatcatgcaataaatttgcaaaacatcatctaaaatttaaatttgtcctacatttgtacttgctaaatctggcagccttaattattacacaactataacacaacacaaacagtaatctctcccctagtttagagtcctttgcatgaaatttagcaaatctatcattttgaatacagtacaagcctggtaatccagtgtatttgggataggccagtggaactcagaactgatacatatatacatgtatgtctatcatattcaatgtctattaggtgtaaatcatctcttcatgtaaaagacactactggtttgagggtagactcgtctaggaatattttgtccttctgtgacagcaccactatccatcccaatgtaacatttctacaaagggaagatatcttaaccaggcatacttatatttgctagttggaaaatcattctgaacagttttaattccattctattgaatggattattgtatgagctatttggggatcagatataaatgacaatcacacagaaccacttttattcaacatagataaaatgtgatgagtgttaacattttaaataagcaatctgcttaatggacattggtatgaaggggaagtgtcattctttacctcactcctcaaacacttttctatccaaaggttggtttgagtcagtattggcatcatacaaccacttactgtaaaataagtttattagtggtaacgtgatagaatttattcccgatatctgatgttacaaactttagggtccttgagatatgcaggatccttgtatgtaactggcataaaccctgtaaagagataattaaagttcttgacaaaacataatgagcaaaatttcagctagctcaattcagttgttgaggtattctttcttacccattatttgagctctcttaattgcttttgtgatttctttctgtttcttcccacaaagacctgtaaaataaaaagctttcttattcataaaaaatgtcaatatttaaa

SEQ ID NO: 286635 - DNA, 452 bp, Homo sapiens
acgttgagctcggaagtagttaatgtcctgtagcactttcagtaacttgcagaaagaaagtctaagcatctgaaatacacttccctgctgtgtggtacagttcggagaataccctgctgaacaatgcctagtaatttctgctaagttcattttaagatataacgtctattttactcaaaattgccttaatataggtcgggcgcggtggctcacgcctgtaattccagccctttgggaagccgaggcgggtgaatcacctgagcccacgagttcgagaccatcggggacaacgtagtgagacccggtctctacaaaatctaaacattacaaaattgctctttggcacaatcctaataaaggttggaattggtatgttttatgtatacaatttcagataaccttacaaagtaatacctaataaagaacaaatatatgaccatttaaaatatatg

SEQ ID NO: 286636 - DNA, 3048 bp, Homo sapiens
atttagaatttaagcctagatacttcagcagtttttctataactgaacaaagaaacaaagtagctcttgatggtccagtaaaatgagtctaaccagggactccttacaggttttatatatagtaaactacattttcgtggaatatgagaattacgttaaaagagtaccaactaagaataattttattgttcatggaagatagggtaaatctcaatactgccttatttatacatgtactaatcaaaagagccattaaactgtttttccacactattatactaagcacatttcacagctttacatgtcatctgggcccagtgtggtgactcatacctgtaatcccagcactttgggaggccaaggcaggaggatcactgagcaacattaggagacctcatctctacaaaaaacttaaaaattggtcgggtgtggtgatgggtgcctgtagtcccagctacttgggaggctgaggcaagaggattgcttgagcacgggaggttgaagctgcattattgagccatgatcgcaccactgcactgcagcctgggagactgagtgagaccctgtctcaaaaaaaaaaaaaaacagttgtttcaagtcagtaaattctattttggataagtagtaaagaatgggttttggggggtgtatttttttaaatcttgtaggggacaagtaatctattccagcaggtagatactaatctttcttttcattctaagtttatactctaaagttttattttgtcagactttttcacagggtacctttagtggttgccaatctgggcatgtctgaacaactgggttataaaactgtatcaggttcctgtatgtccactggttttagccgagcagtacaaacacacagctctaaattttttgaagaagatggatccttaaaggaggtacataagataaatgaaatgtatgcttcattacaagaggaattaaagagtatatgcaaaaaagtggaagacagtgaacaagcagtagataaactagtaaaggatgtaaacagattaaaacgagaaattgagaaaaggagaggagcacagattcaggcagcaagagagaagaacatccaaaaagaccctcaggagaacatttttctttgtcaggcattacggaccttttttccaaattctgaatttcttcattcatgtgttatgtctttaaaaaatagacatgtttctaaaagtagctgtaactacaaccaccatctcgatgtagtagacaatctgaccttaatggtagaacacactgacattcctgaagctagtccagctagtacaccacaaatcattaagcataaagccttagacttagatgacagatggcaattcaagagatctcggttgttagatacacaagacaaacgatctaaagcagatactggtagtagtaaccaagataaagcatccaaaatgagcagcccagaaacagatgaagaaattgaaaagatgaagggttttggtgaatattcacggtctcctacattttgatccttttaaccttacaaggagatttttttatttggctgatgggtaaagccaaacatttctattgtttttactatgttgagctacttgcagtaagttcatttgtttttactatgttcacctgtttgcagtaatacacagataactcttagtgcatttacttcacaaagtactttttcaaacatcagatgcttttatttccaaacctttttttcacctttcactaagttgttgaggggaaggcttacacagacacattctttagaattggaaaagtgagaccaggcacagtggctcacacctgtaatcccagcacttagggaagacaagtcaggaggattgattgaagctaggagttagagaccagcctgggcaacgtattgagaccatgtctattaaaaaataaaatggaaaagcaagaatagccttattttcaaaatatggaaagaaatttatatgaaaatttatctgagtcattaaaattctccttaagtgatacttttttagaagtacattatggctagagttgccagataaaatgctggatatcatgcaataaatttgcaaaacatcatctaaaatttaaatttgtcctacatttgtacttgctaaatctggcagccttaattattacacaactataacacaacacaaacagtaatctctcccctagtttagagtcctttgcatgaaatttagcaaatctatcattttgaatacagtacaagcctggtaatccagtgtatttgggataggccagtggaactcagaactgatacatatatacatgtatgtctatcatattcaatgtctattaggtgtaaatcatctcttcatgtaaaagacactactggtttgagggtagactcgtctaggaatattttgtccttctgtgacagcaccactatccatcccaatgtaacatttctacaaagggaagatatcttaaccaggcatacttatatttgctagttggaaaatcattctgaacagttttaattccattctattgaatggattattgtatgagctatttggggatcagatataaatgacaatcacacagaaccacttttattcaacatagataaaatgtgatgagtgttaacattttaaataagcaatctgcttaatggacattggtatgaaggggaagtgtcattctttacctcactcctcaaacacttttctatccaaaggttggtttgagtcagtattggcatcatacaaccacttactgtaaaataagtttattagtggtaacgtgatagaatttattcccgatatctgatgttacaaactttagggtccttgagatatgcaggatccttgtatgtaactggcataaaccctgtaaagagataattaaagttcttgacaaaacataatgagcaaaatttcagctagctcaattcagttgttgaggtattctttcttacccattatttgagctctcttaattgcttttgtgatttctttctgtttcttcccacaaagacctgtaaaataaaaagctttcttattcataaaaaatgtcaatatttaaa

SEQ ID NO: 286637 - DNA, 2888 bp, Homo sapiens
cgtgcgccggcgcaggccccgcctcctcgctgggccccgcctcgctgccaccacagggtcttgcctccgcgcgccccgccctcgtcctcttgtgtagcctgaggcggcggtagcatggagggggagagtacgtcggcggtgctctcgggctttgtgctcggcgcactcgctttccagcacctcaacacggactcggacacggaaggttttcttcttggggaagtaaaaggtgaagccaagaacagcattactgattcccaaatggatgatgttgaagttgtttatacaattgacattcagaaatatattccatgctatcagctttttagcttttataattcttcaggcgaagtaaatgagcaagcactgaagaaaatattatcaaatgtcaaaaagaatgtggtaggttggtacaaattccgtcgtcattcagatcagatcatgacgtttagagagaggctgcttcacaaaaacttgcaggagcatttttcaaaccaagaccttgtttttctgctattaacaccaagtataataacagaaagctgctctactcatcgactggaacattccttatataaacctcaaaaaggactttttcacagggtacctttagtggttgccaatctgggcatgtctgaacaactgggttataaaactgtatcaggttcctgtatgtccactggttttagccgagcagtacaaacacacagctctaaattttttgaagaagatggatccttaaaggaggtacataagataaatgaaatgtatgcttcattacaagaggaattaaagagtatatgcaaaaaagtggaagacagtgaacaagcagtagataaactagtaaaggatgtaaacagattaaaacgagaaattgagaaaaggagaggagcacagattcaggcagcaagagagaagaacatccaaaaagaccctcaggagaacatttttctttgtcaggcattacggaccttttttccaaattctgaatttcttcattcatgtgttatgtctttaaaaaatagacatgtttctaaaagtagctgtaactacaaccaccatctcgatgtagtagacaatctgaccttaatggtagaacacactgacattcctgaagctagtccagctagtacaccacaaatcattaagcataaagccttagacttagatgacagatggcaattcaagagatctcggttgttagatacacaagacaaacgatctaaagcagatactggtagtagtaaccaagataaagcatccaaaatgagcagcccagaaacagatgaagaaattgaaaagatgaagggttttggtgaatattcacggtctcctacattttgatccttttaaccttacaaggagatttttttatttggctgatgggtaaagccaaacatttctattgtttttactatgttgagctacttgcagtaagttcatttgtttttactatgttcacctgtttgcagtaatacacagataactcttagtgcatttacttcacaaagtactttttcaaacatcagatgcttttatttccaaacctttttttcacctttcactaagttgttgaggggaaggcttacacagacacattctttagaattggaaaagtgagaccaggcacagtggctcacacctgtaatcccagcacttagggaagacaagtcaggaggattgattgaagctaggagttagagaccagcctgggcaacgtattgagaccatgtctattaaaaaataaaatggaaaagcaagaatagccttattttcaaaatatggaaagaaatttatatgaaaatttatctgagtcattaaaattctccttaagtgatacttttttagaagtacattatggctagagttgccagataaaatgctggatatcatgcaataaatttgcaaaacatcatctaaaatttaaatttgtcctacatttgtacttgctaaatctggcagccttaattattacacaactataacacaacacaaacagtaatctctcccctagtttagagtcctttgcatgaaatttagcaaatctatcattttgaatacagtacaagcctggtaatccagtgtatttgggataggccagtggaactcagaactgatacatatatacatgtatgtctatcatattcaatgtctattaggtgtaaatcatctcttcatgtaaaagacactactggtttgagggtagactcgtctaggaatattttgtccttctgtgacagcaccactatccatcccaatgtaacatttctacaaagggaagatatcttaaccaggcatacttatatttgctagttggaaaatcattctgaacagttttaattccattctattgaatggattattgtatgagctatttggggatcagatataaatgacaatcacacagaaccacttttattcaacatagataaaatgtgatgagtgttaacattttaaataagcaatctgcttaatggacattggtatgaaggggaagtgtcattctttacctcactcctcaaacacttttctatccaaaggttggtttgagtcagtattggcatcatacaaccacttactgtaaaataagtttattagtggtaacgtgatagaatttattcccgatatctgatgttacaaactttagggtccttgagatatgcaggatccttgtatgtaactggcataaaccctgtaaagagataattaaagttcttgacaaaacataatgagcaaaatttcagctagctcaattcagttgttgaggtattctttcttacccattatttgagctctcttaattgcttttgtgatttctttctgtttcttcccacaaagacctgtaaaataaaaagctttcttattcataaaaaatgtcaatatttaaa

SEQ ID NO: 286638 - DNA, 2945 bp, Homo sapiens
cccctgggacttctaataccccaacactacaaagctttagattttcagtattcgtaaggaaaggtgtgatacctttcctcactcatcaccagggtcacagccaacagccctataacaaaagacaggttaacaagagaaaagaacgacaaatttatttaatcaaagtttaacacgacataggcgccttcagaaatgaagacctcaagccccaaggaaaactgtctatttttatgcttcacttcgatgaagaatggacaggaaggttttcttcttggggaagtaaaaggtgaagccaagaacagcattactgattcccaaatggatgatgttgaagttgtttatacaattgacattcagaaatatattccatgctatcagctttttagcttttataattcttcaggcgaagtaaatgagcaagcactgaagaaaatattatcaaatgtcaaaaagaatgtggtaggttggtacaaattccgtcgtcattcagatcagatcatgacgtttagagagaggctgcttcacaaaaacttgcaggagcatttttcaaaccaagaccttgtttttctgctattaacaccaagtataataacagaaagctgctctactcatcgactggaacattccttatataaacctcaaaaaggactttttcacagggtacctttagtggttgccaatctgggcatgtctgaacaactgggttataaaactgtatcaggttcctgtatgtccactggttttagccgagcagtacaaacacacagctctaaattttttgaagaagatggatccttaaaggaggtacataagataaatgaaatgtatgcttcattacaagaggaattaaagagtatatgcaaaaaagtggaagacagtgaacaagcagtagataaactagtaaaggatgtaaacagattaaaacgagaaattgagaaaaggagaggagcacagattcaggcagcaagagagaagaacatccaaaaagaccctcaggagaacatttttctttgtcaggcattacggaccttttttccaaattctgaatttcttcattcatgtgttatgtctttaaaaaatagacatgtttctaaaagtagctgtaactacaaccaccatctcgatgtagtagacaatctgaccttaatggtagaacacactgacattcctgaagctagtccagctagtacaccacaaatcattaagcataaagccttagacttagatgacagatggcaattcaagagatctcggttgttagatacacaagacaaacgatctaaagcagatactggtagtagtaaccaagataaagcatccaaaatgagcagcccagaaacagatgaagaaattgaaaagatgaagggttttggtgaatattcacggtctcctacattttgatccttttaaccttacaaggagatttttttatttggctgatgggtaaagccaaacatttctattgtttttactatgttgagctacttgcagtaagttcatttgtttttactatgttcacctgtttgcagtaatacacagataactcttagtgcatttacttcacaaagtactttttcaaacatcagatgcttttatttccaaacctttttttcacctttcactaagttgttgaggggaaggcttacacagacacattctttagaattggaaaagtgagaccaggcacagtggctcacacctgtaatcccagcacttagggaagacaagtcaggaggattgattgaagctaggagttagagaccagcctgggcaacgtattgagaccatgtctattaaaaaataaaatggaaaagcaagaatagccttattttcaaaatatggaaagaaatttatatgaaaatttatctgagtcattaaaattctccttaagtgatacttttttagaagtacattatggctagagttgccagataaaatgctggatatcatgcaataaatttgcaaaacatcatctaaaatttaaatttgtcctacatttgtacttgctaaatctggcagccttaattattacacaactataacacaacacaaacagtaatctctcccctagtttagagtcctttgcatgaaatttagcaaatctatcattttgaatacagtacaagcctggtaatccagtgtatttgggataggccagtggaactcagaactgatacatatatacatgtatgtctatcatattcaatgtctattaggtgtaaatcatctcttcatgtaaaagacactactggtttgagggtagactcgtctaggaatattttgtccttctgtgacagcaccactatccatcccaatgtaacatttctacaaagggaagatatcttaaccaggcatacttatatttgctagttggaaaatcattctgaacagttttaattccattctattgaatggattattgtatgagctatttggggatcagatataaatgacaatcacacagaaccacttttattcaacatagataaaatgtgatgagtgttaacattttaaataagcaatctgcttaatggacattggtatgaaggggaagtgtcattctttacctcactcctcaaacacttttctatccaaaggttggtttgagtcagtattggcatcatacaaccacttactgtaaaataagtttattagtggtaacgtgatagaatttattcccgatatctgatgttacaaactttagggtccttgagatatgcaggatccttgtatgtaactggcataaaccctgtaaagagataattaaagttcttgacaaaacataatgagcaaaatttcagctagctcaattcagttgttgaggtattctttcttacccattatttgagctctcttaattgcttttgtgatttctttctgtttcttcccacaaagacctgtaaaataaaaagctttcttattcataaaaaatgtcaatatttaaa

SEQ ID NO: 286639 - DNA, 3005 bp, Homo sapiens
cgtgcgccggcgcaggccccgcctcctcgctgggccccgcctcgctgccaccacagggtcttgcctccgcgcgccccgccctcgtcctcttgtgtagcctgaggcggcggtagcatggagggggagagtacgtcggcggtgctctcgggctttgtgctcggcgcactcgctttccagcacctcaacacggactcggacacgggtcgggcgcggtggctcacgcctgtaattccagccctttgggaagccgaggcgggtgaatcacctgagcccacgagttcgagaccatcggggacaacgtagtgagacccggtctctacaaaatctaaacattacaaaattgctctttggcacaatcctaataaaggttggaattggtatgttttaaggttttcttcttggggaagtaaaaggtgaagccaagaacagcattactgattcccaaatggatgatgttgaagttgtttatacaattgacattcagaaatatattccatgctatcagctttttagaatgtggtaggttggtacaaattccgtcgtcattcagatcagatcatgacgtttagagagaggctgcttcacaaaaacttgcaggagcatttttcaaaccaagaccttgtttttctgctattaacaccaagtataataacagaaagctgctctactcatcgactggaacattccttatataaacctcaaaaaggactttttcacagggtacctttagtggttgccaatctgggcatgtctgaacaactgggttataaaactgtatcaggttcctgtatgtccactggttttagccgagcagtacaaacacacagctctaaattttttgaagaagatggatccttaaaggaggtacataagataaatgaaatgtatgcttcattacaagaggaattaaagagtatatgcaaaaaagtggaagacagtgaacaagcagtagataaactagtaaaggatgtaaacagattaaaacgagaaattgagaaaaggagaggagcacagattcaggcagcaagagagaagaacatccaaaaagaccctcaggagaacatttttctttgtcaggcattacggaccttttttccaaattctgaatttcttcattcatgtgttatgtctttaaaaaatagacatgtttctaaaagtagctgtaactacaaccaccatctcgatgtagtagacaatctgaccttaatggtagaacacactgacattcctgaagctagtccagctagtacaccacaaatcattaagcataaagccttagacttagatgacagatggcaattcaagagatctcggttgttagatacacaagacaaacgatctaaagcagatactggtagtagtaaccaagataaagcatccaaaatgagcagcccagaaacagatgaagaaattgaaaagatgaagggttttggtgaatattcacggtctcctacattttgatccttttaaccttacaaggagatttttttatttggctgatgggtaaagccaaacatttctattgtttttactatgttgagctacttgcagtaagttcatttgtttttactatgttcacctgtttgcagtaatacacagataactcttagtgcatttacttcacaaagtactttttcaaacatcagatgcttttatttccaaacctttttttcacctttcactaagttgttgaggggaaggcttacacagacacattctttagaattggaaaagtgagaccaggcacagtggctcacacctgtaatcccagcacttagggaagacaagtcaggaggattgattgaagctaggagttagagaccagcctgggcaacgtattgagaccatgtctattaaaaaataaaatggaaaagcaagaatagccttattttcaaaatatggaaagaaatttatatgaaaatttatctgagtcattaaaattctccttaagtgatacttttttagaagtacattatggctagagttgccagataaaatgctggatatcatgcaataaatttgcaaaacatcatctaaaatttaaatttgtcctacatttgtacttgctaaatctggcagccttaattattacacaactataacacaacacaaacagtaatctctcccctagtttagagtcctttgcatgaaatttagcaaatctatcattttgaatacagtacaagcctggtaatccagtgtatttgggataggccagtggaactcagaactgatacatatatacatgtatgtctatcatattcaatgtctattaggtgtaaatcatctcttcatgtaaaagacactactggtttgagggtagactcgtctaggaatattttgtccttctgtgacagcaccactatccatcccaatgtaacatttctacaaagggaagatatcttaaccaggcatacttatatttgctagttggaaaatcattctgaacagttttaattccattctattgaatggattattgtatgagctatttggggatcagatataaatgacaatcacacagaaccacttttattcaacatagataaaatgtgatgagtgttaacattttaaataagcaatctgcttaatggacattggtatgaaggggaagtgtcattctttacctcactcctcaaacacttttctatccaaaggttggtttgagtcagtattggcatcatacaaccacttactgtaaaataagtttattagtggtaacgtgatagaatttattcccgatatctgatgttacaaactttagggtccttgagatatgcaggatccttgtatgtaactggcataaaccctgtaaagagataattaaagttcttgacaaaacataatgagcaaaatttcagctagctcaattcagttgttgaggtattctttcttacccattatttgagctctcttaattgcttttgtgatttctttctgtttcttcccacaaagacctgtaaaataaaaagctttcttattcataaaaaatgtcaatatttaaa

SEQ ID NO: 286640 - DNA, 1922 bp, Homo sapiens
atttagaatttaagcctagatacttcagcagtttttctataactgaacaaagaaacaaagtagctcttgatggtccagtaaaatgagtctaaccagggactccttacaggttttatatatagtaaactacattttcgtggaatatgagaattacgttaaaagagtaccaactaagaataattttattgttcatggaagatagggtaaatctcaatactgccttatttatacatgtactaatcaaaagagccattaaactgtttttccacactattatactaagcacatttcacagctttacatgtcatctgggcccagtgtggtgactcatacctgtaatcccagcactttgggaggccaaggcaggaggatcactgagcaacattaggagacctcatctctacaaaaaacttaaaaattggtcgggtgtggtgatgggtgcctgtagtcccagctacttgggaggctgaggcaagaggattgcttgagcacgggaggttgaagctgcattattgagccatgatcgcaccactgcactgcagcctgggagactgagtgagaccctgtctcaaaaaaaaaaaaaaacagttgtttcaagtcagtaaattctattttggataagtagtaaagaatgggttttggggggtgtatttttttaaatcttgtaggggacaagtaatctattccagcaggtagatactaatctttcttttcattctaagtttatactctaaagttttattttgtcagactttttcacagggtacctttagtggttgccaatctgggcatgtctgaacaactgggttataaaactgtatcaggttcctgtatgtccactggttttagccgagcagtacaaacacacagctctaaattttttgaagaagatggatccttaaaggaggtacataagataaatgaaatgtatgcttcattacaagaggaattaaagagtatatgcaaaaaagtggaagacagtgaacaagcagtagataaactagtaaaggatgtaaacagattaaaacgagaaattgagaaaaggagaggagcacagattcaggcagcaagagagaagaacatccaaaaagaccctcaggagaacatttttctttgtcaggcattacggaccttttttccaaattctgaatttcttcattcatgtgttatgtctttaaaaaatagacatgtttctaaaagtagctgtaactacaaccaccatctcgatgtagtagacaatctgaccttaatggtagaacacactgacattcctgaagctagtccagctagtacaccacaaatcattaagcataaagccttagacttagatgacagatggcaattcaagagatctcggttgttagatacacaagacaaacgatctaaagcagatactggtagtagtaaccaagataaagcatccaaaatgagcagcccagaaacagatgaagaaattgaaaagatgaagggttttggtgaatattcacggtctcctacattttgatccttttaaccttacaaggagatttttttatttggctgatgggtaaagccaaacatttctattgtttttactatgttgagctacttgcagtaagttcatttgtttttactatgttcacctgtttgcagtaatacacagataactcttagtgcatttacttcacaaagtactttttcaaacatcagatgcttttatttccaaacctttttttcacctttcactaagttgttgaggggaaggcttacacagacacattctttagaattggaaaagtgagaccaggcacagtggctcacacctgtaatcccagcacttagggaagacaagtcaggaggattgattgaagctaggagttagagaccagcctgggcaacgtattgagacgggcgtagacttcaccagtacgggatgttaatca

SEQ ID NO: 286641 - DNA, 1114 bp, Homo sapiens
cgtgcgccggcgcaggccccgcctcctcgctgggccccgcctcgctgccaccacagggtcttgcctccgcgcgccccgccctcgtcctcttgtgtagcctgaggcggcggtagcatggagggggagagtacgtcggcggtgctctcgggctttgtgctcggcgcactcgctttccagcacctcaacacggactcggacacggaaggttttcttcttggggaagtaaaaggtgaagccaagaacagcattactgattcccaaatggatgatgttgaagttgtttatacaattgacattcagaaatatattccatgctatcagctttttagcttttataattcttcaggcgaagtaaatgagcaagcactgaagaaaatattatcaaatgtcaaaaagaatgtggtaggttggtacaaattccgtcgtcattcagatcagatcatgacgtttagagagaggctgcttcacaaaaacttgcaggagcatttttcaaaccaagaccttgtttttctgctattaacaccaagtataataacagaaagctgctctactcatcgactggaacattccttatataaacctcaaaaaggactttttcacagggtacctttagtggttgccaatctgggcatgtctgaacaactgggttataaaactgtatcaggttcctgtatgtccactggttttagccgagcagtacaaacacacagctctaaattttttgaagaagatggatccttaaaggaggtacataagataaatgaaatgtatgcttcattacaagaggaattaaagctctactccttttctgaatgtcatcttcatccaggatccaggctgaaggagcagcccttatttgggacatgtcctcatggcataaggcaaagagcaagaaagctagtggattacaggcgtgagccaccgcagctggcccatgagttaatatttcagtttatttctgtatattttcagcgaactaactggcatgataaaagctgtataaatgagaagttacatgtgaaaaagcattttacaacctataaggcttatttataacctacaagtgcttgttactgacatcctccagaaaataaataaaatttatataaaaggc

SEQ ID NO: 286642 - DNA, 397 bp, Homo sapiens
aaaaaaaaaagaaaaaaaaaaaactcttgtgtagcctgaggcggcggtagcatggagggggagagtacgtcggcggtgctctcgggctttgtgctcggcgcactcgctttccagcacctcaacacggactcggacacgggtcgggcgcggtggctcacgcctgtaattccagccctttgggaagccgaggcgggtgaatcacctgagcccacgagttcgagaccatcggggacaacgtagtgagacccggtctctacaaaatctaaacattacaaaattgctctttggcacaatcctaataaaggttggaattggtatgttttatgtatacaatttcagataaccttacaaagtaatacctaataaagaacaaatatatgaccatttaaaatatatg

SEQ ID NO: 286643 - DNA, 2758 bp, Homo sapiens
aaaaaaaaaagaaaaaaaaaaaactcttgtgtagcctgaggcggcggtagcatggagggggagagtacgtcggcggtgctctcgggctttgtgctcggcgcactcgctttccagcacctcaacacggactcggacacggaaggttttcttcttggggaagtaaaaggtgaagccaagaacagcattactgattcccaaatggatgatgttgaagttgtttatacaattgacattcagaaatatattccatgctatcagctttttagaatgtggtaggttggtacaaattccgtcgtcattcagatcagatcatgacgtttagagagaggctgcttcacaaaaacttgcaggagcatttttcaaaccaagaccttgtttttctgctattaacaccaagtataataacagaaagctgctctactcatcgactggaacattccttatataaacctcaaaaaggactttttcacagggtacctttagtggttgccaatctgggcatgtctgaacaactgggttataaaactgtatcaggttcctgtatgtccactggttttagccgagcagtacaaacacacagctctaaattttttgaagaagatggatccttaaaggaggtacataagataaatgaaatgtatgcttcattacaagaggaattaaagagtatatgcaaaaaagtggaagacagtgaacaagcagtagataaactagtaaaggatgtaaacagattaaaacgagaaattgagaaaaggagaggagcacagattcaggcagcaagagagaagaacatccaaaaagaccctcaggagaacatttttctttgtcaggcattacggaccttttttccaaattctgaatttcttcattcatgtgttatgtctttaaaaaatagacatgtttctaaaagtagctgtaactacaaccaccatctcgatgtagtagacaatctgaccttaatggtagaacacactgacattcctgaagctagtccagctagtacaccacaaatcattaagcataaagccttagacttagatgacagatggcaattcaagagatctcggttgttagatacacaagacaaacgatctaaagcagatactggtagtagtaaccaagataaagcatccaaaatgagcagcccagaaacagatgaagaaattgaaaagatgaagggttttggtgaatattcacggtctcctacattttgatccttttaaccttacaaggagatttttttatttggctgatgggtaaagccaaacatttctattgtttttactatgttgagctacttgcagtaagttcatttgtttttactatgttcacctgtttgcagtaatacacagataactcttagtgcatttacttcacaaagtactttttcaaacatcagatgcttttatttccaaacctttttttcacctttcactaagttgttgaggggaaggcttacacagacacattctttagaattggaaaagtgagaccaggcacagtggctcacacctgtaatcccagcacttagggaagacaagtcaggaggattgattgaagctaggagttagagaccagcctgggcaacgtattgagaccatgtctattaaaaaataaaatggaaaagcaagaatagccttattttcaaaatatggaaagaaatttatatgaaaatttatctgagtcattaaaattctccttaagtgatacttttttagaagtacattatggctagagttgccagataaaatgctggatatcatgcaataaatttgcaaaacatcatctaaaatttaaatttgtcctacatttgtacttgctaaatctggcagccttaattattacacaactataacacaacacaaacagtaatctctcccctagtttagagtcctttgcatgaaatttagcaaatctatcattttgaatacagtacaagcctggtaatccagtgtatttgggataggccagtggaactcagaactgatacatatatacatgtatgtctatcatattcaatgtctattaggtgtaaatcatctcttcatgtaaaagacactactggtttgagggtagactcgtctaggaatattttgtccttctgtgacagcaccactatccatcccaatgtaacatttctacaaagggaagatatcttaaccaggcatacttatatttgctagttggaaaatcattctgaacagttttaattccattctattgaatggattattgtatgagctatttggggatcagatataaatgacaatcacacagaaccacttttattcaacatagataaaatgtgatgagtgttaacattttaaataagcaatctgcttaatggacattggtatgaaggggaagtgtcattctttacctcactcctcaaacacttttctatccaaaggttggtttgagtcagtattggcatcatacaaccacttactgtaaaataagtttattagtggtaacgtgatagaatttattcccgatatctgatgttacaaactttagggtccttgagatatgcaggatccttgtatgtaactggcataaaccctgtaaagagataattaaagttcttgacaaaacataatgagcaaaatttcagctagctcaattcagttgttgaggtattctttcttacccattatttgagctctcttaattgcttttgtgatttctttctgtttcttcccacaaagacctgtaaaataaaaagctttcttattcataaaaaatgtcaatatttaaa

SEQ ID NO: 286644 - DNA, 3072 bp, Homo sapiens
cgtgcgccggcgcaggccccgcctcctcgctgggccccgcctcgctgccaccacagggtcttgcctccgcgcgccccgccctcgtcctcttgtgtagcctgaggcggcggtagcatggagggggagagtacgtcggcggtgctctcgggctttgtgctcggcgcactcgctttccagcacctcaacacggactcggacacgggtcgggcgcggtggctcacgcctgtaattccagccctttgggaagccgaggcgggtgaatcacctgagcccacgagttcgagaccatcggggacaacgtagtgagacccggtctctacaaaatctaaacattacaaaattgctctttggcacaatcctaataaaggttggaattggtatgttttaaggttttcttcttggggaagtaaaaggtgaagccaagaacagcattactgattcccaaatggatgatgttgaagttgtttatacaattgacattcagaaatatattccatgctatcagctttttagcttttataattcttcaggcgaagtaaatgagcaagcactgaagaaaatattatcaaatgtcaaaaagaatgtggtaggttggtacaaattccgtcgtcattcagatcagatcatgacgtttagagagaggctgcttcacaaaaacttgcaggagcatttttcaaaccaagaccttgtttttctgctattaacaccaagtataataacagaaagctgctctactcatcgactggaacattccttatataaacctcaaaaaggactttttcacagggtacctttagtggttgccaatctgggcatgtctgaacaactgggttataaaactgtatcaggttcctgtatgtccactggttttagccgagcagtacaaacacacagctctaaattttttgaagaagatggatccttaaaggaggtacataagataaatgaaatgtatgcttcattacaagaggaattaaagagtatatgcaaaaaagtggaagacagtgaacaagcagtagataaactagtaaaggatgtaaacagattaaaacgagaaattgagaaaaggagaggagcacagattcaggcagcaagagagaagaacatccaaaaagaccctcaggagaacatttttctttgtcaggcattacggaccttttttccaaattctgaatttcttcattcatgtgttatgtctttaaaaaatagacatgtttctaaaagtagctgtaactacaaccaccatctcgatgtagtagacaatctgaccttaatggtagaacacactgacattcctgaagctagtccagctagtacaccacaaatcattaagcataaagccttagacttagatgacagatggcaattcaagagatctcggttgttagatacacaagacaaacgatctaaagcagatactggtagtagtaaccaagataaagcatccaaaatgagcagcccagaaacagatgaagaaattgaaaagatgaagggttttggtgaatattcacggtctcctacattttgatccttttaaccttacaaggagatttttttatttggctgatgggtaaagccaaacatttctattgtttttactatgttgagctacttgcagtaagttcatttgtttttactatgttcacctgtttgcagtaatacacagataactcttagtgcatttacttcacaaagtactttttcaaacatcagatgcttttatttccaaacctttttttcacctttcactaagttgttgaggggaaggcttacacagacacattctttagaattggaaaagtgagaccaggcacagtggctcacacctgtaatcccagcacttagggaagacaagtcaggaggattgattgaagctaggagttagagaccagcctgggcaacgtattgagaccatgtctattaaaaaataaaatggaaaagcaagaatagccttattttcaaaatatggaaagaaatttatatgaaaatttatctgagtcattaaaattctccttaagtgatacttttttagaagtacattatggctagagttgccagataaaatgctggatatcatgcaataaatttgcaaaacatcatctaaaatttaaatttgtcctacatttgtacttgctaaatctggcagccttaattattacacaactataacacaacacaaacagtaatctctcccctagtttagagtcctttgcatgaaatttagcaaatctatcattttgaatacagtacaagcctggtaatccagtgtatttgggataggccagtggaactcagaactgatacatatatacatgtatgtctatcatattcaatgtctattaggtgtaaatcatctcttcatgtaaaagacactactggtttgagggtagactcgtctaggaatattttgtccttctgtgacagcaccactatccatcccaatgtaacatttctacaaagggaagatatcttaaccaggcatacttatatttgctagttggaaaatcattctgaacagttttaattccattctattgaatggattattgtatgagctatttggggatcagatataaatgacaatcacacagaaccacttttattcaacatagataaaatgtgatgagtgttaacattttaaataagcaatctgcttaatggacattggtatgaaggggaagtgtcattctttacctcactcctcaaacacttttctatccaaaggttggtttgagtcagtattggcatcatacaaccacttactgtaaaataagtttattagtggtaacgtgatagaatttattcccgatatctgatgttacaaactttagggtccttgagatatgcaggatccttgtatgtaactggcataaaccctgtaaagagataattaaagttcttgacaaaacataatgagcaaaatttcagctagctcaattcagttgttgaggtattctttcttacccattatttgagctctcttaattgcttttgtgatttctttctgtttcttcccacaaagacctgtaaaataaaaagctttcttattcataaaaaatgtcaatatttaaa

SEQ ID NO: 286645 - DNA, 778 bp, Homo sapiens
gattcattttaagcaacgggcggcctccgcctccattgaaggcggggaaataccgcggcgcggacggtagttgctgtggtttccgttctgagctcgcagcttaggagctgaagatcgcggacttagcgttgccgcgtccgagtccggccatcagtggctgcagatccggaggccaggagctcaaccacccttcttcggaacagggccggcctgctgctgtgccctcgacgctcggtgcctgtatctactccggggcctaggtcggctccgggggcggcttaggagaaggccgccggcgagatgttcaaaaacacgttccagagcggcttcctctccatcctctacagcatcggcagcaagcctctgcaaatctgggacaaaaaggtacggaatggccacatcaaaagaatcactgataatgacatccagtccctggtgctagagattgaagggacaaatgtaaggtaggttgccacctctgttctcccagagacatcatatactagggaggcagtacgtcatagaggttaatagcacagactgcggagtcagagtgccggatgtgagtctatctctgccacttagagcttaccatgggcaagttactgaatcccccagaccttagcatactcatctgtacaatgggcagaataatagtacattttccttatagggttattgcgaggagtaaataaatgaatatatataaaacacgtaaagccttgcttagcacatagtaagcacgatgtcagtattagctatattattaaccaaagtg

SEQ ID NO: 286646 - DNA, 1282 bp, Homo sapiens
atccttaattaaattaatcccccccccccccgggtagttgctgtggtttccgttctgagctcgcagcttaggagctgaagatcgcggacttagcgttgccgcgtccgagtccggccatcagtggctgcagatccggaggccaggagctcaaccacccttcttcggaacagggccggcctgctgctgtgccctcgacgctcggtgcctgtatctactccggggcctaggtcggctccgggggcggcttaggagaaggccgccggcgagatgttcaaaaacacgttccagagcggcttcctctccatcctctacagcatcggcagcaagcctctgcaaatctgggacaaaaaggtacggaatggccacatcaaaagaatcactgataatgacatccagtccctggtgctagagattgaagggacaaatgtaagcaccacatatatcacatgccctgcagaccccaagaagacgctgggaattaaacttcctttccttgtcatgattatcaaaaacctgaagaagtattttaccttcgaagtgcaggtactagatgacaagaatgtgcgtcgtcgctttcgggcaagtaactaccagagcaccacccgggtcaaacccttcatctgcaccatgcccatgcggctggatgacggctggaaccagattcagttcaacttgctagacttcacacggcgagcatacggcaccaattacatcgagaccctcagagtgcagatccatgcaaattgtcgcatccgacgggtttacttctcagacagactctactcagaagatgagctgccggcagagttcaaactgtatctcccagttcagaacaaggcaaagcaataactggaattgtgactcgagggatagacccctggatgtgactcttctttttaaaaggaaactatgtggaggacgatgcaaaaacatatttatcttagtttgctctgctgtagttctgttatttatacttggtgttgcttgtcatggacaccggtgaacatgccgtaactctgtgactgcattgtaagtgcagtgggggtaagcagtcctgtgagtggcgcatgaacgctggagcttattccgccgcctgccccagtgtggggggagatacctttaccatgaacttacagaattaaagatggcccataaggaattccagaccaatatttcttcctgcggtttattctatgttttatatattatctaaatatatgtatatgctgtgtcatactcataatctggaaatgaataaagtgatatattcctggtttgtaaa

SEQ ID NO: 286647 - DNA, 1438 bp, Homo sapiens
gattcattttaagcaacgggcggcctccgcctccattgaaggcggggaaataccgcggcgcggacggtagttgctgtggtttccgttctgagctcgcagcttaggagctgaagatcgcggacttagcgttgccgcgtccgagtccggccatcagtggctgcagatccggaggccaggagctcaaccacccttcttcggaacagggccggcctgctgctgtgccctcgacgctcggtgcctgtatctactccggggcctaggtcggctccgggggcggcttaggagaaggccgccggcgagatgttcaaaaacacgttccagagcggcttcctctccatcctctacagcatcggcagcaagcctctgcaaatctgggacaaaaaggtacggaatggccacatcaaaagaatcactgataatgacatccagtccctggtgctagagattgaagggacaaatgtaagcaccacatatatcacatgccctgcagaccccaagaagacgctgggaattaaacttcctttccttgtcatgattatcaaaaacctgaagaagtattttaccttcgaagtgcaggtactagatgacaagaatgtgcgtcgtcgctttcgggcaagtaactaccagagcaccacccgggtcaaacccttcatctgcaccatgcccatgcggctggatgacggctggaaccagattcagttcaacttgctagacttcacacggcgagcatacggcaccaattacatcgagaccctcagagtgcagatccatgcaaattgtcgcatccgacgggtttacttctcagacagactctactcagaagatgagctgccggcagagttcaaactgtatctcccagttcagaacaaggcaaagcaataactggaattgtgactcgagggatagacccctggatgtgactcttctttttaaaaggaaactatgtggaggacgatgcaaaaacatatttatcttagtttgctctgctgtagttctgttatttatacttggtgttgcttgtcatggacaccggtgaacatgccgtaactctgtgactgcattgtaagtgcagtgggggtaagcagtcctgtgagtggcgcatgaacgctggagcttattccgccgcctgccccagtgtggggggagatacctttaccatgaacttacagaattaaagatggcccataaggaattccagaccaatatttcttcctgcggtttattctatgttttatatattatctaaatatatgtatatgctgtgtcatactcataatctggaaatgaataaagtgatatattcctggtttgtaaaaaaaaaaaaaaaatttgctataaaatgagaagtctcactgatagaggttctttattgctcattttttaaaaaatggactcttgaaatctgttaaaataaaattgtacatttggaaaaaaaaaa

SEQ ID NO: 286648 - DNA, 1453 bp, Homo sapiens
gattcattttaagcaacgggcggcctccgcctccattgaaggcggggaaataccgcggcgcggacggtagttgctgtggtttccgttctgagctcgcagcttaggagctgaagatcgcggacttagcgttgccgcgtccgagtccggccatcagtggctgcagatccggaggccaggagctcaaccacccttcttcggaacagggccggcctgctgctgtgccctcgacgctcggtgcctgtatctactccggggcctaggtcggctccgggggcggcttaggagaaggccgccggcgagatgttcaaaaacacgttccagagcggcttcctctccatcctctacagcatcggcagcaagcctctgcaaatctgggacaaaaaggtacggaatggccacatcaaaagaatcactgataatgacatccagtccctggtgctagagattgaagggacaaatgtaagcaccacatatatcacatgccctgcagaccccaagaagacgctgggaattaaacttcctttccttgtcatgattatcaaaaacctgaagaagtattttaccttcgaagtgcaggtactagatgacaagaatgtgcgtcgtcgctttcgggcaagtaactaccagagcaccacccgggtcaaacccttcatctgcaccatgcccatgcggctggatgacggctggaaccagattcagttcaacttgctagacttcacacggcgagcatacggcaccaattacatcgagaccctcagagtgcagaatccatccctaagacaagccaaggagatgccggagatgacgcgtttccagtcctggaagagggcctctagaagattcaggaaaagggggagaacagtcacatttcgcctctcaaaagaagcattgccttgacagatcatccatgcaaattgtcgcatccgacgggtttacttctcagacagactctactcagaagatgagctgccggcagagttcaaactgtatctcccagttcagaacaaggcaaagcaataactggaattgtgactcgagggatagacccctggatgtgactcttctttttaaaaggaaactatgtggaggacgatgcaaaaacatatttatcttagtttgctctgctgtagttctgttatttatacttggtgttgcttgtcatggacaccggtgaacatgccgtaactctgtgactgcattgtaagtgcagtgggggtaagcagtcctgtgagtggcgcatgaacgctggagcttattccgccgcctgccccagtgtggggggagatacctttaccatgaacttacagaattaaagatggcccataaggaattccagaccaatatttcttcctgcggtttattctatgttttatatattatctaaatatatgtatatgctgtgtcatactcataatctggaaatgaataaagtgatatattcctggtttgtaaa

SEQ ID NO: 286649 - DNA, 1792 bp, Homo sapiens
gattcattttaagcaacgggcggcctccgcctccattgaaggcggggaaataccgcggcgcggacggtagttgctgtggtttccgttctgagctcgcagcttaggagctgaagatcgcggacttagcgttgccgcgtccgagtccggccatcagtggctgcagatccggaggccaggagctcaaccacccttcttcggaacagggccggcctgctgctgtgccctcgacgctcggtgcctgtatctactccggggcctaggtcggctccgggggcggcttaggagaaggccgccggcgagatgttcaaaaacacgttccagagcggcttcctctccatcctctacagcatcggcagcaagcctctgcaaatctgggacaaaaaggtacggaatggccacatcaaaagaatcactgataatgacatccagtccctggtgctagagattgaagggacaaatgtaagcaccacatatatcacatgccctgcagaccccaagaagacgctgggaattaaacttcctttccttgtcatgattatcaaaaacctgaagaagtattttaccttcgaagtgcaggtactagatgacaagaatgtgcgtcgtcgctttcgggcaagtaactaccagagcaccacccgggtcaaacccttcatctgcaccatgcccatgcggctggatgacggctggaaccagattcagttcaacttgctagacttcacacggcgagcatacggcaccaattacatcgagaccctcagagtgcagcaggtactgctcctttcccagatagagccctgggttggggatagggcacactgcgtctaatattggcttgtggcccacatagcagaacagtgtgggtttctggcttcagttgccacactgtccagggagctttggcctcacaaaggtccaggaaatattcagaagtcgggtcaggtatagaggtgaatacagcaagtaagacctccctcttgccagaatccatccctaagacaagccaaggagatgccggagatgacgcgtttccagtcctggaagagggcctctagaagattcaggaaaagggggagaacagtcacatttcgcctctcaaaagaagcattgccttgacagatcatccatgcaaattgtcgcatccgacgggtttacttctcagacagactctactcagaagatgagctgccggcagagttcaaactgtatctcccagttcagaacaaggcaaagcaataactggaattgtgactcgagggatagacccctggatgtgactcttctttttaaaaggaaactatgtggaggacgatgcaaaaacatatttatcttagtttgctctgctgtagttctgttatttatacttggtgttgcttgtcatggacaccggtgaacatgccgtaactctgtgactgcattgtaagtgcagtgggggtaagcagtcctgtgagtggcgcatgaacgctggagcttattccgccgcctgccccagtgtggggggagatacctttaccatgaacttacagaattaaagatggcccataaggaattccagaccaatatttcttcctgcggtttattctatgttttatatattatctaaatatatgtatatgctgtgtcatactcataatctggaaatgaataaagtgatatattcctggtttgtaaaaaaaaaaaaaaaatttgctataaaatgagaagtctcactgatagaggttctttattgctcattttttaaaaaatggactcttgaaatctgttaaaataaaattgtacatttggaaaaaaaaaa

SEQ ID NO: 286650 - DNA, 589 bp, Homo sapiens
gcggccgcctactagtactaaattcgcggccgcgtcgacatccatgcaaattgtcgcatccgacgggtttacttctcagacagactctactcagaagatgagctgccggcagagttcaaactgtatctcccagttcagaacaaggcaaagcaataactggaattgtgactcgagggatagacccctggatgtgactcttctttttaaaaggaaactatgtggaggacgatgcaaaaacatatttatcttagtttgctctgctgtagttctgttatttatacttggtgttgcttgtcatggacaccggtgaacatgccgtaactctgtgactgcattgtaagtgcagtgggggtaagcagtcctgtgagtggcgcatgaacgctggagcttattccgccgcctgccccagtgtggggggagatacctttaccatgaacttacagaattaaagatggcccataaggaattccagaccaatatttcttcctgcggtttattctatgttttatatattatctaaatatatgtatatgctgtgtcatactcataatctggaaatgaataaagtgatatattcctggtttgtaaa

SEQ ID NO: 286651 - DNA, 860 bp, Homo sapiens
gattcattttaagcaacgggcggcctccgcctccattgaaggcggggaaataccgcggcgcggacggtagttgctgtggtttccgttctgagctcgcagcttaggagctgaagatcgcggacttagcgttgccgcgtccgagtccggccatcagtggctgcagatccggaggccaggagctcaaccacccttcttcggaacagggccggcctgctgctgtgccctcgacgctcggtgcctgtatctactccggggcctaggtcggctccgggggcggcttaggagaaggccgccggcgagatgttcaaaaacacgttccagagcggcttcctctccatcctctacagcatcggcagcaagcctctgcaaatctgggacaaaaaggtacggaatggccacatcaaaagaatcactgataatgacatccagtccctggtgctagagattgaagggacaaatgtaagcaccacatatatcacatgccctgcagaccccaagaagacgctgggaattaaacttcctttccttgtcatgattatcaaaaacctgaagaagtattttaccttcgaagtgcaggtaagtatgtgtacatgaatgtgtccactcttggctataccaaagtgatagcctttgaactgatgggaaaaagtgaccctacaaagtatctttatccttttgcatgtattcttttctgcttctagtataagcccagtgcagtccttgttatgtaaatttgatattagtaataaaatttaatcaggtttttaaagaaacagcacctagaaaacctagtaatttcaaagtgtcagagttagcgtggtatccatttggggagtgattatttaatagtgggtggctgt

SEQ ID NO: 286652 - DNA, 1315 bp, Homo sapiens
gattcattttaagcaacgggcggcctccgcctccattgaaggcggggaaataccgcggcgcggacggtagttgctgtggtttccgttctgagctcgcagcttaggagctgaagatcgcggacttagcgttgccgcgtccgagtccggccatcagtggctgcagatccggaggccaggagctcaaccacccttcttcggaacagggccggcctgctgctgtgccctcgacgctcggtgcctgtatctactccggggcctaggtcggctccgggggcggcttaggagaaggccgccggcgagatgttcaaaaacacgttccagagcggcttcctctccatcctctacagcatcggcagcaagcctctgcaaatctgggacaaaaaggtacggaatggccacatcaaaagaatcactgataatgacatccagtccctggtgctagagattgaagggacaaatgtaagcaccacatatatcacatgccctgcagaccccaagaagacgctgggaattaaacttcctttccttgtcatgattatcaaaaacctgaagaagtattttaccttcgaagtgcaggtactagatgacaagaatgtgcgtcgtcgctttcgggcaagtaactaccagagcaccacccgggtcaaacccttcatctgcaccatgcccatgcggctggatgacggctggaaccagattcagttcaacttgctagacttcacacggcgagcatacggcaccaattacatcgagaccctcagagtgcagatccatgcaaattgtcgcatccgacgggtttacttctcagacagactctactcagaagatgagctgccggcagagttcaaactgtatctcccagttcagaacaaggcaaagcaataactggaattgtgactcgagggatagacccctggatgtgactcttctttttaaaaggaaactatgtggaggacgatgcaaaaacatatttatcttagtttgctctgctgtagttctgttatttatacttggtgttgcttgtcatggacaccggtgaacatgccgtaactctgtgactgcattgtaagtgcagtgggggtaagcagtcctgtgagtggcgcatgaacgctggagcttattccgccgcctgccccagtgtggggggagatacctttaccatgaacttacagaattaaagatggcccataaggaattccagaccaatatttcttcctgcggtttattctatgttttatatattatctaaatatatgtatatgctgtgtcatactcataatctggaaatgaataaagtgatatattcctggtttgtaaa

SEQ ID NO: 286653 - DNA, 1678 bp, Homo sapiens
gattcattttaagcaacgggcggcctccgcctccattgaaggcggggaaataccgcggcgcggacggtagttgctgtggtttccgttctgagctcgcagcttaggagctgaagatcgcggacttagcgttgccgcgtccgagtccggccatcagtggctgcagatccggaggccaggagctcaaccacccttcttcggaacagggccggcctgctgctgtgccctcgacgctcggtgcctgtatctactccggggcctaggtcggctccgggggcggcttaggagaaggccgccggcgagatgttcaaaaacacgttccagagcggcttcctctccatcctctacagcatcggcagcaagcctctgcaaatctgggacaaaaaggtacggaatggccacatcaaaagaatcactgataatgacatccagtccctggtgctagagattgaagggacaaatgtaagcaccacatatatcacatgccctgcagaccccaagaagacgctgggaattaaacttcctttccttgtcatgattatcaaaaacctgaagaagtattttaccttcgaagtgcaggtactagatgacaagaatgtgcgtcgtcgctttcgggcaagtaactaccagagcaccacccgggtcaaacccttcatctgcaccatgcccatgcggctggatgacggctggaaccagattcagttcaacttgctagacttcacacggcgagcatacggcaccaattacatcgagaccctcagagtgcagatccatgcaaattgtcgcatccgacgggtttacttctcagacagactctactcagaagatgagctgccggcagagttcaaactgtatctcccagttcagaacaaggcaaagcaataactggaattgtgactcgagggatagacccctggatgtgactcttctttttaaaaggaaactatgtggaggacgatgcaaaaacatatttatcttagtttgctctgctgtagttctgttatttatacttggtgttgcttgtcatggacaccggtgaacatgccgtaactctgtgactgcattgtaagtgcagtgggggtaagcagtcctgtgagtggcgcatgaacgctggagcttattccgccgcctgccccagtgtggggggagatacctttaccatgaacttacagaattaaagatggcccataaggaattccagaccaatatttcttcctgcggtttattctatgttttatatattatctaaatatatgtatatgctgtgtcatactcataatctggaaatgaataaagtgatatattcctggtttgtaaaaaaaaaaaaaaaaaaaaaaaaaaaaaaaaagggggggggccactgaacccgggagaaaaacttcacaaaacaacaggagaagggggcgcgggtgcccaaaaagaggaaagagggacaacgagtggccaaaagaagacaacccaaaaggaagaaccggggacaaaagaaacaagcagcaaggacatccaagacacccaaaaacaaacgaccacggagggaaacaaggcagaaagactagagagaaaaaaaacactccaagaagtgggaaatcagaaaaggcaaaaaaaaagagagaaatataaacaaagaggagaacccaaaggaaaaccacaaaactacaaaaataagccccgagacagggag

SEQ ID NO: 286654 - DNA, 1669 bp, Homo sapiens
gattcattttaagcaacgggcggcctccgcctccattgaaggcggggaaataccgcggcgcggacggtagttgctgtggtttccgttctgagctcgcagcttaggagctgaagatcgcggacttagcgttgccgcgtccgagtccggccatcagtggctgcagatccggaggccaggagctcaaccacccttcttcggaacagggccggcctgctgctgtgccctcgacgctcggtgcctgtatctactccggggcctaggtcggctccgggggcggcttaggagaaggccgccggcgagatgttcaaaaacacgttccagagcggcttcctctccatcctctacagcatcggcagcaagcctctgcaaatctgggacaaaaaggtacggaatggccacatcaaaagaatcactgataatgacatccagtccctggtgctagagattgaagggacaaatgtaagcaccacatatatcacatgccctgcagaccccaagaagacgctgggaattaaacttcctttccttgtcatgattatcaaaaacctgaagaagtattttaccttcgaagtgcaggtactagatgacaagaatgtgcgtcgtcgctttcgggcaagtaactaccagagcaccacccgggtcaaacccttcatctgcaccatgcccatgcggctggatgacggctggaaccagattcagttcaacttgctagacttcacacggcgagcatacggcaccaattacatcgagaccctcagagtgcagcaggtactgctcctttcccagatagagccctgggttggggatagggcacactgcgtctaatattggcttgtggcccacatagcagaacagtgtgggtttctggcttcagttgccacactgtccagggagctttggcctcacaaaggtccaggaaatattcagaagtcgggtcaggtatagaggtgaatacagcaagtaagacctccctcttgccagaatccatccctaagacaagccaaggagatgccggagatgacgcgtttccagtcctggaagagggcctctagaagattcaggaaaagggggagaacagtcacatttcgcctctcaaaagaagcattgccttgacagatcatccatgcaaattgtcgcatccgacgggtttacttctcagacagactctactcagaagatgagctgccggcagagttcaaactgtatctcccagttcagaacaaggcaaagcaataactggaattgtgactcgagggatagacccctggatgtgactcttctttttaaaaggaaactatgtggaggacgatgcaaaaacatatttatcttagtttgctctgctgtagttctgttatttatacttggtgttgcttgtcatggacaccggtgaacatgccgtaactctgtgactgcattgtaagtgcagtgggggtaagcagtcctgtgagtggcgcatgaacgctggagcttattccgccgcctgccccagtgtggggggagatacctttaccatgaacttacagaattaaagatggcccataaggaattccagaccaatatttcttcctgcggtttattctatgttttatatattatctaaatatatgtatatgctgtgtcatactcataatctggaaatgaataaagtgatatattcctggtttgtaaa

SEQ ID NO: 286655 - DNA, 1302 bp, Homo sapiens
  misc_feature (119)..(119): n is a, c, g, or t
aggaagcttaggtaagcagcaatactgtgcggactctacgcgttgcacgtgatgctagagtgacggatgatccaagtaggctgtagacttacggaggatccatgggatctactgacctnagctcgcttctgtcagtgcataccagcggaactgagacatagatgcgctgtgcgcgctcagcaggacgtcggtgctgcgcataggtaatcttcacatcactgggagtccttaggtcgtcgatccagtgggggatcgtatctaacgaggaaggccgaccggagcatcatgtactaaaattacgctcccaacacggcttcctctccatcctctacagcatcggcagcaagcctctgcaaatctgggacaaaaaggtacggaatggccacatcaaaagaatcactgataatgacatccagtccctggtgctagagattgaagggacaaatgtaagcaccacatatatcacatgccctgcagaccccaagaagacgctgggaattaaacttcctttccttgtcatgattatcaaaaacctgaagaagtattttaccttcgaagtgcaggtactagatgacaagaatgtgcgtcgtcgctttcgggcaagtaactaccagagcaccacccgggtcaaacccttcatctgcaccatgcccatgcggctggatgacggctggaaccagattcagttcaacttgctagacttcacacggcgagcatacggcaccaattacatcgagaccctcagagtgcagatccatgcaaattgtcgcatccgacgggtttacttctcagacagactctactcagaagatgagctgccggcagagttcaaactgtatctcccagttcagaacaaggcaaagcaataactggaattgtgactcgagggatagacccctggatgtgactcttctttttaaaaggaaactatgtggaggacgatgcaaaaacatatttatcttagtttgctctgctgtagttctgttatttatacttggtgttgcttgtcatggacaccggtgaacatgccgtaactctgtgactgcattgtaagtgcagtgggggtaagcagtcctgtgagtggcgcatgaacgctggagcttattccgccgcctgccccagtgtggggggagatacctttaccatgaacttacagaattaaagatggcccataaggaattccagaccaatatttcttcctgcggtttattctatgttttatatattatctaaatatatgtatatgctgtgtcatactcataatctggaaatgaataaagtgatatattcctggtttgtaaa

SEQ ID NO: 286656 - DNA, 849 bp, Homo sapiens
gtctcagccttgggaaagcaagctgtgggaattcaggtccttgtctggacaaggttgtgtgcttcttccaagacagagctagtgtgatgcttcttctctgtatttcacaggtactagatgacaagaatgtgcgtcgtcgctttcgggcaagtaactaccagagcaccacccgggtcaaacccttcatctgcaccatgcccatgcggctggatgacggctggaaccagattcagttcaacttgctagacttcacacggcgagcatacggcaccaattacatcgagaccctcagagtgcagatccatgcaaattgtcgcatccgacgggtttacttctcagacagactctactcagaagatgagctgccggcagagttcaaactgtatctcccagttcagaacaaggcaaagcaataactggaattgtgactcgagggatagacccctggatgtgactcttctttttaaaaggaaactatgtggaggacgatgcaaaaacatatttatcttagtttgctctgctgtagttctgttatttatacttggtgttgcttgtcatggacaccggtgaacatgccgtaactctgtgactgcattgtaagtgcagtgggggtaagcagtcctgtgagtggcgcatgaacgctggagcttattccgccgcctgccccagtgtggggggagatacctttaccatgaacttacagaattaaagatggcccataaggaattccagaccaatatttcttcctgcggtttattctatgttttatatattatctaaatatatgtatatgctgtgtcatactcataatctggaaatgaataaagtgatatattcctggtttgtaaa

SEQ ID NO: 286657 - DNA, 308 bp, Homo sapiens
gccagctcagtgtggatcagagcaaggctaggacagaccaggcagcagtcatggagaagggtagagcagagaatgcattactacaggactcagagaagaagaggagtcattcttctccatcacagattcctaaaaagattctcagtcacatgacccatgaagtaacagaggatttttctcctcgggatccaagaactgttgttgggaagcaagatggcaggggctgcacttcagtcacaacagcattgtccctacctgaactggaaagggaagatggaaaagaagacatttcagatcctatggacccg

SEQ ID NO: 286658 - DNA, 853 bp, Homo sapiens
agaaatcttacaggcaaaggctattcgacatttgggattcctaagctaatctttttatttttggaagggtgtctttctgagaaaggcagccagaggcacagcaccaacctttctgacagtgtggtcttcacactgttagttctgacaaagggagtcaaggagtcgtccttggaggaggcgatgaggccagtggaagaattgtggctggggacccctccactgctgagggagatgtcgatggactcacagctggtgtggaggctgctgacagactgaaagcccaggccatccttgctaactgcggaggagctgctggcgttggtgccccagggccaagacagccccggcctcttaccagttcctggggtcttcagtgcgcctgccggggctgaagccttcgtccttggcatggtgatgcccacctgagctgtcatgcctcgccgccatgagcctgtctgggagatgacaggattcttcttgcccgacgtgcttttgtcggactcgtcagacacatcagaaggattccgcctccacttggaacctggctccatttttatgccgctgtctgagcctccgtctgatttcttgacatcatcaccagaccacagggaattcctctccacctgtgagtgcttctcagcatcagtctgtggacagagactctctgaattagtccttccccagtcccaggctgggaagcccctcactccaaaggcaaaaatgccaaaacactggagtagttaagggaaaaataagcattactttaaagatgtttggacttttgtactctggttatcttgttagaaagactgattttttttttttggaaaaaaaaataaaaaagtaaataata

SEQ ID NO: 286659 - DNA, 1371 bp, Homo sapiens
  misc_feature (1086)..(1086): n is a, c, g, or t
  misc_feature (1139)..(1139): n is a, c, g, or t
  misc_feature (1149)..(1149): n is a, c, g, or t
  misc_feature (1159)..(1159): n is a, c, g, or t
  misc_feature (1165)..(1165): n is a, c, g, or t
  misc_feature (1175)..(1175): n is a, c, g, or t
  misc_feature (1288)..(1288): n is a, c, g, or t
  misc_feature (1292)..(1292): n is a, c, g, or t
ttccactcccacccgcccagctcgcgccacatacagtccctcaacgcgctcctgccgcgccgccccctccagacagcagcgttccggatcctagacgctttttgacggctggtcctccccagaaaatgcgccgtgtgagcccaaacatggtggggtttacgctggaccccgagcttgcaatctgtgcttgacaaaacacaaacatcgcgtgcctgtctcctccccctgagatcgagtagtaacagccactccaactctccacctccagcttctagcaccagggaccgcctccaccaccccatgtgccaagtggagttcgagctgcgcggccctcaagcagctgaagggtcccgtgagcgatcaggagaagctgctggtctacggcttgtacaaacaggccacccagggcgactgcgacatccccggccctccggcctcagacatcatgacatcaggtcagctgcagttctcactgggaccaataaacaatagaagcaacaaccataaagacttaagaggacaaaggaaaccaaacctcactgtgtgtcttcaagatctgttcacatagttgcaggaagttgctgtagacaaagtacattactaaagaatgaagcccacccaggacatcacagcaacgaaagaactatttctggtaactgtggaccaggtgagagccacactgtagaacagcagtgctgccctctcttctttggcgaatgttatgaagacattctgatgcacttaggatcatgattcatgttaaatgtaaattaattgtaaaaataatacatcttgctccaaaatgtggtgacaatttagaagctgtccacatagccagaccactctgtaaatcacagaacctagaaagtaaaaatgtgccataattaggacagcagaaagtaacagtaaaataaagttttaaaaaaaaaaacagaaaataaggatttatctatttgtatttgcttaagaagaggttacctataggatgcagggggaatgggattgatgggcatggggtatactgtgaaaggaaaataaaatcttgggaccaaattcactaagcgaaaaggaaaagttaagcttggnaattgagtcatggaatatgcaaaaaacttccttttgttcctaaacagataagntacaagacanaaggccacanatctcnccaggtggtntccctcacctgacaatataaattaacagcttatcttcataggtaagggacaaagacaacaccagaaaccatccctcaccagccgagacaaaacatagatgtactgagctgaangcanaactgttcctctgcctgctgctttcactgtaacatatagatttggtgagcagtaaatgtagatttactgagctgaatgc

SEQ ID NO: 286660 - DNA, 1013 bp, Homo sapiens
  misc_feature (728)..(728): n is a, c, g, or t
  misc_feature (781)..(781): n is a, c, g, or t
  misc_feature (791)..(791): n is a, c, g, or t
  misc_feature (801)..(801): n is a, c, g, or t
  misc_feature (807)..(807): n is a, c, g, or t
  misc_feature (817)..(817): n is a, c, g, or t
  misc_feature (930)..(930): n is a, c, g, or t
  misc_feature (934)..(934): n is a, c, g, or t
ccgccgcgcacgcgcagtcctcacgaacgagcgcgccaagcgcacagcgccgccttccggcagagccctcccaccagccctcagatcatgacatcaggtcagctgcagttctcactgggaccaataaacaatagaagcaacaaccataaagacttaagaggacaaaggaaaccaaacctcactgtgtgtcttcaagatctgttcacatagttgcaggaagttgctgtagacaaagtacattactaaagaatgaagcccacccaggacatcacagcaacgaaagaactatttctggtaactgtggaccaggtgagagccacactgtagaacagcagtgctgccctctcttctttggcgaatgttatgaagacattctgatgcacttaggatcatgattcatgttaaatgtaaattaattgtaaaaataatacatcttgctccaaaatgtggtgacaatttagaagctgtccacatagccagaccactctgtaaatcacagaacctagaaagtaaaaatgtgccataattaggacagcagaaagtaacagtaaaataaagttttaaaaaaaaaaacagaaaataaggatttatctatttgtatttgcttaagaagaggttacctataggatgcagggggaatgggattgatgggcatggggtatactgtgaaaggaaaataaaatcttgggaccaaattcactaagcgaaaaggaaaagttaagcttggnaattgagtcatggaatatgcaaaaaacttccttttgttcctaaacagataagntacaagacanaaggccacanatctcnccaggtggtntccctcacctgacaatataaattaacagcttatcttcataggtaagggacaaagacaacaccagaaaccatccctcaccagccgagacaaaacatagatgtactgagctgaangcanaactgttcctctgcctgctgctttcactgtaacatatagatttggtgagcagtaaatgtagatttactgagctgaatgc

SEQ ID NO: 286661 - DNA, 1970 bp, Homo sapiens
  misc_feature (1685)..(1685): n is a, c, g, or t
  misc_feature (1738)..(1738): n is a, c, g, or t
  misc_feature (1748)..(1748): n is a, c, g, or t
  misc_feature (1758)..(1758): n is a, c, g, or t
  misc_feature (1764)..(1764): n is a, c, g, or t
  misc_feature (1774)..(1774): n is a, c, g, or t
  misc_feature (1887)..(1887): n is a, c, g, or t
  misc_feature (1891)..(1891): n is a, c, g, or t
tttggaggatgggggaactcatctaaggcaggcaggtacttatgggccattgcactaaactgggagagcagggggtcctgcgggtgacccttgtgcttcatcacctcccaccagacgtccaggaagaaggccacgtcttcggcagaagtgtcaacggtcacatgttccagaaagcgctctagttctgcatggcagatggtggtgggcagggccatcaggagctggataaagagtccagaagcttccagggatttgagcagctcgaagaggatggtgtggttgatggtggggatcatgttgcccaccgagaagaacaggtcttcctgccaccgtgtctctgtgtcggacggggtcacggggtgcggctgcagaaccttggcccagatgatgatcagggctttcttcttccaggcaaagggctgggagtgtgctgcagccgaggagatctcccttaaggcctccacgatgggccgtccaacacgttcccagtcagactttgttaattctgccagtgccttagggtggaacagctgctcggccagcaagaagcctccatgcagaatagtcatttcttcacagatgttcaagggtcccggttcatgttttgagggagaccaagctttccgtgatgataatgtgatgaaacaattgatgcgccagaacacagcagtttagaaacaatggagcagatggtgtcaaaatcccagccccagaaaggctcacctaaggccgggcaaccaaaatgttcccgggactattctgtacttaaccctggtttctgcttaggggacggtgggacaatatgcatatggatgtctatgtgggatttgttgcaagagcacaacacaccccttgacctatgcaagtgccagagtgtctgagcccagcttctactcctgttaatgatcacaggagcctcatacacaaccattgtgcatggcggctggagtatggagtagtaaatggtatccagaaaggcaggtctacggtggcatatgggatttcctggtacttcttctttaatagaaactatcttcacagatcatgacatcaggtcagctgcagttctcactgggaccaataaacaatagaagcaacaaccataaagacttaagaggacaaaggaaaccaaacctcactgtgtgtcttcaagatctgttcacatagttgcaggaagttgctgtagacaaagtacattactaaagaatgaagcccacccaggacatcacagcaacgaaagaactatttctggtaactgtggaccaggtgagagccacactgtagaacagcagtgctgccctctcttctttggcgaatgttatgaagacattctgatgcacttaggatcatgattcatgttaaatgtaaattaattgtaaaaataatacatcttgctccaaaatgtggtgacaatttagaagctgtccacatagccagaccactctgtaaatcacagaacctagaaagtaaaaatgtgccataattaggacagcagaaagtaacagtaaaataaagttttaaaaaaaaaaacagaaaataaggatttatctatttgtatttgcttaagaagaggttacctataggatgcagggggaatgggattgatgggcatggggtatactgtgaaaggaaaataaaatcttgggaccaaattcactaagcgaaaaggaaaagttaagcttggnaattgagtcatggaatatgcaaaaaacttccttttgttcctaaacagataagntacaagacanaaggccacanatctcnccaggtggtntccctcacctgacaatataaattaacagcttatcttcataggtaagggacaaagacaacaccagaaaccatccctcaccagccgagacaaaacatagatgtactgagctgaangcanaactgttcctctgcctgctgctttcactgtaacatatagatttggtgagcagtaaatgtagatttactgagctgaatgc

SEQ ID NO: 286662 - DNA, 2753 bp, Homo sapiens
  misc_feature (2468)..(2468): n is a, c, g, or t
  misc_feature (2521)..(2521): n is a, c, g, or t
  misc_feature (2531)..(2531): n is a, c, g, or t
  misc_feature (2541)..(2541): n is a, c, g, or t
  misc_feature (2547)..(2547): n is a, c, g, or t
  misc_feature (2557)..(2557): n is a, c, g, or t
  misc_feature (2670)..(2670): n is a, c, g, or t
  misc_feature (2674)..(2674): n is a, c, g, or t
ttccactcccacccgcccagctcgcgccacatacagtccctcaacgcgctcctgccgcgccgccccctccagacagcagcgttccggatcctagacgctttttgacggctggtcctccccagaaaatgcgccgtgtgagcccaaacatggtggggtttacgctggaccccgagcttgcaatctgtgcttgacaaaacacaaacatcgcgtgcctgtctcctccccctgagatcgagtagtaacagccactccaactctccacctccagcttctagcaccagggaccgcctccaccaccccatgtgccaagtggagttcgagctgcgcggccctcaagcagctgaagggtcccgtgagcgatcaggagaagctgctggtctacggcttgtacaaacaggccacccagggcgactgcgacatccccggccctccggcctcagacgtgagagccagggccaagtgggaggcttggagcgcgaaaaaaggggcgtccaagatggacgccatgaggggctacgcggccaaagtggaggagctgacgaagaaggaagtggggggcgtggagcgcgaacaaaggggcgtgcaagatggacgccatgaggggctacgcggccaaagtggaggagctgacgaagaaggaagtggggggcgtggagcgcgaacaaaggggcgtccaagatggacgccatgaggggctacgcggccaaagtggaggagctgacgaagaaggaagtggggggcgtggagcgcgaacaaaggggcgtccaagatggacgccatgaggggctacgcggccaaagtggaggagctgacgaagaaggaagtggggggcgtggagcgcgaacaaaggggcgtccaagatggacgccatgaggggctacgcggccagagtgaggagatgaggaagaaggaggctggctgagggctcctcgggaatggaaagggcttcttagaccttgatggctgaaatgtcctgaaactgtcgcaagcttagccgagacatcaataaatcacttaaactgcatgagagtgactgctgttggaaaggagaaactcggtgactgagtgctggggaggcgtccaaatacacagactaactttttgtatggttttgggtggagttcccagctctcctattacaagagcgtatgtaggtatttggaaggacgagggggacagtgtgctgtggaaatgcccaagatctgagggcaggagaccattctccagtgacagcctcttgggaggttgaggccccagccccttatctcttcaaggctgatttactaataccccagcaccacagaggggagagggactctgtcctcctaaacactaaagtcaagtccaaaagcccccactggaacacagggcctacccggttcatgttttgagggagaccaagctttccgtgatgataatgtgatgaaacaattgatgcgccagaacacagcagtttagaaacaatggagcagatggtgtcaaaatcccagccccagaaaggctcacctaaggccgggcaaccaaaatgttcccgggactattctgtacttaaccctggtttctgcttaggggacggtgggacaatatgcatatggatgtctatgtgggatttgttgcaagagcacaacacaccccttgacctatgcaagtgccagagtgtctgagcccagcttctactcctgttaatgatcacaggagcctcatacacaaccattgtgcatggcggctggagtatggagtagtaaatggtatccagaaaggcaggtctacggtggcatatgggatttcctggtacttcttctttaatagaaactatcttcacagatcatgacatcaggtcagctgcagttctcactgggaccaataaacaatagaagcaacaaccataaagacttaagaggacaaaggaaaccaaacctcactgtgtgtcttcaagatctgttcacatagttgcaggaagttgctgtagacaaagtacattactaaagaatgaagcccacccaggacatcacagcaacgaaagaactatttctggtaactgtggaccaggtgagagccacactgtagaacagcagtgctgccctctcttctttggcgaatgttatgaagacattctgatgcacttaggatcatgattcatgttaaatgtaaattaattgtaaaaataatacatcttgctccaaaatgtggtgacaatttagaagctgtccacatagccagaccactctgtaaatcacagaacctagaaagtaaaaatgtgccataattaggacagcagaaagtaacagtaaaataaagttttaaaaaaaaaaacagaaaataaggatttatctatttgtatttgcttaagaagaggttacctataggatgcagggggaatgggattgatgggcatggggtatactgtgaaaggaaaataaaatcttgggaccaaattcactaagcgaaaaggaaaagttaagcttggnaattgagtcatggaatatgcaaaaaacttccttttgttcctaaacagataagntacaagacanaaggccacanatctcnccaggtggtntccctcacctgacaatataaattaacagcttatcttcataggtaagggacaaagacaacaccagaaaccatccctcaccagccgagacaaaacatagatgtactgagctgaangcanaactgttcctctgcctgctgctttcactgtaacatatagatttggtgagcagtaaatgtagatttactgagctgaatgc

SEQ ID NO: 286663 - DNA, 631 bp, Homo sapiens
tttaaagagacaggctttcattctgttacccaggctggagtacaatggcgagatcatggctcacctgcagccttgaccttctgggctcaagcaattctcctatctcagcctcctgagtagctgggactacaagtgtatgccactatgcctggctaatttttatttttttgtagagacagggtcttgctgtgttgctgagctggtcttgaactcctggcctcccgcctcagtctcccaaagtgctgggattacaggtatgagccactgcaccttctctcctattttctactttgttgatttttaactctcctttctgggaaatttcctcatgttgatttttgaaacctccagctgggtttaaatttttgctactatatttttaatttccaagagttcctttttgttttctgaaaattccttctttaaaaaattgtatcctatacttgtttcatggtggaaataaggttttttgttgttgttgtttttgtttttttgagacagagtttcactcttgttgcccaggctggagtgcaatggtgcaatctcggctcacagcaacctccacctcctgggttcaagcgattctcctgtctcagcctcccgagtatctgggattacaggtacatgccac

SEQ ID NO: 286664 - DNA, 752 bp, Homo sapiens
ggagccctgccagctgggccacccgaggggcgttgcggggctccgggcggggtcgacccggggggctccgtcgggccccaccagccttgcgcctttttcgctcggtctccttggcctcccgctcctgcgacgccgctttccttttctcttgctcccgagctcggacctcggccaggggccccgcccgccagttggtcgcctcctgcagcaccctggaggcccagggccggcggggcggcggctgtggggatcccgggcgcggcccacacctgggacaatgagcaggaacccagagacagggtcttgctgtgttgctgagctggtcttgaactcctggcctcccgcctcagtctcccaaagtgctgggattacagggaatgtgacttcactggacgcagtataaagatcttcagatgtcctcctgccggggattgcagggatcacagaaagaccatcgaggtccaggagctacctgcaagcggagatccctctggacgccccgtgcctcacccagcaaagccggctcacaaccctgcgctctcaaacctctaaaagggcttgaggtgccaataggaaaggaggcccgagattgccacggcatacgtgggccccaaggagggagccaggagtcactgcctgcttgggctaagggtaccgcgtacggaaaggcggcggggacgcggcccagttccaggagatgcgcccaacgaagaagcggaggaacagggtcacgggatagggcagacacccgg

SEQ ID NO: 286665 - DNA, 734 bp, Homo sapiens
actacagtagcagatgataaaaaccaagatggaaagagttactctgcctgaaagaagacacatggttaaaaactgtggagagggaagtgtatgggaggggttacagagcgctagaaaaagactcctgagagtgagggtgggtgcaaacatgtagcaggcaacccgcagcatctgtgggagggtgacagggccctgccacaattggtcaatgcctgctcgccaagaatgagctatgccaaaacccctgcttagagtcgcagagcgggccatgacctaaaattgtccagggacacatcggcctctaacactgcaagatttcctctttcaagcaaacctcaattctcggtcttattaagggaatgtgacttcactggacgcagtataaagatcttcagatgtcctcctgccggggattgcagggatcacagaaagaccatcgaggtccaggagctacctgcaagcggagatccctctggacgccccgtgcctcacccagcaaagccggctcacaaccctgcgctctcaaacctctaaaagggcttgaggtgccaataggaaaggaggcccgagattgccacggcatacgtgggccccaaggagggagccaggagtcactgcctgcttgggctaagggtaccgcgtacggaaaggcggcggggacgcggcccagttccaggagatgcgcccaacgaagaagcggaggaacagggtcacgggatagggcagacacccgg

SEQ ID NO: 286666 - DNA, 387 bp, Homo sapiens
caggtggttgtggcctagcattgtgttaggtggggtttagaaagcatggcatagtggaggagaacggggcacagcttggggtggtaaaggctaggagtagggcgagccctggggctggaattagagcaccctctggaggtgggtgtagacatgtggtggtggcctagcattgtgttaggtggggtttagaaagcatggcatagtggggacattgggagtgggacttgcaaccaagcgtacaggtctatagtgttggggctggacaaagtacagggcacaatggaggatggggcctggaggacaggaggagtcctggtggggtaggactgtggcccagctgtccatccatccctctgtccagtcccacagcattcacccaccgatgtg

SEQ ID NO: 286667 - DNA, 377 bp, Homo sapiens
gcactgttctaaatgctttacatttatttattctcacaatttagcattcccagtttacagctgaggaaattaagcttcaagttgcccaagtttatagaatgagtcaatggcagaggttgaactcagatgacaaaattggggtctggacgtgtgcaaggacttttccaaagtcagctggaaagtctcaaactcctggcttcaaacaatcctcccacctcagtctcctgagttggggttacatgtgtgagccactgcactcatctgcactcagctattcaatttatttttctaatagcctttactaaaaaaaagaaatgtttgtaacagagatttctggggtaaactaaaatggaaaccttccagctacaagcataaaa

SEQ ID NO: 286668 - DNA, 1912 bp, Homo sapiens
gctgccggtaaatctcgcgagaattgatgaagtctcgcggtggctcccggagcctgctgggagagacgtaaggtcggcggagaatgcgcgggtcgagtgctgtagttcgatttttgcgtgtgtgcgttgcttgcggcctttgtgcctttttattctttgcttacctttatgatataaagaccttatttcttacaaggaggaaaagaccgctgacttcagaaacagcgggaaccccagctcgtccccggtaattcaagaggaaacgcttgagcaattactgatgttgtaaactgggatcagaagacatacatggtatcgtatcccaggcaaggcacagtggctcacacctgtaatcccagcactttgggaggctgaagaaggcagatcacttgaggtcaggagttcgagaccagcctggcttacatggtgaaacccatctctactgaacatacaaaaattagctggacatggtggttagctgcacctctactccacgtgttcctcccttcaggtcccaggctgatggagtagcctctgtgtgtttgggatgttgtcagtcataatggtggacacaaaagagattatgacaaaccgtgtattgtctcctacaatttctgctcacagaagtggacaacatcacttctttccacatttcattgaccagagcaagtcatgtgaccaagcctgattcaaaataggctggagcaaggaggagcagcaaacataacattcccagtttacagctgaggaaattaagcttcaagttgcccaagtttatagaatgagtcaatggcagaggttgaactcagatgacaaaattggggtctggacgtgtgcaaggacttttccaaagtcagctggaaaggagctgcttagctgagaggttctggctccaaagtctcctgtgaagttgcagtcaagatgtctgctgggaccccagtcatttgaagccctgtctggggcaggagaatctaggtccaaaatggccgttgcaggagtccttatccacaccatgtgggacctcttcatagatgttcgagtgtcctcatggcatggccactggctttccccaaagtaagcagtccaaaagagggtaagacagagcccacactgtcttttatgaattagccttagaagtctaacacggttacttccaccacattcattagtcgttaggtacagctcacattcatggggaggaaaatcagggcctgtctttagataggagatgtatcaaagaatttgtggacatattttaaaatcacagcactactcttgatgtactaagtcagtgactcccccaggagtctcacagagaattgactccttgcccacctatactacctttgtgggtagagactccagtagtgtgctggttaatgttcaaccagtggctttctagaaaacaaaatgtatggatacatatatatgttctaagttttactgatatgaagaatgtgtagcacagaatttataaataataaaatatacagtattatttattgtaaattccataaaacctgttgtttttcacaaaaggttttagtttatttttcccaaatgcttgtattggtaacattttctgtattacctttttatgtccagacaatcaacaaaactgaaaaagcccagccttgtagcatttgccagttattgtgtaaatgtccccactatggtggatttcaggttaccactatgatatcacagaatgcagaattggaaggagattcacagcagcaccccattatactatattttcaccatacagatgcagtcgatgtaaattacctgaggagcataaataataataaaatgaagttaaataattcggaaatgattttgaaaattgtgttggtttttaatgtaagtttatatgtcagctttaataaaatctgtctttaacaactagctt

SEQ ID NO: 286669 - DNA, 1432 bp, Homo sapiens
gctgccggtaaatctcgcgagaattgatgaagtctcgcggtggctcccggagcctgctgggagagacgtaaggtcggcggagaatgcgcgggtcgagtgctgtagttcgatttttgcgtgtgtgcgttgcttgcggcctttgtgcctttttattctttgcttacctttatgatataaagaccttatttcttacaaggaggaaaagaccgctgacttcagaaacagcgggaaccccagctcgtccccgcattcccagtttacagctgaggaaattaagcttcaagttgcccaagtttatagaatgagtcaatggcagaggttgaactcagatgacaaaattggggtctggacgtgtgcaaggacttttccaaagtcagctggaaaggagctgcttagctgagaggttctggctccaaagtctcctgtgaagttgcagtcaagatgtctgctgggaccccagtcatttgaagccctgtctggggcaggagaatctaggtccaaaatggccgttgcaggagtccttatccacaccatgtgggacctcttcatagatgttcgagtgtcctcatggcatggccactggctttccccaaagtaagcagtccaaaagagggtaagacagagcccacactgtcttttatgaattagccttagaagtctaacacggttacttccaccacattcattagtcgttaggtacagctcacattcatggggaggaaaatcagggcctgtctttagataggagatgtatcaaagaatttgtggacatattttaaaatcacagcactactcttgatgtactaagtcagtgactcccccaggagtctcacagagaattgactccttgcccacctatactacctttgtgggtagagactccagtagtgtgctggttaatgttcaaccagtggctttctagaaaacaaaatgtatggatacatatatatgttctaagttttactgatatgaagaatgtgtagcacagaatttataaataataaaatatacagtattatttattgtaaattccataaaacctgttgtttttcacaaaaggttttagtttatttttcccaaatgcttgtattggtaacattttctgtattacctttttatgtccagacaatcaacaaaactgaaaaagcccagccttgtagcatttgccagttattgtgtaaatgtccccactatggtggatttcaggttaccactatgatatcacagaatgcagaattggaaggagattcacagcagcaccccattatactatattttcaccatacagatgcagtcgatgtaaattacctgaggagcataaataataataaaatgaagttaaataattcggaaatgattttgaaaattgtgttggtttttaatgtaagtttatatgtcagctttaataaaatctgtctttaacaactagctt

SEQ ID NO: 286670 - DNA, 1761 bp, Homo sapiens
gctgccggtaaatctcgcgagaattgatgaagtctcgcggtggctcccggagcctgctgggagagacgtaaggtcggcggagaatgcgcgggtcgagtgctgtagttcgatttttgcgtgtgtgcgttgcttgcggcctttgtgcctttttattctttgcttacctttatgatataaagaccttatttcttacaaggaggaaaagaccgctgacttcagaaacagcgggaaccccagctcgtccccggtaattcaagaggaaacgcttgagcaattactgatgttgtaaactgggatcagaagacatacatggtatcgtatcccaggcaaggcacagtggctcacacctgtaatcccagcactttgggaggctgaagaaggcagatcacttgaggtcaggagttcgagaccagcctggcttacatggtgaaacccatctctactgaacatacaaaaattagctggacatggtgaagtggacaacatcacttctttccacatttcattgaccagagcaagtcatgtgaccaagcctgattcaaaataggctggagcaaggaggagcagcaaacataacattcccagtttacagctgaggaaattaagcttcaagttgcccaagtttatagaatgagtcaatggcagaggttgaactcagatgacaaaattggggtctggacgtgtgcaaggacttttccaaagtcagctggaaaggagctgcttagctgagaggttctggctccaaagtctcctgtgaagttgcagtcaagatgtctgctgggaccccagtcatttgaagccctgtctggggcaggagaatctaggtccaaaatggccgttgcaggagtccttatccacaccatgtgggacctcttcatagatgttcgagtgtcctcatggcatggccactggctttccccaaagtaagcagtccaaaagagggtaagacagagcccacactgtcttttatgaattagccttagaagtctaacacggttacttccaccacattcattagtcgttaggtacagctcacattcatggggaggaaaatcagggcctgtctttagataggagatgtatcaaagaatttgtggacatattttaaaatcacagcactactcttgatgtactaagtcagtgactcccccaggagtctcacagagaattgactccttgcccacctatactacctttgtgggtagagactccagtagtgtgctggttaatgttcaaccagtggctttctagaaaacaaaatgtatggatacatatatatgttctaagttttactgatatgaagaatgtgtagcacagaatttataaataataaaatatacagtattatttattgtaaattccataaaacctgttgtttttcacaaaaggttttagtttatttttcccaaatgcttgtattggtaacattttctgtattacctttttatgtccagacaatcaacaaaactgaaaaagcccagccttgtagcatttgccagttattgtgtaaatgtccccactatggtggatttcaggttaccactatgatatcacagaatgcagaattggaaggagattcacagcagcaccccattatactatattttcaccatacagatgcagtcgatgtaaattacctgaggagcataaataataataaaatgaagttaaataattcggaaatgattttgaaaattgtgttggtttttaatgtaagtttatatgtcagctttaataaaatctgtctttaacaactagctt

SEQ ID NO: 286671 - DNA, 1586 bp, Homo sapiens
gctgccggtaaatctcgcgagaattgatgaagtctcgcggtggctcccggagcctgctgggagagacgtaaggtaattcaagaggaaacgcttgagcaattactgatgttgtaaactgggatcagaagacatacatggtatcgtatcccaggcaaggcacagtggctcacacctgtaatcccagcactttgggaggctgaagaaggcagatcacttgaggtcaggagttcgagaccagcctggcttacatggtgaaacccatctctactgaacatacaaaaattagctggacatggtgaagtggacaacatcacttctttccacatttcattgaccagagcaagtcatgtgaccaagcctgattcaaaataggctggagcaaggaggagcagcaaacataacattcccagtttacagctgaggaaattaagcttcaagttgcccaagtttatagaatgagtcaatggcagaggttgaactcagatgacaaaattggggtctggacgtgtgcaaggacttttccaaagtcagctggaaaggagctgcttagctgagaggttctggctccaaagtctcctgtgaagttgcagtcaagatgtctgctgggaccccagtcatttgaagccctgtctggggcaggagaatctaggtccaaaatggccgttgcaggagtccttatccacaccatgtgggacctcttcatagatgttcgagtgtcctcatggcatggccactggctttccccaaagtaagcagtccaaaagagggtaagacagagcccacactgtcttttatgaattagccttagaagtctaacacggttacttccaccacattcattagtcgttaggtacagctcacattcatggggaggaaaatcagggcctgtctttagataggagatgtatcaaagaatttgtggacatattttaaaatcacagcactactcttgatgtactaagtcagtgactcccccaggagtctcacagagaattgactccttgcccacctatactacctttgtgggtagagactccagtagtgtgctggttaatgttcaaccagtggctttctagaaaacaaaatgtatggatacatatatatgttctaagttttactgatatgaagaatgtgtagcacagaatttataaataataaaatatacagtattatttattgtaaattccataaaacctgttgtttttcacaaaaggttttagtttatttttcccaaatgcttgtattggtaacattttctgtattacctttttatgtccagacaatcaacaaaactgaaaaagcccagccttgtagcatttgccagttattgtgtaaatgtccccactatggtggatttcaggttaccactatgatatcacagaatgcagaattggaaggagattcacagcagcaccccattatactatattttcaccatacagatgcagtcgatgtaaattacctgaggagcataaataataataaaatgaagttaaataattcggaaatgattttgaaaattgtgttggtttttaatgtaagtttatatgtcagctttaataaaatctgtctttaacaactagctt

SEQ ID NO: 286672 - DNA, 714 bp, Homo sapiens
gctgccggtaaatctcgcgagaattgatgaagtctcgcggtggctcccggagcctgctgggagagacgtaaggtcggcggagaatgcgcgggtcgagtgctgtagttcgatttttgcgtgtgtgcgttgcttgcggcctttgtgcctttttattctttgcttacctttatgatataaagaccttatttcttacaaggaggaaaagaccgctgacttcagaaacagcgggaaccccagctcgtccccgcattcccagtttacagctgaggaaattaagcttcaagttgcccaagtttatagaatgagtcaatggcagaggttgaactcagatgacaaaattggggtctggacgtgtgcaaggacttttccaaagtcagctggaaaggagctgcttagctgagaggttctggctccaaagtctcctgtgaagttgcagtcaagatgtctgctgggaccccagtcatttgaagccctgtctggggcaggagaatctaggtccaaaatggccgttgcaggagtccttatccacaccatgtgggacctcttcatagatgttcgagtgtcctcatggcatggccactggctttccccaaacttcaaactatgcatatgggccaggcgcggtagctcatgcctgtaatcccaacactttggaaggtcaaggtgggcagatcatttgaggccaggagtttgagaccagcctggccaacatgg

SEQ ID NO: 286673 - DNA, 1530 bp, Homo sapiens
gggcggggcacttacctctcactgctgctgccgccgcggctgtgcaggcttaggagcggcatggtgcggctggcgtggatggtggcgctgggtttatccccttccttctctctggcgaagcagtggctattgaggatccgctgcagggaggatttcaccatccggccgctggggtccgaaaccaggaaaacctccgctgcgtctctccgcgccgccgccgctgctcgccgttcgcaaaatggcgcctctgccgccgcccgcctttatagatgctgcgcccaggccacgccccccgcgccgccgggaacgcgaccgcacgaggggcagagccgcggggccgccgggaaaaaaagtcgcgcccgcccctcccagcgcctgattggtgaaagggaaagggaaaggaagaggctctctggagattggttgcctggcccgggacctgctgctgctccagccatgtccatgacaaccagagcctgggaggagctggatggcggcctgggcagctgccaggccctggaggaccactctgcgctggccgagacccaggaggacagggcttcagcgacacccaggctggccgactccggcagcgtgccccacgactctcaggtggctgaaggccccagtgtggacaccaggcccaagaagatggaaaaagagcctgccgccagggggaccccaggaacggggaaggagaggctgaaagccggagcgagccctcggagcgtccccgcgcgcaagaaggcgcagaccgcgccgcccctgcagccgccgccgccgcccccggccctgagcgaggagctgccctggggagacctgtcgctcaacaagtgcctggtgctcgcctcgctggtggcgctgctgggctcggctttccagctgtgccgcgacgccgtccctggggaggcagcactccaagcacgtgtgcccgagccctgggtcccgccaagctcagccccgagggagccatcgtcgcccctgcctaagttcgaggccaggcgcctccatcagcgccgcctgcgccccgggcgaggcagaggtcagacccaagattcccgggagtcgggaggctgcagagaacgacgaagaggagcccggcgaggccaccggagaggccgtccgggaggaccgtgtgaccctcgcagaccggggacccaaggagaggcctcggagagaggggaagccgcggaaggagaagccgcggaaggaggagagacctaagaaagagaggccgcggaaagaggagaggccacgggccgccagggagccccgggaagccctaccccagcgctgggagtcacgcgaagggggccaccggccgtgggcacgggactccagggacgccgagcccaggaagaagcaggcctgggtgtccccgaggcgtcccgacgaggagcagcggcctgggagtcgccagaagctccgcgcaggcaaggggcgggactgagccggccccgcgccggagtccaggggccccttctggacgccccgcgactctggcgaaataaagcgagtgctgcggccaaa

SEQ ID NO: 286674 - DNA, 1130 bp, Homo sapiens
acaaggctcagcaaagcggctggcggcctggcccgggacctgctgctgctccagccatgtccatgacaaccagagcctgggaggagctggatggcggcctgggcagctgccaggccctggaggaccactctgcgctggccgagacccaggaggacagggcttcagcgacacccaggctggccgactccggcagcgtgccccacgactctcaggtggctgaaggccccagtgtggacaccaggcccaagaagatggaaaaagagcctgccgccagggggaccccaggaacggggaaggagaggctgaaagccggagcgagccctcggagcgtccccgcgcgcaagaaggcgcagaccgcgccgcccctgcagccgccgccgccgcccccggccctgagcgaggagctgccctggggagacctgtcgctcaacaagtgcctggtgctcgcctcgctggtggcgctgctgggctcggctttccagctgtgccgcgacgccgtccctggggaggcagcactccaagcacgtgtgcccgagccctgggtcccgccaagctcagccccgagggagccatcgtcgcccctgcctaagttcgaggccaggcgcctccatcagcgccgcctgcgccccgggcgaggcagaggtcagacccaagattcccgggagtcgggaggctgcagagaacgacgaagaggagcccggcgaggccaccggagaggccgtccgggaggaccgtgtgaccctcgcagaccggggacccaaggagaggcctcggagagaggggaagccgcggaaggagaagccgcggaaggaggagagacctaagaaagagaggccgcggaaagaggagaggccacgggccgccagggagccccgggaagccctaccccagcgctgggagtcacgcgaagggggccaccggccgtgggcacgggactccagggacgccgagcccaggaagaagcaggcctgggtgtccccgaggcgtcccgacgaggagcagcggcctgggagtcgccagaagctccgcgcaggcaaggggcgggactgagccggccccgcgccggagtccaggggccccttctggacgccccgcgactctggcgaaataaagcgagtgctgcggccaaa

SEQ ID NO: 286675 - DNA, 812 bp, Homo sapiens
gggcggggcacttacctctcactgctgctgccgccgcggctgtgcaggcttaggagcggcatggtgcggctggcgtggatggtggcgctgggtttatccccttccttctctctggcgaagcagtggctattgaggatccgctgcagggaggatttcaccatccggccgctggggtccgaaaccaggaaaacctccgctgcgtctctccgcgccgccgccgctgctcgccgttcgcaaaatggcgcctctgccgccgcccgcctttatagatgctgcgcccaggccacgccccccgcgccgccgggaacgcgaccgcacgaggggcagagccgcggggccgccgggaaaaaaagtcgcgcccgcccctcccagcgcctgattggtgaaagggaaagggaaaggaagaggctctctggagattggttgataaattcagatttttcctgtggaaactgaaacttaccctaaggaaaaacactactcctggcagttaaaattcagaaacacatctcatgtatgaactaaaatgtggatctcccaaggaaaaaacgatttctttggtggtcaagttcggtaaactgtttcgcctgtgaggtaaaatgtggacttacctagcaaaaatatttcccctcctggttaaatccagaaaaaaaatctcaggtatgaactgcactttgcttttaataagcaaagatataactcttggcagtcacatacgggtacatagcttgtgtgtagactaaattatgaatttagcaaaaagttgccactttgcagtgaggtttaataaaatattttttatttcatgtata

SEQ ID NO: 286676 - DNA, 864 bp, Homo sapiens
  misc_feature (8)..(8): n is a, c, g, or t
  misc_feature (31)..(31): n is a, c, g, or t
catcgacnccaatcgtggagagcgctccaangtgacggtacccgttcattcggccattatggccgggtggcctcagaattttcagtagccagtatttctgattaactaagttgaaactcttattagaaactttcagttggtgatattgtattctagaagatataaatgagaggtttggcttcatctcagtttagaaatttattcaaagctaaagatgtatatatacatatacttttgtgtgtatatatacacatatgtgtgtatgcagtttgtcaggttatatatagaatttctattaaggattttttaaatggacaagcaatagggggttgaagtgtttatctgatttgtttaaaattttgtatatcaccaaatttttaaaaagtgatagtcacagtgctaagttatctagttggctactattacaccttaaaaattgagtttacacacacacaattacctgtttatatggtgctcatttgttattctcaaatataatgtgtgaccgtgatatagtgagaaagattctaccaaccactgtttcactactttttagttaaaattgggtatgttcttaatattcattagtgagaatcacaaagtattttgtagaaggcccaaatcacagaataaaggactaagagtggatttgctgacattccatactaatatacattgtttatgctttctttaaaataactagaagaacataaaagaaagagaatctcagaagtagtttgctgctaatatatacatatattgtataaaaaggtatattttggttttgttaaaacccttgttgacttttctacactgaacattttttttaacttgatttaataaaaatgttaattttggaagtgc

SEQ ID NO: 286677 - DNA, 3564 bp, Homo sapiens
cgcggaaggcgccgtgcgccggttgctatacaggccgcacttcacaccccgtgcctccccgcctctcctggctcctccgcccagatccccggcgctcccgcgttcggtgacggccgggtaggctgtaggcagcgcaatgccaagacagagctgctggcggcggcgggcgaatctccctgcaccatgagcctcggctccggccccgttaggggccgataagcacagcgcacgccgccctccatttgccccggggcctcggctgcgaagatagcggcggccggacaggaagctcgaggaaagcgctgggccgggtctctacgaacacgtgaaggaaaagcagctccgtccacaacgccgcttcggggctcctagggagtcgggccccgggccgccaccgtcacctcggccgctgccgctgtcgccatcgccttgtttccccatcccccgccatggccgaggacctctctgcggccacgtcctacaccgaagatgatttctactgccccgtctgtcaggaggtgctcaaaacgcccgtgcggaccacggcctgtcagcacgttttctgtagaaaatgtttcctgactgcaatgagggaaagcggagcacattgtcccctatgtcgtggaaatgtgactagaagagagagagcatgtcctgaacgggccttagaccttgaaaatataatgaggaagttttctggtagctgcagatgctgtgcaaaacagattaaattctatcgcatgagacatcattacaaatcttgtaagaagtatcaggatgaatatggtgtttcttctatcattccaaactttcagatctctcaagattcagtagggaacagcaataggagtgaaacatccacatctgataacacagaaacttaccaagagaatacaagttcttctggtcatcctacttttaagtgtcccctgtgtcaagaatcaaattttaccagacagcgtttactggatcactgtaacagtaatcacctatttcagatagttcctgtgacatgtcctatttgtgtgtctcttccttggggagatcctagccagattaccagaaatttcgttagtcatctaaatcagagacatcaatttgattatggagaatttgtgaatcttcagctagatgaagaaacccaataccaaactgctgttgaagaatcttttcaagtaaacatctgaaggctgtagacatctctgcatctttgtacctgcaagtgccatctttaagggggaaactacatgaagtcaccgttacagtaacttgatgtgtatattaataaaagtaattcagtcattttagtttttgattgaaaataaaggtagggcttctaaaaacttcatcatcttgataagttaaaaaatgaaagttatgacattagctttaaaggtgtaaaaaagatgtttcactaatgtaacggtgaaagagaatccctgttgtactttatctttttgtaatattatttttgaatttttcattattatgttgcttttgaaatttgatgcattcctcccatttactttattattgtacacatttaacacacagtagcaaattttgaacgatgtgattgatataacctaacaaatctgagccagttattattagagttgcagaatagaaacttgaagtgctaaatggaataatccaaaggaaattttttaaatgcaggttctagctgaaaaattcaactataagaaaattgtatttatataacatttactatttttgaagactagtgagatttctgtaataattttaattctttaaaaagtgaaagcttgttgtaaagatattttctttttgttattagaaggaaatacaaagagaaaaatttctttctttcatgggcatttgataatttcagtctttgactgatttgtaagcctagaatatactaagctgaataacagctctttggcctcagaattttcagtagccagtatttctgattaactaagttgaaactcttattagaaactttcagttggtgatattgtattctagaagatataaatgagaggtttggcttcatctcagtttagaaatttattcaaagctaaagatgtatatatacatatacttttgtgtgtatatatacacatatgtgtgtatgcagtttgtcaggttatatatagaatttctattaaggattttttaaatggacaagcaatagggggttgaagtgtttatctgatttgtttaaaattttgtatatcaccaaatttttaaaaagtgatagtcacagtgctaagttatctagttggctactattacaccttaaaaattgagtttacacacacacaattacctgtttatatggtgctcatttgttattctcaaatataatgtgtgaccgtgatatagtgagaaagattctaccaaccactgtttcactactttttagttaaaattgggtatgttcttaatattcattagtgagaatcacaaagtattttgtagaaggcccaaatcacagaataaaggactaagagtggatttgctgacattccatactaatatacattgtttatgctttctttaaaataactagaagaacataaaagaaagagaatctcagaagtagtttgctgctaatatatacatatattgtataaaaaggtatattttggttttgttaaaacccttgttgacttttctacactgaacattttttttaacttgatttaataaaaatgttaattttggaagtgcagttttgtaaaaacctttttcagtcaaacagtaaagactttatttatggattgtaataacaaccacaagaaaagccatacatcttaatgaacatacgcctttgttctgtcattttaaagagtggtgtttactatgtgtgtgcttgagcattttctttcagttacatgggtgtaatttaaaaacagctcctttttaagagacttttgaccatagtgttttccagtttaaagcaataactttcatagtttctttcaaagtttaatacatccaatatgtcaagttaaaccattctgggatttgcaaagtttaatacatccaatatgtcaagttaaaccattctgggatttgcaaagtttaatacatccaatatgtcaagttaaaccattctgggatttgggaacttctttaaaggaaaattgtagtagaggtcatcttgatggaattgtgttttaaagttttgtgaatgagttaaatatcattgatagtcttgtgtgtctcacatatcagctttttcataaggaaaatactttatttgcttttatctgagaatttctcagtatgaaaatgattgtttaaaatttcccctctttttgtcagtgcattgggaatagggatagactttacagatttatggaaattaaatttatggggaaaagtttttatttttaatattacttatagctgagtcagaattaaaggagggaattgtattgatactccaatacctaaatttcacaataccacttaggaaagctatttcaacaaattacagttttattgttaaaacagagtcttatttgagatgtattgctttatttttcaattaaaagtggttttctccta

SEQ ID NO: 286678 - DNA, 3136 bp, Homo sapiens
  misc_feature (2973)..(2973): n is a, c, g, or t
  misc_feature (2981)..(2981): n is a, c, g, or t
cgcggaaggcgccgtgcgccggttgctatacaggccgcacttcacaccccgtgcctccccgcctctcctggctcctccgcccagatccccggcgctcccgcgttcggtgacggccgggtaggctgtaggcagcgcaatgccaagacagagctgctggcggcggcgggcgaatctccctgcaccatgagcctcggctccggccccgttaggggccgataagcacagcgcacgccgccctccatttgccccggggcctcggctgcgaagatagcggcggccggacaggaagctcgaggaaagcgctgggccgggtctctacgaacacgtgaaggaaaagcagctccgtccacaacgccgcttcggggctcctagggagtcgggccccgggccgccaccgtcacctcggccgctgccgctgtcgccatcgccttgtttccccatcccccgccatggccgaggacctctctgcggccacgtcctacaccgaagatgatttctactgccccgtctgtcaggaggtgctcaaaacgcccgtgcggaccacggcctgtcagcacgttttctgtagaaaatgtttcctgactgcaatgagggaaagcggagcacattgtcccctatgtcgtggaaatgtgactagaagagagagagcatgtcctgaacgggccttagaccttgaaaatataatgaggaagttttctggtagctgcagatgctgtgcaaaacagattaaattctatcgcatgagacatcattacaaatcttgtaagaagtatcaggatgaatatggtgtttcttctatcattccaaactttcagatctctcaagattcagtagggaacagcaataggagtgaaacatccacatctgataacacagaaacttaccaagagaatacaagttcttctggtcatcctacttttaagtgtcccctgtgtcaagaatcaaattttaccagacagcgtttactggatcactgtaacagtaatcacctatttcagatagttcctgtgacatgtcctatttgtgtgtctcttccttggggagatcctagccagattaccagaaatttcgttagtcatctaaatcagagacatcaatttgattatggagaatttgtgaatcttcagctagatgaagaaacccaataccaaactgctgttgaagaatcttttcaagtaaacatctgaaggctgtagacatctctgcatctttgtacctgcaagtgccatctttaagggggaaactacatgaagtcaccgttacagtaacttgatgtgtatattaataaaagtaattcagtcattttagtttttgattgaaaataaaggtagggcttctaaaaacttcatcatcttgataagttaaaaaatgaaagttatgacattagctttaaaggtgtaaaaaagatgtttcactaatgtaacggtgaaagagaatccctgttgtactttatctttttgtaatattatttttgaatttttcattattatgttgcttttgaaatttgatgcattcctcccatttactttattattgtacacatttaacacacagtagcaaattttgaacgatgtgattgatataacctaacaaatctgagccagttattattagagttgcagaatagaaacttgaagtgctaaatggaataatccaaaggaaattttttaaatgcaggttctagctgaaaaattcaactataagaaaattgtatttatataacatttactatttttgaagactagtgagatttctgtaataattttaattctttaaaaagtgaaagcttgttgtaaagatattttctttttgttattagaaggaaatacaaagagaaaaatttctttctttcatgggcatttgataatttcagtctttgactgatttgtaagcctagaatatactaagctgaataacagctctttggcctcagaattttcagtagccagtatttctgattaactaagttgaaactcttattagaaactttcagttggtgatattgtattctagaagatataaatgagaggtttggcttcatctcagtttagaaatttattcaaagctaaagatgtatatatacatatacttttgtgtgtatatatacacatatgtgtgtatgcagtttgtcaggttatatatagaatttctattaaggattttttaaatggacaagcaatagggggttgaagtgtttatctgatttgtttaaaattttgtatatcaccaaatttttaaaaagtgatagtcacagtgctaagttatctagttggctactattacaccttaaaaattgagtttacacacacacaattacctgtttatatggtgctcatttgttattctcaaatataatgtgtgaccgtgatatagtgagaaagattctaccaaccactgtttcactactttttagttaaaattgggtatgttcttaatattcattagtgagaatcacaaagtattttgtagaaggcccaaatcacagaataaaggactaagagtggatttgctgacattccatactaatatacattgtttatgctttctttaaaataactagaagaacataaaagaaagagaatctcagaagtagtttgctgctaatatatacatatattgtataaaaaggtatattttggttttgttaaaacccttgttgacttttctacactgaacattttttttaacttgatttaataaaaatgttaattttggaagtgcagttttgtaaaaacctttttcagtcaaacagtaaagactttatttatggattgtaataacaaccacaagaaaagccatacatcttaatgaacatacgcctttgttctgtcattttaaagagtggtgtttactatgtgtgtgcttgagcattttctttcagttacatgggtgtaatttaaaaacagctcctttttaagagacttttgaccatagtgttttccagtttaaagcaataactttcatagttttcanaggtatantcccatgttagtaacctcggtgcaagtattcctccaccgtgtcggttacctgggtgggcccttaggaagagaagccactgacggtgagggggcacaccaggtgtccacactacgaaacagttgagacaaaaaccctcgggaaaaaaaaatacacc

SEQ ID NO: 286679 - DNA, 2721 bp, Homo sapiens
cgcggaaggcgccgtgcgccggttgctatacaggccgcacttcacaccccgtgcctccccgcctctcctggctcctccgcccagatccccggcgctcccgcgttcggtgacggccgggtaggctgtaggcagcgcaatgccaagacagagctgctggcggcggcgggcgaatctccctgcaccatgagcctcggctccggccccgttaggggccgataagcacagcgcacgccgccctccatttgccccggggcctcggctgcgaagatagcggcggccggacaggaagctcgaggaaagcgctgggccgggtctctacgaacacgtgaaggaaaagcagctccgtccacaacgccgcttcggggctcctagggagtcgggccccgggccgccaccgtcacctcggccgctgccgctgtcgccatcgccttgtttccccatcccccgccatggccgaggacctctctgcggccacgtcctacaccgaagatgatttctactgccccgtctgtcaggaggtgctcaaaacgcccgtgcggaccacggcctgtcagcacgttttctgtagaaaatgtttcctgactgcaatgagggaaagcggagcacattgtcccctatgtcgtggaaatgtgactagaagagagagagcatgtcctgaacgggccttagaccttgaaaatataatgaggaagttttctggtagctgcagatgctgtgcaaaacagattaaattctatcgcatgagacatcattacaaatcttgtaagaagtatcaggatgaatatggtgtttcttctatcattccaaactttcagatctctcaagattcagtagggaacagcaataggagtgaaacatccacatctgataacacagaaacttaccaagagaatacaagttcttctggtcatcctacttttaagtgtcccctgtgtcaagaatcaaattttaccagacagcgtttactggatcactgtaacagtaatcacctatttcagatagttcctgtgacatgtcctatttgtgtgtctcttccttggggagatcctagccagattaccagaaatttcgttagtcatctaaatcagagacatcaatttgattatggagaatttgtgaatcttcagctagatgaagaaacccaataccaaactgctgttgaagaatcttttcaagtaaacatctgaaggctgtagacatctctgcatctttgtacctgcaagtgccatctttaagggggaaactacatgaagtcaccgttacagtaacttgatgtgtatattaataaaagtaattcagtcattttagtttttgattgaaaataaaggtagggcttctaaaaacttcatcatcttgataagttaaaaaatgaaagttatgacattagctttaaaggtgtaaaaaagatgtttcactaatgtaacggtgaaagagaatccctgttgtactttatctttttgtaatattatttttgaatttttcattattatgttgcttttgaaatttgatgcattcctcccatttactttattattgtacacatttaacacacagtagcaaattttgaacgatgtgattgatataacctaacaaatctgagccagttattattagagttgcagaatagaaacttgaagtgctaaatggaataatccaaaggaaattttttaaatgcaggttctagctgaaaaattcaactataagaaaattgtatttatataacatttactatttttgaagactagtgagatttctgtaataattttaattctttaaaaagtgaaagcttgttgtaaagatattttctttttgttattagaaggaaatacaaagagaaaaatttctttctttcatgggcatttgataatttcagtctttgactgatttgtaagcctagaatatactaagctgaataacagctctttggcctcagaattttcagtagccagtatttctgattaactaagttgaaactcttattagaaactttcagttggtgatattgtattctagaagatataaatgagaggtttggcttcatctcagtttagaaatttattcaaagctaaagatgtatatatacatatacttttgtgtgtatatatacacatatgtgtgtatgcagtttgtcaggttatatatagaatttctattaaggattttttaaatggacaagcaatagggggttgaagtgtttatctgatttgtttaaaattttgtatatcaccaaatttttaaaaagtgatagtcacagtgctaagttatctagttggctactattacaccttaaaaattgagtttacacacacacaattacctgtttatatggtgctcatttgttattctcaaatataatgtgtgaccgtgatatagtgagaaagattctaccaaccactgtttcactactttttagttaaaattgggtatgttcttaatattcattagtgagaatcacaaagtattttgtagaaggcccaaatcacagaataaaggactaagagtggatttgctgacattccatactaatatacattgtttatgctttctttaaaataactagaagaacataaaagaaagagaatctcagaagtagtttgctgctaatatatacatatattgtataaaaaggtatattttggttttgttaaaacccttgttgacttttctacactgaacattttttttaacttgatttaataaaaatgttaattttggaagtgc

SEQ ID NO: 286680 - DNA, 2510 bp, Homo sapiens
  misc_feature (5)..(6): n is a, c, g, or t
  misc_feature (25)..(25): n is a, c, g, or t
  misc_feature (27)..(27): n is a, c, g, or t
  misc_feature (36)..(36): n is a, c, g, or t
  misc_feature (50)..(50): n is a, c, g, or t
  misc_feature (54)..(54): n is a, c, g, or t
tctcnnctcatagggcacaagcggngntccacctgntgaggccgctctanactntgaccccggcggccggacaggaagctcgaggaaagcgctgggccgggtctctacgaacacgtgaaggaaaagcagctccgtccacaacgccgcttcggggctcctagggagtcgggccccgggccgccaccgtcacctcggccgctgccgctgtcgccatcgccttgtttccccatcccccgccatggccgaggacctctctgcggccacgtcctacaccgaagatgatttctactgccccgtctgtcaggaggtgctcaaaacgcccgtgcggaccacggcctgtcagcacgttttctgtagaaaatgtttcctgactgcaatgagggaaagcggagcacattgtcccctatgtcgtggaaatgtgactagaagagagagagcatgtcctgaacgggccttagaccttgaaaatataatgaggaagttttctggtagctgcagatgctgtgcaaaacagattaaattctatcgcatgagacatcattacaaatcttgtaagaagtatcaggatgaatatggtgtttcttctatcattccaaactttcagatctctcaagattcagtagggaacagcaataggagtgaaacatccacatctgataacacagaaacttaccaagagaatacaagttcttctggtcatcctacttttaagtgtcccctgtgtcaagaatcaaattttaccagacagcgtttactggatcactgtaacagtaatcacctatttcagatagttcctgtgacatgtcctatttgtgtgtctcttccttggggagatcctagccagattaccagaaatttcgttagtcatctaaatcagagacatcaatttgattatggagaatttgtgaatcttcagctagatgaagaaacccaataccaaactgctgttgaagaatcttttcaagtaaacatctgaaggctgtagacatctctgcatctttgtacctgcaagtgccatctttaagggggaaactacatgaagtcaccgttacagtaacttgatgtgtatattaataaaagtaattcagtcattttagtttttgattgaaaataaaggtagggcttctaaaaacttcatcatcttgataagttaaaaaatgaaagttatgacattagctttaaaggtgtaaaaaagatgtttcactaatgtaacggtgaaagagaatccctgttgtactttatctttttgtaatattatttttgaatttttcattattatgttgcttttgaaatttgatgcattcctcccatttactttattattgtacacatttaacacacagtagcaaattttgaacgatgtgattgatataacctaacaaatctgagccagttattattagagttgcagaatagaaacttgaagtgctaaatggaataatccaaaggaaattttttaaatgcaggttctagctgaaaaattcaactataagaaaattgtatttatataacatttactatttttgaagactagtgagatttctgtaataattttaattctttaaaaagtgaaagcttgttgtaaagatattttctttttgttattagaaggaaatacaaagagaaaaatttctttctttcatgggcatttgataatttcagtctttgactgatttgtaagcctagaatatactaagctgaataacagctctttggcctcagaattttcagtagccagtatttctgattaactaagttgaaactcttattagaaactttcagttggtgatattgtattctagaagatataaatgagaggtttggcttcatctcagtttagaaatttattcaaagctaaagatgtatatatacatatacttttgtgtgtatatatacacatatgtgtgtatgcagtttgtcaggttatatatagaatttctattaaggattttttaaatggacaagcaatagggggttgaagtgtttatctgatttgtttaaaattttgtatatcaccaaatttttaaaaagtgatagtcacagtgctaagttatctagttggctactattacaccttaaaaattgagtttacacacacacaattacctgtttatatggtgctcatttgttattctcaaatataatgtgtgaccgtgatatagtgagaaagattctaccaaccactgtttcactactttttagttaaaattgggtatgttcttaatattcattagtgagaatcacaaagtattttgtagaaggcccaaatcacagaataaaggactaagagtggatttgctgacattccatactaatatacattgtttatgctttctttaaaataactagaagaacataaaagaaagagaatctcagaagtagtttgctgctaatatatacatatattgtataaaaaggtatattttggttttgttaaaacccttgttgacttttctacactgaacattttttttaacttgatttaataaaaatgttaattttggaagtgc

SEQ ID NO: 286681 - DNA, 2170 bp, Homo sapiens
  misc_feature (13)..(13): n is a, c, g, or t
cgacccacgcgtncgtcgacccacgcgtcgcggacgcgtgggtcgagcggagcacattgtcccctatgtcgtggaaatgtgactagaagagagagagcatgtcctgaacgggccttagaccttgaaaatataatgaggaagttttctggtagctgcagatgctgtgcaaaacagattaaattctatcgcatgagacatcattacaaatcttgtaagaagtatcaggatgaatatggtgtttcttctatcattccaaactttcagatctctcaagattcagtagggaacagcaataggagtgaaacatccacatctgataacacagaaacttaccaagagaatacaagttcttctggtcatcctacttttaagtgtcccctgtgtcaagaatcaaattttaccagacagcgtttactggatcactgtaacagtaatcacctatttcagatagttcctgtgacatgtcctatttgtgtgtctcttccttggggagatcctagccagattaccagaaatttcgttagtcatctaaatcagagacatcaatttgattatggagaatttgtgaatcttcagctagatgaagaaacccaataccaaactgctgttgaagaatcttttcaagtaaacatctgaaggctgtagacatctctgcatctttgtacctgcaagtgccatctttaagggggaaactacatgaagtcaccgttacagtaacttgatgtgtatattaataaaagtaattcagtcattttagtttttgattgaaaataaaggtagggcttctaaaaacttcatcatcttgataagttaaaaaatgaaagttatgacattagctttaaaggtgtaaaaaagatgtttcactaatgtaacggtgaaagagaatccctgttgtactttatctttttgtaatattatttttgaatttttcattattatgttgcttttgaaatttgatgcattcctcccatttactttattattgtacacatttaacacacagtagcaaattttgaacgatgtgattgatataacctaacaaatctgagccagttattattagagttgcagaatagaaacttgaagtgctaaatggaataatccaaaggaaattttttaaatgcaggttctagctgaaaaattcaactataagaaaattgtatttatataacatttactatttttgaagactagtgagatttctgtaataattttaattctttaaaaagtgaaagcttgttgtaaagatattttctttttgttattagaaggaaatacaaagagaaaaatttctttctttcatgggcatttgataatttcagtctttgactgatttgtaagcctagaatatactaagctgaataacagctctttggcctcagaattttcagtagccagtatttctgattaactaagttgaaactcttattagaaactttcagttggtgatattgtattctagaagatataaatgagaggtttggcttcatctcagtttagaaatttattcaaagctaaagatgtatatatacatatacttttgtgtgtatatatacacatatgtgtgtatgcagtttgtcaggttatatatagaatttctattaaggattttttaaatggacaagcaatagggggttgaagtgtttatctgatttgtttaaaattttgtatatcaccaaatttttaaaaagtgatagtcacagtgctaagttatctagttggctactattacaccttaaaaattgagtttacacacacacaattacctgtttatatggtgctcatttgttattctcaaatataatgtgtgaccgtgatatagtgagaaagattctaccaaccactgtttcactactttttagttaaaattgggtatgttcttaatattcattagtgagaatcacaaagtattttgtagaaggcccaaatcacagaataaaggactaagagtggatttgctgacattccatactaatatacattgtttatgctttctttaaaataactagaagaacataaaagaaagagaatctcagaagtagtttgctgctaatatatacatatattgtataaaaaggtatattttggttttgttaaaacccttgttgacttttctacactgaacattttttttaacttgatttaataaaaatgttaattttggaagtgc

SEQ ID NO: 286682 - DNA, 2439 bp, Homo sapiens
cgcggaaggcgccgtgcgccggttgctatacaggccgcacttcacaccccgtgcctccccgcctctcctggctcctccgcccagatccccggcgctcccgcgttcggtgacggccgggtaggctgtaggcagcgcaatgccaagacagagctgctggcggcggcgggcgaatctccctgcaccatgagcctcggctccggccccgttaggggccgataagcacagcgcacgccgccctccatttgccccggggcctcggctgcgaagatagcggcggccggacaggaagctcgaggaaagcgctgggccgggtctctacgaacacgtgaaggaaaagcagctccgtccacaacgccgcttcggggctcctagggagtcgggccccgggccgccaccgtcacctcggccgctgccgctgtcgccatcgccttgtttccccatcccccgccatggccgaggacctctctgcggccacgtcctacaccgaagatgatttctactgccccgtctgtcaggaggtgctcaaaacgcccgtgcggaccacggcctgtcagcacgtcaataggagtgaaacatccacatctgataacacagaaacttaccaagagaatacaagttcttctggtcatcctacttttaagtgtcccctgtgtcaagaatcaaattttaccagacagcgtttactggatcactgtaacagtaatcacctatttcagatagttcctgtgacatgtcctatttgtgtgtctcttccttggggagatcctagccagattaccagaaatttcgttagtcatctaaatcagagacatcaatttgattatggagaatttgtgaatcttcagctagatgaagaaacccaataccaaactgctgttgaagaatcttttcaagtaaacatctgaaggctgtagacatctctgcatctttgtacctgcaagtgccatctttaagggggaaactacatgaagtcaccgttacagtaacttgatgtgtatattaataaaagtaattcagtcattttagtttttgattgaaaataaaggtagggcttctaaaaacttcatcatcttgataagttaaaaaatgaaagttatgacattagctttaaaggtgtaaaaaagatgtttcactaatgtaacggtgaaagagaatccctgttgtactttatctttttgtaatattatttttgaatttttcattattatgttgcttttgaaatttgatgcattcctcccatttactttattattgtacacatttaacacacagtagcaaattttgaacgatgtgattgatataacctaacaaatctgagccagttattattagagttgcagaatagaaacttgaagtgctaaatggaataatccaaaggaaattttttaaatgcaggttctagctgaaaaattcaactataagaaaattgtatttatataacatttactatttttgaagactagtgagatttctgtaataattttaattctttaaaaagtgaaagcttgttgtaaagatattttctttttgttattagaaggaaatacaaagagaaaaatttctttctttcatgggcatttgataatttcagtctttgactgatttgtaagcctagaatatactaagctgaataacagctctttggcctcagaattttcagtagccagtatttctgattaactaagttgaaactcttattagaaactttcagttggtgatattgtattctagaagatataaatgagaggtttggcttcatctcagtttagaaatttattcaaagctaaagatgtatatatacatatacttttgtgtgtatatatacacatatgtgtgtatgcagtttgtcaggttatatatagaatttctattaaggattttttaaatggacaagcaatagggggttgaagtgtttatctgatttgtttaaaattttgtatatcaccaaatttttaaaaagtgatagtcacagtgctaagttatctagttggctactattacaccttaaaaattgagtttacacacacacaattacctgtttatatggtgctcatttgttattctcaaatataatgtgtgaccgtgatatagtgagaaagattctaccaaccactgtttcactactttttagttaaaattgggtatgttcttaatattcattagtgagaatcacaaagtattttgtagaaggcccaaatcacagaataaaggactaagagtggatttgctgacattccatactaatatacattgtttatgctttctttaaaataactagaagaacataaaagaaagagaatctcagaagtagtttgctgctaatatatacatatattgtataaaaaggtatattttggttttgttaaaacccttgttgacttttctacactgaacattttttttaacttgatttaataaaaatgttaattttggaagtgc

SEQ ID NO: 286683 - DNA, 2664 bp, Homo sapiens
cgcggaaggcgccgtgcgccggttgctatacaggccgcacttcacaccccgtgcctccccgcctctcctggctcctccgcccagatccccggcgctcccgcgttcggtgacggccgggtaggctgtaggcagcgcaatgccaagacagagctgctggcggcggcgggcgaatctccctgcaccatgagcctcggctccggccccgttaggggccgataagcacagcgcacgccgccctccatttgccccggggcctcggctgcgaagatagcggcggccggacaggaagctcgaggaaagcgctgggccgggtctctacgaacacgtgaaggaaaagcagctccgtccacaacgccgcttcggggctcctagggagtcgggccccgggccgccaccgtcacctcggccgctgccgctgtcgccatcgccttgtttccccatcccccgccatggccgaggacctctctgcggccacgtcctacaccgaagatgatttctactgccccgtctgtcaggaggtgctcaaaacgcccgtgcggaccacggcctgtcagcacgttttctgtagaaaatgtttcctgactgcaatgagggaaagcggagcacattgtcccctatgtcgtggaaatgtgactagaagagagagagcatgtcctgaacgggccttagaccttgaaaatataatgaggaagttttctggtagctgcagatgctgtgcaaaacagattaaattctatcgcatgagacatcattacaaatcttgtaagaagtatcaggatgaatatggtgtttcttctatcattccaaactttcagatctctcaagattcagtagggaacagttcttctggtcatcctacttttaagtgtcccctgtgtcaagaatcaaattttaccagacagcgtttactggatcactgtaacagtaatcacctatttcagatagttcctgtgacatgtcctatttgtgtgtctcttccttggggagatcctagccagattaccagaaatttcgttagtcatctaaatcagagacatcaatttgattatggagaatttgtgaatcttcagctagatgaagaaacccaataccaaactgctgttgaagaatcttttcaagtaaacatctgaaggctgtagacatctctgcatctttgtacctgcaagtgccatctttaagggggaaactacatgaagtcaccgttacagtaacttgatgtgtatattaataaaagtaattcagtcattttagtttttgattgaaaataaaggtagggcttctaaaaacttcatcatcttgataagttaaaaaatgaaagttatgacattagctttaaaggtgtaaaaaagatgtttcactaatgtaacggtgaaagagaatccctgttgtactttatctttttgtaatattatttttgaatttttcattattatgttgcttttgaaatttgatgcattcctcccatttactttattattgtacacatttaacacacagtagcaaattttgaacgatgtgattgatataacctaacaaatctgagccagttattattagagttgcagaatagaaacttgaagtgctaaatggaataatccaaaggaaattttttaaatgcaggttctagctgaaaaattcaactataagaaaattgtatttatataacatttactatttttgaagactagtgagatttctgtaataattttaattctttaaaaagtgaaagcttgttgtaaagatattttctttttgttattagaaggaaatacaaagagaaaaatttctttctttcatgggcatttgataatttcagtctttgactgatttgtaagcctagaatatactaagctgaataacagctctttggcctcagaattttcagtagccagtatttctgattaactaagttgaaactcttattagaaactttcagttggtgatattgtattctagaagatataaatgagaggtttggcttcatctcagtttagaaatttattcaaagctaaagatgtatatatacatatacttttgtgtgtatatatacacatatgtgtgtatgcagtttgtcaggttatatatagaatttctattaaggattttttaaatggacaagcaatagggggttgaagtgtttatctgatttgtttaaaattttgtatatcaccaaatttttaaaaagtgatagtcacagtgctaagttatctagttggctactattacaccttaaaaattgagtttacacacacacaattacctgtttatatggtgctcatttgttattctcaaatataatgtgtgaccgtgatatagtgagaaagattctaccaaccactgtttcactactttttagttaaaattgggtatgttcttaatattcattagtgagaatcacaaagtattttgtagaaggcccaaatcacagaataaaggactaagagtggatttgctgacattccatactaatatacattgtttatgctttctttaaaataactagaagaacataaaagaaagagaatctcagaagtagtttgctgctaatatatacatatattgtataaaaaggtatattttggttttgttaaaacccttgttgacttttctacactgaacattttttttaacttgatttaataaaaatgttaattttggaagtgc

SEQ ID NO: 286684 - DNA, 2687 bp, Homo sapiens
cgcggaaggcgccgtgcgccggttgctatacaggccgcacttcacaccccgtgcctccccgcctctcctggctcctccgcccagatccccggcgctcccgcgttcggtgacggccgggtaggctgtaggcagcgcaatgccaagacagagctgctggcggcggcgggcgaatctccctgcaccatgagcctcggctccggccccgttaggggccgataagcacagcgcacgccgccctccatttgccccggggcctcggctgcgaagatagcggcggccggacaggaagctcgaggaaagcgctgggccgggtctctacgaacacgtgaaggaaaagcagctccgtccacaacgccgcttcggggctcctagggagtcgggccccgggccgccaccgtcacctcggccgctgccgctgtcgccatcgccttgtttccccatcccccgccatggccgaggacctctctgcggccacgtcctacaccgaagatgatttctactgccccgtctgtcaggaggtgctcaaaacgcccgtgcggaccacggcctgtcagcacgttttctgtagaaaatgtttcctgactgcaatgagggaaagcggagcacattgtcccctatgtcgtggaaatgtgactagaagagagagagcatgtcctgaacgggccttagaccttgaaaatataatgaggaagttttctggtagctgcagatgctgtgcaaaacagattaaattctatcgcatgagacatcattacaaatcttgtaagaagtatcaggatgaatatggtgtttcttctatcattccaaactttcagatctctcaagattcagtagggaacagcaataggagtgaaacatccacatctgataacacagaaacttaccaagagaatacaagttcttctggtcatcctacttttaagtgtcccctgtgtcaagaatcaaattttaccagacagcgtttactggatcactgtaacagtaatcacctatttcagatagttcctgtgatcctagccagattaccagaaatttcgttagtcatctaaatcagagacatcaatttgattatggagaatttgtgaatcttcagctagatgaagaaacccaataccaaactgctgttgaagaatcttttcaagtaaacatctgaaggctgtagacatctctgcatctttgtacctgcaagtgccatctttaagggggaaactacatgaagtcaccgttacagtaacttgatgtgtatattaataaaagtaattcagtcattttagtttttgattgaaaataaaggtagggcttctaaaaacttcatcatcttgataagttaaaaaatgaaagttatgacattagctttaaaggtgtaaaaaagatgtttcactaatgtaacggtgaaagagaatccctgttgtactttatctttttgtaatattatttttgaatttttcattattatgttgcttttgaaatttgatgcattcctcccatttactttattattgtacacatttaacacacagtagcaaattttgaacgatgtgattgatataacctaacaaatctgagccagttattattagagttgcagaatagaaacttgaagtgctaaatggaataatccaaaggaaattttttaaatgcaggttctagctgaaaaattcaactataagaaaattgtatttatataacatttactatttttgaagactagtgagatttctgtaataattttaattctttaaaaagtgaaagcttgttgtaaagatattttctttttgttattagaaggaaatacaaagagaaaaatttctttctttcatgggcatttgataatttcagtctttgactgatttgtaagcctagaatatactaagctgaataacagctctttggcctcagaattttcagtagccagtatttctgattaactaagttgaaactcttattagaaactttcagttggtgatattgtattctagaagatataaatgagaggtttggcttcatctcagtttagaaatttattcaaagctaaagatgtatatatacatatacttttgtgtgtatatatacacatatgtgtgtatgcagtttgtcaggttatatatagaatttctattaaggattttttaaatggacaagcaatagggggttgaagtgtttatctgatttgtttaaaattttgtatatcaccaaatttttaaaaagtgatagtcacagtgctaagttatctagttggctactattacaccttaaaaattgagtttacacacacacaattacctgtttatatggtgctcatttgttattctcaaatataatgtgtgaccgtgatatagtgagaaagattctaccaaccactgtttcactactttttagttaaaattgggtatgttcttaatattcattagtgagaatcacaaagtattttgtagaaggcccaaatcacagaataaaggactaagagtggatttgctgacattccatactaatatacattgtttatgctttctttaaaataactagaagaacataaaagaaagagaatctcagaagtagtttgctgctaatatatacatatattgtataaaaaggtatattttggttttgttaaaacccttgttgacttttctacactgaacattttttttaacttgatttaataaaaatgttaattttggaagtgc

SEQ ID NO: 286685 - DNA, 1186 bp, Homo sapiens
cgcggaaggcgccgtgcgccggttgctatacaggccgcacttcacaccccgtgcctccccgcctctcctggctcctccgcccagatccccggcgctcccgcgttcggtgacggccgggtaggctgtaggcagcgcaatgccaagacagagctgctggcggcggcgggcgaatctccctgcaccatgagcctcggctccggccccgttaggggccgataagcacagcgcacgccgccctccatttgccccggggcctcggctgcgaagatagcggcggccggacaggaagctcgaggaaagcgctgggccgggtctctacgaacacgtgaaggaaaagcagctccgtccacaacgccgcttcggggctcctagggagtcgggccccgggccgccaccgtcacctcggccgctgccgctgtcgccatcgccttgtttccccatcccccgccatggccgaggacctctctgcggccacgtcctacaccgaagatgatttctactgccccgtctgtcaggaggtgctcaaaacgcccgtgcggaccacggcctgtcagcacgttttctgtagaaaatgtttcctgactgcaatgagggaaagcggagcacattgtcccctatgtcgtggaaatgtgactagaagagagagagcatgtcctgaacgggccttagaccttgaaaatataatgaggaagttttctggtagctgcagatgctgtgcaaaacagattaaattctatcgcatgagacatcattacaaatcttgtaagaagtatcaggatgaatatggtgtttcttctatcattccaaactttcagatctctcaagattcagtagggaacagcaataggagtgaaacatccacatctgataacacagaaacttaccaagagaatacaagttcttctggtcatcctacttttaagtgtcccctgtgtcaagaatcaaattttaccagacagcgtttactggatcactgtaacagtaatcacctatttcagatagttcctgtgacctgttctatatgggtgtctcttccctggggagatcctagccgatttccggtttcggtggcactctatctcgagactcacttgattcagggaatggtgatctcagctgatgagaacccataccaacgttgtggacaatcttcacgtacttcagcggtccctggctgttctgcgcc

SEQ ID NO: 286686 - DNA, 1584 bp, Homo sapiens
gtttttcctgttgacatgaatgttattgtttttagaatcttcagctagatgaagaaacccaataccaaactgctgttgaagaatcttttcaagtaaacatctgaaggctgtagacatctctgcatctttgtacctgcaagtgccatctttaagggggaaactacatgaagtcaccgttacagtaacttgatgtgtatattaataaaagtaattcagtcattttagtttttgattgaaaataaaggtagggcttctaaaaacttcatcatcttgataagttaaaaaatgaaagttatgacattagctttaaaggtgtaattttgtaatattatttttgaatttttcattattatgttgcttttgaaatttgatgcattcctcccatttactttattattgtacacatttaacacacagtagcaaattttgaacgatgtgattgatataacctaacaaatctgagccagttattattagagttgcagaatagaaacttgaagtgctaaatggaataatccaaaggaaattttttaaatgcaggttctagctgaaaaattcaactataagaaaattgtatttatataacatttactatttttgaagactagtgagatttctgtaataattttaattctttaaaaagtgaaagcttgttgtaaagatattttctttttgttattagaaggaaatacaaagagaaaaatttctttctttcatgggcatttgataatttcagtctttgactgatttgtaagcctagaatatactaagctgaataacagctctttggcctcagaattttcagtagccagtatttctgattaactaagttgaaactcttattagaaactttcagttggtgatattgtattctagaagatataaatgagaggtttggcttcatctcagtttagaaatttattcaaagctaaagatgtatatatacatatacttttgtgtgtatatatacacatatgtgtgtatgcagtttgtcaggttatatatagaatttctattaaggattttttaaatggacaagcaatagggggttgaagtgtttatctgatttgtttaaaattttgtatatcaccaaatttttaaaaagtgatagtcacagtgctaagttatctagttggctactattacaccttaaaaattgagtttacacacacacaattacctgtttatatggtgctcatttgttattctcaaatataatgtgtgaccgtgatatagtgagaaagattctaccaaccactgtttcactactttttagttaaaattgggtatgttcttaatattcattagtgagaatcacaaagtattttgtagaaggcccaaatcacagaataaaggactaagagtggatttgctgacattccatactaatatacattgtttatgctttctttaaaataactagaagaacataaaagaaagagaatctcagaagtagtttgctgctaatatatacatatattgtataaaaaggtatattttggttttgttaaaacccttgttgacttttctacactgaacattttttttaacttgatttaataaaaatgttaattttggaagtgc

SEQ ID NO: 286687 - DNA, 1262 bp, Homo sapiens
gtttcactactttttagttaaacagtggttggtagaatctttctcactatatcacggtcacacattatatttgagaaagattctaccaaccactgtttcactactttttagttaaaattgggtatgttcttaatattcattagtgagaatcacaaagtattttgtagaaggcccaaatcacagaataaaggactaagagtggatttgctgacattccatactaatatacattgtttatgctttctttaaaataactagaagaacataaaagaaagagaatctcagaagtagtttgctgctaatatatacatatattgtataaaaaggtatattttggttttgttaaaacccttgttgacttttctacactgaacattttttttaacttgatttaataaaaatgttaattttggaagtgcagttttgtaaaaacctttttcagtcaaacagtaaagactttatttatggattgtaataacaaccacaagaaaagccatacatcttaatgaacatacgcctttgttctgtcattttaaagagtggtgtttactatgtgtgtgcttgagcattttctttcagttacatgggtgtaatttaaaaacagctcctttttaagagacttttgaccatagtgttttccagtttaaagcaataactttcatagtttctttcaaagtttaatacatccaatatgtcaagttaaaccattctgggatttgcaaagtttaatacatccaatatgtcaagttaaaccattctgggatttgcaaagtttaatacatccaatatgtcaagttaaaccattctgggatttgggaacttctttaaaggaaaattgtagtagaggtcatcttgatggaattgtgttttaaagttttgtgaatgagttaaatatcattgatagtcttgtgtgtctcacatatcagctttttcataaggaaaatactttatttgcttttatctgagaatttctcagtatgaaaatgattgtttaaaatttcccctctttttgtcagtgcattgggaatagggatagactttacagatttatggaaattaaatttatggggaaaagtttttatttttaatattacttatagctgagtcagaattaaaggagggaattgtattgatactccaatacctaaatttcacaataccacttaggaaagctatttcaacaaattacagttttattgttaaaacagagtcttatttgagatgtattgctttatttttcaattaaaagtggttttctccta

SEQ ID NO: 286688 - DNA, 706 bp, Homo sapiens
gacaataaatactctaattttctgtgacatctaaaagttataattctttactcagtagaagacagctatcaggtgctaaaataaaaaaaagatacctaacccaataaaggcaaaatcttagttatattaaccagcaaggtacatattacattattattactagaccatgcctccaagtgtgtcaaattataaaaatgtgttcagcatacataaaatatacattaaagatttctctcatcataggcacaatctaatacaaaaatatatttgacatttataagttagaagatccattgagagcctccaaaataggacaggggaaggaatgagtgatgacaacataaaaaaagaagcacacatagatgcaaatagttccacttatatgattattttcttcatcagcaaagggttaagagcagtttacaccaaaccaagttaccaagcagatcacaatcagttcacaggttggataagtcacggcacgcaggccagaaaatgtacttttttttttttttttttttgtaaaaattattttattatttcctatttttttttcataggatggggtctcactatattgcccagcctagtctttaacttccggctttaagcagtcctcctgcctcagcctctcaaagtattgatattatgggcatgagcccctgcacccagcctgatttttttaatttgtataaatttatggggt

SEQ ID NO: 286689 - DNA, 1487 bp, Homo sapiens
gacaataaatactctaattttctgtgacatctaaaagttataattctttactcagtagaagacagctatcaggtgctaaaataaaaaaaagatacctaacccaataaaggcaaaatcttagttatattaaccagcaaggtacatattacattattattactagaccatgcctccaagtgtgtcaaattataaaaatgtgttcagcatacataaaatatacattaaagatttctctcatcataggcacaatctaatacaaaaatatatttgacatttataagttagaagatccattgagagcctccaaaataggacaggggaaggaatgagtgatgacaacataaaaaaagaagcacacatagatgcaaatagttccacttatatgattattttcttcatcagcaaagggttaagagcagtttacaccaaaccaagttaccaagcagatcacaatcagttcacaggttggataagtcacggcacgcaggccagaaaatgtactcagacttcagtcaacctaatgggacagtgtactcacactgtggttttgttgttttggagtctagaagctccatctacccattctccatggtctaccaccatgttaacacagatttaccacaggcgccatctgtaccaagcctaggatagactctttaaaaaaaaaaagacctggccggtcacagtggttcatgcctgtaagcattttgagaggacaaggtgggtggatcatgaggtcaggagttcaagaccagcctggccaaggtggtggaaccctgcctctactaaaactgcaaaaattagccaggcacggtggcaggaacttgtaatcccagctacttgggaggctcaggcagaagaatcgcttaaacccgggtgacagaggttgcagtgagcacagatcacaccactgcactccagcctgggcaacagagtgagactctgtttcaaaataaaaataaaaataaagattaaaaattttaaaaagacctacactttgactagtaaagaaaacctacaggatggtgttgcaaaacgcaaaattgtctatccagttaagtgagctgaacacaaactaatctgaagtcctgaactctctgtggggaaataaaagtattttttttaagcaggcagaaataaatgttttgaaaaagattcaaaagcacaggaccttatataatctttgaatgtggaataatagttcaaacaatattttgaactgaaaattcaagaatgaactctcaaacaaaaatgtcatgattcagaatgctccatgatgatgacagaaaagcttgtcacctatgctgcatgttaagaagagagaaaaatggcaacagccgtattttaaagattcataatgttcttcccttccatctagttaaaaccagatgtccaggccgggcacggtggctcacaccagtaatcccagctctttgggattacaggtatgagccactgcgcccagccccaatattttttaatataaa

SEQ ID NO: 286690 - DNA, 1433 bp, Homo sapiens
gacaataaatactctaattttctgtgacatctaaaagttataattctttactcagtagaagacagctatcaggtgctaaaataaaaaaaagatacctaacccaataaaggcaaaatcttagttatattaaccagcaaggtacatattacattattattactagaccatgcctccaagtgtgtcaaattataaaaatgtgttcagcatacataaaatatacattaaagatttctctcatcataggcacaatctaatacaaaaatatatttgacatttataagttagaagatccattgagagcctccaaaataggacaggggaaggaatgagtgatgacaacttcatcagcaaagggttaagagcagtttacaccaaaccaagttaccaagcagatcacaatcagttcacaggttggataagtcacggcacgcaggccagaaaatgtactcagacttcagtcaacctaatgggacagtgtactcacactgtggttttgttgttttggagtctagaagctccatctacccattctccatggtctaccaccatgttaacacagatttaccacaggcgccatctgtaccaagcctaggatagactctttaaaaaaaaaaagacctggccggtcacagtggttcatgcctgtaagcattttgagaggacaaggtgggtggatcatgaggtcaggagttcaagaccagcctggccaaggtggtggaaccctgcctctactaaaactgcaaaaattagccaggcacggtggcaggaacttgtaatcccagctacttgggaggctcaggcagaagaatcgcttaaacccgggtgacagaggttgcagtgagcacagatcacaccactgcactccagcctgggcaacagagtgagactctgtttcaaaataaaaataaaaataaagattaaaaattttaaaaagacctacactttgactagtaaagaaaacctacaggatggtgttgcaaaacgcaaaattgtctatccagttaagtgagctgaacacaaactaatctgaagtcctgaactctctgtggggaaataaaagtattttttttaagcaggcagaaataaatgttttgaaaaagattcaaaagcacaggaccttatataatctttgaatgtggaataatagttcaaacaatattttgaactgaaaattcaagaatgaactctcaaacaaaaatgtcatgattcagaatgctccatgatgatgacagaaaagcttgtcacctatgctgcatgttaagaagagagaaaaatggcaacagccgtattttaaagattcataatgttcttcccttccatctagttaaaaccagatgtccaggccgggcacggtggctcacaccagtaatcccagctctttgggattacaggtatgagccactgcgcccagccccaatattttttaatataaa

SEQ ID NO: 286691 - DNA, 770 bp, Homo sapiens
gacaataaatactctaattttctgtgacatctaaaagttataattctttactcagtagaagacagctatcaggtgctaaaataaaaaaaagatacctaacccaataaaggcaaaatcttagttatattaaccagcaaggtacatattacattattattactagaccatgcctccaagtgtgtcaaattataaaaatgtgttcagcatacataaaatatacattaaagatttctctcatcataggcacaatctaatacaaaaatatatttgacatttataagttagaagatccattgagagcctccaaaataggacaggggaaggaatgagtgatgacaacataaaaaaagaagcacacatagatgcaaatagttccacttatatgattattttcttcatcagcaaagggttaagagcagtttacaccaaaccaagttaccaagcagatcacaatcagttcacaggttggataagtcacggcacgcaggccagaaaatgtactcagacttcagtcaacctaatgggacagtgtactcacactgtggttttgttgttttggagtctagaagctccatctacccattctccatggtctaccaccatgttaacaccaaaagagtcacacttttagttgtaaaattatcttctattaatatttgctcttacttggttggctttcaaaggaaaaagagtgtccatcgctttgaaacattctgtagacaatctggagatgactatttctggtgacataacttcagctgaagattttg

SEQ ID NO: 286692 - DNA, 826 bp, Homo sapiens
tgtaatcccagctacttgggaggctcaggcagaagaatcgcttaaacccgggtgacagaggttgcagtgagcacagatcacaccactgcactccagcctgggcaacagagtgagactctgtttcaaaataaaaataaaaataaagattaaaaattttaaaaagacctacactttgactagtaaagaaaacctacaggatggtgttgcaaaacgcaaaattgtctatccagttaagtgagctgaacacaaactaatctgaagtcctgaactctctgtggggaaataaaagtattttttttaagcaggcagaaataaatgttttgaaaaagattcaaaagcacaggaccttatataatctttgaatgtggaataatagttcaaacaatattttgaactgaaaattcaagaatgaactctcaaacaaaaatgtcatgattcagaatgctccatgatgatgacagaaaagcttgtcacctatgctgcatgttaagaagagagaaaaatggcaacagccgtattttaaagattcataatgttcttcccttccatctagttaaaaccagatgtccaggccgggcacggtggctcacaccagtaatcccagctctttgggaggccaaggcgggtggatcacgaggtcaggagatggagacaatcctggctaacatggtgaaaccccatctttactaaaaatacaaaaaaaattagccgggtgtggttgcgggtgcctgtagtcccagctacttgggaggctgaggcaggagaatggtgtgaacccaggaggcagaggttgcagtgagccaagatcacgccactgcactccagc

SEQ ID NO: 286693 - DNA, 784 bp, Homo sapiens
gtttcctcgagcaggtcctctctagccggccgcttatctatggtttctgctatagggcgctctagcctgcgccaaggggtagtgagaccgcgcggcaacagcttgcggctgcggggagctcccgtgggcgctccgctggctgtgcaggcggccatggattccttgcggaaaatgctgatctcagtcgcaatgctgggcgcaggggctggcgtgggctacgcgctcctcgttatcgtgaccccgggagagcggcggaagcaggaaatgctaaaggtagaagcaactggtagtcccgaggaagggtgtggcgggtggagagccccggactggagctcctgcgaactccccttcctgccctcaggagatgccactgcaggacccaaggagcagggaggaggcggccaggacccagcagctattgctggccactctgcaggaggcagcgaccacgcaggagaacgtggcctggaggaagaactggatggttggcggcgaaggcggcgccagcgggaggtcaccgtgagaccggacttgcctccgtgggcgccggaccttggcttgggcgcaggaatccgaggcagcctttctccttcgtgggcccagcggagagtccggaccgagataccatgccaggactctccggggtcctgtgagctgccgtcgggtgagcacgtttcccccaaaccctggactgactgctttaaggtccgcaaggcgggccagggccgagacgcgagtcggatgtggtgaactgaaagaaccaataaaatcatgttcctccacc

SEQ ID NO: 286694 - DNA, 696 bp, Homo sapiens
gtttcctcgagcaggtcctctctagccggccgcttatctatggtttctgctatagggcgctctagcctgcgccaaggggtagtgagaccgcgcggcaacagcttgcggctgcggggagctcccgtgggcgctccgctggctgtgcaggcggccatggattccttgcggaaaatgctgatctcagtcgcaatgctgggcgcaggggctggcgtgggctacgcgctcctcgttatcgtgaccccgggagagcggcggaagcaggaaatgctaaaggagatgccactgcaggacccaaggagcagggaggaggcggccaggacccagcagctattgctggccactctgcaggaggcagcgaccacgcaggagaacgtggcctggaggaagaactggatggttggcggcgaaggcggcgccagcgggaggtcaccgtgagaccggacttgcctccgtgggcgccggaccttggcttgggcgcaggaatccgaggcagcctttctccttcgtgggcccagcggagagtccggaccgagataccatgccaggactctccggggtcctgtgagctgccgtcgggtgagcacgtttcccccaaaccctggactgactgctttaaggtccgcaaggcgggccagggccgagacgcgagtcggatgtggtgaactgaaagaaccaataaaatcatgttcctccacc

SEQ ID NO: 286695 - DNA, 907 bp, Homo sapiens
gtttcctcgagcaggtcctctctagccggccgcttatctatggtttctgctatagggcgctctagcctgcgccaaggggtagtgagaccgcgcggcaacagcttgcggctgcggggagctcccgtgggcgctccgctggctgtgcaggcggccatggattccttgcggaaaatgctgatctcagtcgcaatgctgggcgcaggggctggcgtgggctacgcgctcctcgttatcgtgaccccgggagagcggcggaagcaggaaatgctaaaggagatgccactgcaggacccaaggagcagggaggaggcggccaggacccagcagctattgctggccactctgcaggaggcagcgaccacgcaggagaacgtggcctggaggaagaactggatggttggcggcgaaggcggcgccagcgggaggtcaccgtgagaccggacttgcctccgtgggcgccggaccttggcttgggcgcaggaatccgaggcagcctttctccttcgtgggcccagcggagagtccggaccgagataccatgccaggactctccggggtcctgtgagctgccgtcgggtgagcacgtttcccccaaaccctggactgactgctttaaggtccgcaaggcgggccagggccgagacgcgagtcggatgtggtgaactgaaagaaccaataaaatcatgttcctccacccagaatgagccctgcagtcgacacctaccaatgcttagagacgcgtggtcggtgctgggggcgcggcctggagctgctgcctgtcccaccccaccagaagaggctgatcccgataggtatctgaccacatttttttttttttttttttttgagacggagtcaatgtcacccaggctggagtgcagtggcacgatctcggctcactgcaacc

SEQ ID NO: 286696 - DNA, 869 bp, Homo sapiens
gtttcctcgagcaggtcctctctagccggccgcttatctatggtttctgctatagggcgctctagcctgcgccaaggggtagtgagaccgcgcggcaacagcttgcggctgcggggagctcccgtgggcgctccgctggctgtgcaggcggccatggattccttgcggaaaatgctgatctcagtcgcaatgctgggcgcaggggctggcgtgggctacgcgctcctcgttatcgtgaccccgggagagcggcggaagcaggaaatgctaaaggagatgccactgcaggacccaaggagcagggaggaggcggccaggacccagcagctattgctggccactctgcaggaggcagcgaccacgcaggagaacgtggcctggaggaagaactggatggttggcggcgaaggcggcgccagcgggaggtcaccgtgagaccggacttgcctccgtgggcgccggaccttggcttgggcgcaggaatccgaggcagcctttctccttcgtgggcccagcggagagtccggaccgagataccatgccaggactctccggggtcctgtgagctgccgtcgggtgagcacgtttcccccaaaccctggactgactgctttaaggtccgcaaggcgggccagggccgagacgcgagtcggatgtggtgaactgaaagaaccaataaaatcatgttcctccaccaaaaaaaaaaaaaaaaaaaaaattggggggcgcccgcccccaaaaaattttacacccttctgggggcgcggccgggagggactgggcacgggcccgggacccgggcgaagggggggtccccaaaaaagcccggcccgcggtggcacaccagggggggcgggtacgggcagcta

SEQ ID NO: 286697 - DNA, 931 bp, Homo sapiens
gtttcctcgagcaggtcctctctagccggccgcttatctatggtttctgctatagggcgctctagcctgcgccaaggggtagtgagaccgcgcggcaacagcttgcggctgcggggagctcccgtgggcgctccgctggctgtgcaggcggccatggattccttgcggaaaatgctgatctcagtcgcaatgctgggcgcaggggctggcgtgggctacgcgctcctcgttatcgtgaccccgggagagcggcggaagcaggaaatgctaaaggaggcagcgaccacgcaggagaacgtggcctggaggaagaactggatggttggcggcgaaggcggcgccagcgggaggtcaccgtgagaccggacttgcctccgtgggcgccggaccttggcttgggcgcaggaatccgaggcagcctttctccttcgtgggcccagcggagagtccggaccgagataccatgccaggactctccggggtcctgtgagctgccgtcgggtgagcacgtttcccccaaaccctggactgactgctttaaggtccgcaaggcgggccagggccgagacgcgagtcggatgtggtgaactgaaagaaccaataaaatcatgttcctccaccaaaaaaataaaaaaagaacagaaacaaatgttggtgggggtttttcgaaaggggtttctctaaccggttaaaaatgggggatctctagcaaaaaagccggggttcatttgggaggagtacgcccacgcgtgggtgttttcccccctgtgccagacacttatcgtcgacaagtgttcccaaggggacaatcacgcggggctttaaccagggcaatttggagaccgccttatgtaacgcctcttttagacccggagaagcaacgacgatcggctcagcagaccgacagacagacggaccacagcaccacgag

SEQ ID NO: 286698 - DNA, 995 bp, Homo sapiens
gtttcctcgagcaggtcctctctagccggccgcttatctatggtttctgctatagggcgctctagcctgcgccaaggggtagtgagaccgcgcggcaacagcttgcggctgcggggagctcccgtgggcgctccgctggctgtgcaggcggccatggattccttgcggaaaatgctgatctcagtcgcaatgctgggcgcaggggctggcgtgggctacgcgctcctcgttatcgtgaccccgggagagcggcggaagcaggaaatgctaaaggtagaagcaactggtagtcccgaggaagggtgtggcgggtggagagccccggactggagctcctgcgaactccccttcctgccctcaggagatgccactgcaggacccaaggagcagggaggaggcggccaggacccagcagctattgctggccactctgcaggaggcagcgaccacgcaggagaacgtggcctggaggaagaactggatggttggcggcgaaggcggcgccagcgggaggtcaccgtgagaccggacttgcctccgtgggcgccggaccttggcttgggcgcaggaatccgaggcagcctttctccttcgtgggcccagcggagagtccggaccgagataccatgccaggactctccggggtcctgtgagctgccgtcgggtgagcacgtttcccccaaaccctggactgactgctttaaggtccgcaaggcgggccagggccgagacgcgagtcggatgtggtgaactgaaagaaccaataaaatcatgttcctccacccagaatgagccctgcagtcgacacctaccaatgcttagagacgcgtggtcggtgctgggggcgcggcctggagctgctgcctgtcccaccccaccagaagaggctgatcccgataggtatctgaccacatttttttttttttttttttttgagacggagtcaatgtcacccaggctggagtgcagtggcacgatctcggctcactgcaacc

SEQ ID NO: 286699 - DNA, 523 bp, Homo sapiens
tgtcctcaagaatccaacaagcatcttcttcatcctggtcctgcccccagctgagtccagcgttaaatgttcttaaaggacttctagggtcctgtgggctccaagcccagcctggctcttcactttggtcttggaagaaggcctcagcatcctcttcctcaccatcagtgagcagcagcagctcctcatggggcaaatggagatccccactctcttcattcacctcactggattccaccacaatagacggcagatgggacttttgagagaaatcctccgtgggcgccggaccttggcttgggcgcaggaatccgaggcagcctttctccttcgtgggcccagcggagagtccggaccgagataccatgccaggactctccggggtcctgtgagctgccgtcgggtgagcacgtttcccccaaaccctggactgactgctttaaggtccgcaaggcgggccagggccgagacgcgagtcggatgtggtgaactgaaagaaccaataaaatcatgttcctccacc

SEQ ID NO: 286700 - DNA, 3131 bp, Homo sapiens
aggcaaccggcgccagccatggcctctggggcgggcggaagctggggtcgctccccaccgcagagcgcagtcccgacgccctgggtcaccttcctgcagcccctctcgtgggccgtcccacctgcgcccccgcagccaggccgcgtgaaggaagacctgctggaactgatgatgctgcagaacgcgcagatgcaccagctgctgctgagtcgcctggtggctggagcgctgcagccccggcctgcctcgccctgccctcaggtctacctggaggttccacaggaagagcctgaggaggaggaggaggagatggacgtgcgggagaaagggcctttggtgtttcaccaccactacttgccctatttgatgccctccccgggtgccctgctgccctggccagcccccttcttccccacccctgcttgtcagccctacttgcaggacgtgcccagcattcagcactgtcctgcctccagggaaagggaggtgagagctgtgcccccacccccaccccccagtgccacagggactgtgggtgctgatgtacccccggcttcagactactatgatgccgagagcctcctatgaggacagaccccggccctgggaactgcaccagcttcctgctctggatacagccccggagccgcctcctgcacctctcttgtcgactccccggtgcccatggctggcagtccttctcactccctcaacctcagccaggccctcttctcctggggaaatcagtccctgccccacgccaatgagttcctggacgggccggatctgtgctgttgtgtaagagctccctagagcaccacccaggcccttgaagccacgtcagcccgcctctgccccactgcttcctgcctggagcagggggaggcctgggaacagagcccccaccctctctccctcacccctctctctgggatgatgaggtctccttccagcctagtaatggagcaagaggggagggggggattccttctgctttccacagctttgaaggcccctttgaggtggctggaggggcccagagtggtcggggagagactttgctgggcagcgcccctgagcagagtcagttcgctgggccccccacccctcatcccaggaagcagctctgttggcagaaaggagaggtcagagctttgtcctgctgtggccaggagtggcctgaggtctcctggggccaggtgggaacagtgtgtcctctgccccctgggccagggtgtgtttcccccaccctccctcagtagcaatgagctactcgggccagatgggggcctgttgcatgggctgggaggcccctgtgaaggagagggtggggagggaggcatctagggagaggggtcccccatggtggctcccctccctggccattgttatcccaggaggagacactgtgggcacagggctaagtccaggtgtttgtattcgggctagaaaaggcaatgtcccaagtctctgctgcctgtcacagtccttcagccagggctggacctcaaccctgaggagtcacactgagttccagtgaccaccgtggtggtggccatgccactcatggttgctatggccggaaggcctggggcagcctcctccaagccgctcgcaccccgtaggtgcccatccgctgctggcgcaagtgctggccgaagatgaagcagagcaggacagatgtcacgaacagggacagcaacaccgacaccaccgtgactatgatgaccatctggctgtccgacacaggctctggggagggagggggcaagggtcttagacgtcctgtgatcccagttaccagggaccaaaagggagtggaagtccacccccaacccagacccccagaccccgccgcccgctcatgcatccagcagtcaccccagttgcagagatgagtggtgaatggtgtctgcattaaaattattatctggaaaaaaggtggcccagggctcaggctaccagctggacttctgtgtggctgtgagggcagatgtccccttgtcagcagccatgggaccagtgtgtagctgctggacaccgtggcctggagggtggcatggtcccagccaagccccttcttgggcagagctgagtgaacttcatgccaggctccctgtgtgccggccgtccagagtcaccaagcagcagagctctggggacctcagtgggggcagtcaggccaaacttctcattgtggaggggagccaaggccagggagagccgtcaaggtcatggggcttgatggtggccgaggaactagttgacctctcccgacctctggagcagttgaggtccaagctggggacttggaaagaacttcagggaagagggagagtaagagggaagcctcaggatgaagggtgggctcctgggtgtttgcttcccaagtgggactcaagatttttcttcccccgaggggctgaaagtgacttctcactcccaactccatccacggatcccccctcaccatagatctccaacatcttcggggctgagtgtttgtgaaagatgttgccaccgcgagacatcaagtccagcacagccaggcaggagaagttgcggtggccatcctctctgtcagccgtgctgttgaatgtggctgtggcctcctgcggagcaggggctgccttcccgaaggtctcatagtgcagagtctcattgccacggaacaggaagagggtgaggctgtccaggggctccacggtgggcaccctgcactcaatggtgaaggacttgcccacagccaccaaagtgggttgcagtgtcaggatgacctgccttggaggctctgcaggggacaaaggagggaggtctggtcaggatgggggtgcagtcccagcagcctccccctggccagggccatctcctgtcaccatggtgttccacggttggggaggaggtggcctggccggctccagtgcagagaggaagagggcggcagttgaggatggaggctggactgtgtggtagttttacagacatgatggtttccggtgaccaggtgtctacaaggacaaggttcagaaattgtacagccaactggaaagatataaaagtttgggtctgtctcctctccttcagaaatgaaatataaatttcaaacattaaacagttgggtgatcacgttg

SEQ ID NO: 286701 - DNA, 3312 bp, Homo sapiens
gagcggcttagcttgggagacggcagagtggggagctgtccctggaggggccagatccttgaggggtgggggacgaggagagacagccccaaaccgagaggaagaggcgtggcagggagcagggaggccacggggcggggaggagagaacctggcccctgcggggttagggaggccactggccgggaggggttggggctcgcgacgtgtccccatccattcccgccaccggacctggctgagtccgcgcacacccccagccctgggtcaccttcctgcagcccctctcgtgggccgtcccacctgcgcccccgcagccaggccgcgtgaaggaagacctgctggaactgatgatgctgcagaacgcgcagatgcaccagctgctgctgagtcgcctggtggctggagcgctgcagccccggcctgcctcgccctgccctcaggtctacctggaggttccacaggaagagcctgaggaggaggaggaggagatggacgtgcgggagaaagggcctttggtgtttcaccaccactacttgccctatttgatgccctccccgggtgccctgctgccctggccagcccccttcttccccacccctgcttgtcagccctacttgcaggacgtgcccagcattcagcactgtcctgcctccagggaaagggaggtgagagctgtgcccccacccccaccccccagtgccacagggactgtgggtgctgatgtacccccggcttcagactactatgatgccgagagcctcctatgaggacagaccccggccctgggaactgcaccagcttcctgctctggatacagccccggagccgcctcctgcacctctcttgtcgactccccggtgcccatggctggcagtccttctcactccctcaacctcagccaggccctcttctcctggggaaatcagtccctgccccacgccaatgagttcctggacgggccggatctgtgctgttgtgtaagagctccctagagcaccacccaggcccttgaagccacgtcagcccgcctctgccccactgcttcctgcctggagcagggggaggcctgggaacagagcccccaccctctctccctcacccctctctctgggatgatgaggtctccttccagcctagtaatggagcaagaggggagggggggattccttctgctttccacagctttgaaggcccctttgaggtggctggaggggcccagagtggtcggggagagactttgctgggcagcgcccctgagcagagtcagttcgctgggccccccacccctcatcccaggaagcagctctgttggcagaaaggagaggtcagagctttgtcctgctgtggccaggagtggcctgaggtctcctggggccaggtgggaacagtgtgtcctctgccccctgggccagggtgtgtttcccccaccctccctcagtagcaatgagctactcgggccagatgggggcctgttgcatgggctgggaggcccctgtgaaggagagggtggggagggaggcatctagggagaggggtcccccatggtggctcccctccctggccattgttatcccaggaggagacactgtgggcacagggctaagtccaggtgtttgtattcgggctagaaaaggcaatgtcccaagtctctgctgcctgtcacagtccttcagccagggctggacctcaaccctgaggagtcacactgagttccagtgaccaccgtggtggtggccatgccactcatggttgctatggccggaaggcctggggcagcctcctccaagccgctcgcaccccgtaggtgcccatccgctgctggcgcaagtgctggccgaagatgaagcagagcaggacagatgtcacgaacagggacagcaacaccgacaccaccgtgactatgatgaccatctggctgtccgacacaggctctggggagggagggggcaagggtcttagacgtcctgtgatcccagttaccagggaccaaaagggagtggaagtccacccccaacccagacccccagaccccgccgcccgctcatgcatccagcagtcaccccagttgcagagatgagtggtgaatggtgtctgcattaaaattattatctggaaaaaaggtggcccagggctcaggctaccagctggacttctgtgtggctgtgagggcagatgtccccttgtcagcagccatgggaccagtgtgtagctgctggacaccgtggcctggagggtggcatggtcccagccaagccccttcttgggcagagctgagtgaacttcatgccaggctccctgtgtgccggccgtccagagtcaccaagcagcagagctctggggacctcagtgggggcagtcaggccaaacttctcattgtggaggggagccaaggccagggagagccgtcaaggtcatggggcttgatggtggccgaggaactagttgacctctcccgacctctggagcagttgaggtccaagctggggacttggaaagaacttcagggaagagggagagtaagagggaagcctcaggatgaagggtgggctcctgggtgtttgcttcccaagtgggactcaagatttttcttcccccgaggggctgaaagtgacttctcactcccaactccatccacggatcccccctcaccatagatctccaacatcttcggggctgagtgtttgtgaaagatgttgccaccgcgagacatcaagtccagcacagccaggcaggagaagttgcggtggccatcctctctgtcagccgtgctgttgaatgtggctgtggcctcctgcggagcaggggctgccttcccgaaggtctcatagtgcagagtctcattgccacggaacaggaagagggtgaggctgtccaggggctccacggtgggcaccctgcactcaatggtgaaggacttgcccacagccaccaaagtgggttgcagtgtcaggatgacctgccttggaggctctgcaggggacaaaggagggaggtctggtcaggatgggggtgcagtcccagcagcctccccctggccagggccatctcctgtcaccatggtgttccacggttggggaggaggtggcctggccggctccagtgcagagaggaagagggcggcagttgaggatggaggctggactgtgtggtagttttacagacatgatggtttccggtgaccaggtgtctacaaggacaaggttcagaaattgtacagccaactggaaagatataaaagtttgggtctgtctcctctccttcagaaatgaaatataaatttcaaacattaaacagttgggtgatcacgttg

SEQ ID NO: 286702 - DNA, 2304 bp, Homo sapiens
aggcaaccggcgccagccatggcctctggggcgggcggaagctggggtcgctccccaccgcagagcgcagtcccgacgccctgggtcaccttcctgcagcccctctcgtgggccgtcccacctgcgcccccgcagccaggccgcgtgaaggaagacctgctggaactgatgatgctgcagaacgcgcagatgcaccagctgctgctgagtcgcctggtggctggagcgctgcagccccggcctgcctcgccctgccctcaggtctacctggaggttccacaggaagagcctgaggaggaggaggaggagatggacgtgcgggagaaagggcctttggtgtttcaccaccactacttgccctatttgatgccctccccgggtgccctgctgccctggccagcccccttcttccccacccctgcttgtcagccctacttgcaggacgtgcccagcattcagcactgtcctgcctccagggaaagggaggtgagagctgtgcccccacccccaccccccagtgccacagggactgtgggtgctgatgtacccccggcttcagactactatgatgccgagagcctcctatgaggacagaccccggccctgggaactgcaccagcttcctgctctggatacagccccggagccgcctcctgcacctctcttgtcgactccccggtgcccatggctggcagtccttctcactccctcaacctcagccaggccctcttctcctggggaaatcagtccctgccccacgccaatgagttcctggacgggccggatctgtgctgttgtgtgcccatccgctgctggcgcaagtgctggccgaagatgaagcagagcaggacagatgtcacgaacagggacagcaacaccgacaccaccgtgactatgatgaccatctggctgtccgacacaggctctggggagggagggggcaagggtcttagacgtcctgtgatcccagttaccagggaccaaaagggagtggaagtccacccccaacccagacccccagaccccgccgcccgctcatgcatccagcagtcaccccagttgcagagatgagtggtgaatggtgtctgcattaaaattattatctggaaaaaaggtggcccagggctcaggctaccagctggacttctgtgtggctgtgagggcagatgtccccttgtcagcagccatgggaccagtgtgtagctgctggacaccgtggcctggagggtggcatggtcccagccaagccccttcttgggcagagctgagtgaacttcatgccaggctccctgtgtgccggccgtccagagtcaccaagcagcagagctctggggacctcagtgggggcagtcaggccaaacttctcattgtggaggggagccaaggccagggagagccgtcaaggtcatggggcttgatggtggccgaggaactagttgacctctcccgacctctggagcagttgaggtccaagctggggacttggaaagaacttcagggaagagggagagtaagagggaagcctcaggatgaagggtgggctcctgggtgtttgcttcccaagtgggactcaagatttttcttcccccgaggggctgaaagtgacttctcactcccaactccatccacggatcccccctcaccatagatctccaacatcttcggggctgagtgtttgtgaaagatgttgccaccgcgagacatcaagtccagcacagccaggcaggagaagttgcggtggccatcctctctgtcagccgtgctgttgaatgtggctgtggcctcctgcggagcaggggctgccttcccgaaggtctcatagtgcagagtctcattgccacggaacaggaagagggtgaggctgtccaggggctccacggtgggcaccctgcactcaatggtgaaggacttgcccacagccaccaaagtgggttgcagtgtcaggatgacctgccttggaggctctgcaggggacaaaggagggaggtctggtcaggatgggggtgcagtcccagcagcctccccctggccagggccatctcctgtcaccatggtgttccacggttggggaggaggtggcctggccggctccagtgcagagaggaagagggcggcagttgaggatggaggctggactgtgtggtagttttacagacatgatggtttccggtgaccaggtgtctacaaggacaaggttcagaaattgtacagccaactggaaagatataaaagtttgggtctgtctcctctccttcagaaatgaaatataaatttcaaacattaaacagttgggtgatcacgttg

SEQ ID NO: 286703 - DNA, 273 bp, Homo sapiens
gccaggatggtctcaatctcctgaccttgtgatccgcccgcctcggcctcccacagtgctgggattacaggcgtgagccaccatgcctggccacaagccattcttacaaagcctatctggaggaaataacttaggggaatggaggagtggcggtggggagagcctgatggtagattctcatttcccctccctgttttgcacaatccccaggtctacctggaggttccacaggaagagcctgaggaggaggaggaggagatggacgtgcgggag

SEQ ID NO: 286704 - DNA, 827 bp, Homo sapiens
aggcaactggcctgtccccttccctttacctctttggggtccactgagacaggagggagtcaagatgaggttcttgtttccccagactactatgatgccgagagcctcctatgaggacagaccccggccctgggaactgcaccagcttcctgctctggatacagccccggagccgcctcctgcacctctcttgtcgactccccggtgcccatggctggcagtccttctcactccctcaacctcagccaggccctcttctcctggggaaatcagtccctgccccacgccaatgagttcctggacgggccggatctgtgctgttgtgtaagagctccctagagcaccacccaggcccttgaagccacgtcagcccgcctctgccccactgcttcctgcctggagcagggggaggcctgggaacagagcccccaccctctctccctcacccctctctctgggatgatgaggtctccttccagcctagtaatggagcaagaggggagggggggattccttctgctttccacagctttgaaggcccctttgaggtggctggaggggcccagagtggtcggggagagactttgctgggcagcgcccctgagcagagtcagttcgctgggccccccacccctcatcccaggaagcagctctgttggcagaaaggagaggtcagagctttgtcctgctgtggccaggagtggcctgaggtctcctggggccaggtgggaacagtgtgtcctctgccccctgggccagggtgtgtttcccccaccctccctcagtagcaatgagctactcgggccagatgggggcctgttgcatgg

SEQ ID NO: 286705 - DNA, 831 bp, Homo sapiens
aacattttattagtttttttaatacagagaaaagacctcaaaaaaagttttttttttaaagctacatttcaaacagtatgcaaaggtacaattgaaaagtatgcagcatccttctcccagctgacaattggttcagtttcttgtgattacatccagaaaggggaacataaaaacttctaagtctgtaccagcataatgtctgttgatatattttttaagtatacgcagaaaggatctttctatttatacgctatagtgtgtataccttaccctggtaatagaccacatttggttttgattcatcttacaaaatcatatgttagttcataaagttaatgaatgagtactctttgcttttaacatctttttcaggttggtacccggaggtacatggctccagaggtattagagggtgctataaacttccaaagggatgcatttttgaggatagatatgtatgccatgggattagtcctatgggaactggcttctcgctgtactgctgcagatggtaagggaaaaaaatatttttaaaaaagatatatatgcctaccacacatatatgaaaagggatgatacactccaaggtaatattttaaagtacagtttttttttaattgactccaagagatggtagagaattcaggaggcaggggagcagtgggtggggtaggagaggaaaggaattgctatgtattgatcctttaccattactagctatgttgctggacacttcacataccttaaggttatttcctaaaacggtttcagaggtagttattatgctttacatatgaggaaattgagatgcagagaaattaagtagtttgc

SEQ ID NO: 286706 - DNA, 4228 bp, Homo sapiens
ttttttttggtctgggcttccgaatatgttttatgacggttgattttacaccaggaggtttgtctccgaggaagacccagggaactggatatctagcgagaacttcctccggattccccggcgcctcgggaaaatgggagctgctgcaaagttggcgtttgccgtctttcttatctcctgttcttcaggtgctatacttggtagatcagaaactcaggagtgtcttttctttaatgctaattgggaaaaagacagaaccaatcaaactggtgttgaaccgtgttatggtgacaaagataaacggcggcattgttttgctacctggaagaatatttctggttccattgaaatagtgaaacaaggttgttggctggatgatatcaactgctatgacaggactgattgtgtagaaaaaaaagacagccctgaagtatatttttgttgctgtgagggcaatatgtgtaatgaaaagttttcttattttccggagatggaagtcacacagcccacttcaaatccagttacacctaagccaccctattacaacatcctgctctattccttggtgccacttatgttaattgcggggattgtcatttgtgcattttgggtgtacaggcatcacaagatggcctaccctcctgtacttgttccaactcaagacccaggaccacccccaccttctccattactaggtttgaaaccactgcagttattagaagtgaaagcaaggggaagatttggttgtgtctggaaagcccagttgcttaacgaatatgtggctgtcaaaatatttccaatacaggacaaacagtcatggcaaaatgaatacgaagtctacagtttgcctggaatgaagcatgagaacatattacagttcattggtgcagaaaaacgaggcaccagtgttgatgtggatctttggctgatcacagcatttcatgaaaagggttcactatcagactttcttaaggctaatgtggtctcttggaatgaactgtgtcatattgcagaaaccatggctagaggattggcatatttacatgaggatatacctggcctaaaagatggccacaaacctgccatatctcacagggacatcaaaagtaaaaatgtgctgttgaaaaacaacctgacagcttgcattgctgactttgggttggccttaaaatttgaggctggcaagtctgcaggcgatacccatggacaggttggtacccggaggtacatggctccagaggtattagagggtgctataaacttccaaagggatgcatttttgaggatagatatgtatgccatgggattagtcctatgggaactggcttctcgctgtactgctgcagatggacctgtagatgaatacatgttgccatttgaggaggaaattggccagcatccatctcttgaagacatgcaggaagttgttgtgcataaaaaaaagaggcctgttttaagagattattggcagaaacatgctggaatggcaatgctctgtgaaaccattgaagaatgttgggatcacgacgcagaagccaggttatcagctggatgtgtaggtgaaagaattacccagatgcagagactaacaaatattattaccacagaggacattgtaacagtggtcacaatggtgacaaatgttgactttcctcccaaagaatctagtctatgatggttgcgccatctgtgcacactaagaaatgggactctgaactggagctgctaagctaaagaaactgcttacagtttattttctgtgtaaaatgagtaggatgtctcttggaaatgttaagaaagaagaccctttgttgaaaaatgttgctctgggagacttactgcattgccgacagcacagatgtgaaggacatgagactaagagaaaccttgcaaactctataaagaaacttttgaaaaagtgtacatgaagaatgtagccctctccaaatcaaggatcttttggacctggctaatggagtgtttgaaaactgacatcagatttcttaatgtctgtcagaagacactaattccttaaatgaactactgctattttttttaaatcaaaaacttttcatttcagattttaaaaagggtaacttgtttttattgcatttgctgttgtttctataaatgactattgtaatgccaatatgacacagcttgtgaatgtttagtgtgctgctgttctgtgtacataaagtcatcaaagtggggtacagtaaagaggcttccaagcattactttaacctccctcaacaaggtatacctcagttccacggttgctaaattataaaattgaaaacactaacaaaatttgaataataaatcgatccatgttttgtaacaaattcactgtgttatttaaggaaaaaaaggtaagctatgcttagtgccaacaataagtggccattcgtaaagcagtgttttagcatttcttgtgctggcttgtaatgtagggaaaaaaagtgctgttttttgaaaagatggtgtcatttcccccttcttcccatgttttaaagccccatcttatatccagttcccaaaatttgcatacttacctaagtattttttttaggtgtgctgtgtttggggaatatttgaaaatttaaagcatgatttaaaattttttaaagtgagctgtgacactggaaagctcttcattttatcttttaaaatagagttttttctatttatatatgtaaaattgtagtgtatttcttttcaccaaacagtgtgtgggacattctttatcactgttttaggatcacctcaggaagtgtcgttacccagaattccccactgtctgctatgagacttgtaactttatcactatacttctgcttggtgccatcttgtcagagtaatatttgatgtctgtgatatgtaaagaattatcctaggataaagatattaaactttaagcagatttcagatgttactgctttaaaacaaatcagggataacaaattaaacgtataacttaaaatatgcaatgacatttagaggtaaccaatgttgatataggtagcatagcctagcctcctccccaaaattgcttttacaactaacactgatactaatttaggatagttcatgccttatccttgctaagaaaatggaattgatggtaggcaggtgctaaagtgcttttcaaaacaatattacgttagaatacaattggattcttcctcaaatttatacaggccaaaaagtaaaacattaattttctgaatttccagattaccaatcaattaatcaacaaatagccagtattatgctgtgtatttctgtcaggtcattttaaaatccatgttaattttataaaagaattttttacatgtcactgtcaggagctcactgtgaatgtgttgtcttcaaatggttatttaaccacacagtacactacattttacatatatgtacgtaatctctgggaatagtaaattaattatgttatttataaacaatacataggtcaacagactttaagcagggaggaaaagaagagtaatagcgtctgtgtgctgcagaccattcagaactgtcacgtgtgtccccatggtctcattcattgtattcctagcaattcccttttcaatgttgagttcacctctttatttcacaaagtacttggtctctcaatttcttgatctggttttgcttccatttaaaaactaatcaagaagggaaaatattgagaatgtgcatacaagaaaatcattaatttcctgaagatgaatttctacctgttgtgaacatttaactttctttttaaaagttaaacaaaaataaacaagggatattatgatgaatgtttggcttatgtgagtactagagataaaatttttaaacccagttattcacaatataaaatgttttcaagttagaaaaaatttttagaaatcctgggtattgtatttaactgtagctaaccaattttaaaacttgtattcttttgagaactattattaatagaaaaactttttataagcagtaaaataagaatgttccagtgactacctgtccttatacctagtcttgttaaaactttcttttgcagggtatttagtgtttggtttacagtcagtgcagagtgggcaagttaacagaaagtttgagctagagatactggaaaaaaaaaagatcaaagaatgagaaaaatggtgatccattttggggcaaactgagaccccccaaataactctttcctcatgtgtatggtgctcct

SEQ ID NO: 286707 - DNA, 4359 bp, Homo sapiens
accgaaaacgcggccgagcccggagcccggagctggagccagagcctggaccagaacttggccgccgcctgcaccgccgccgccgctgccgcccgccgccccttccccgcgccgcagccgcctcgccgccaccgccgcgagctcggccgccagtggtcctcggactttaggtgtctgggttgaaggaggtttgtctccgaggaagacccagggaactggatatctagcgagaacttcctccggattccccggcgcctcgggaaaatgggagctgctgcaaagttggcgtttgccgtctttcttatctcctgttcttcaggtgctatacttggtagatcagaaactcaggagtgtcttttctttaatgctaattgggaaaaagacagaaccaatcaaactggtgttgaaccgtgttatggtgacaaagataaacggcggcattgttttgctacctggaagaatatttctggttccattgaaatagtgaaacaaggttgttggctggatgatatcaactgctatgacaggactgattgtgtagaaaaaaaagacagccctgaagtatatttttgttgctgtgagggcaatatgtgtaatgaaaagttttcttattttccggagatggaagtcacacagcccacttcaaatccagttacacctaagccaccctattacaacatcctgctctattccttggtgccacttatgttaattgcggggattgtcatttgtgcattttgggtgtacaggcatcacaagatggcctaccctcctgtacttgttccaactcaagacccaggaccacccccaccttctccattactaggtttgaaaccactgcagttattagaagtgaaagcaaggggaagatttggttgtgtctggaaagcccagttgcttaacgaatatgtggctgtcaaaatatttccaatacaggacaaacagtcatggcaaaatgaatacgaagtctacagtttgcctggaatgaagcatgagaacatattacagttcattggtgcagaaaaacgaggcaccagtgttgatgtggatctttggctgatcacagcatttcatgaaaagggttcactatcagactttcttaaggctaatgtggtctcttggaatgaactgtgtcatattgcagaaaccatggctagaggattggcatatttacatgaggatatacctggcctaaaagatggccacaaacctgccatatctcacagggacatcaaaagtaaaaatgtgctgttgaaaaacaacctgacagcttgcattgctgactttgggttggccttaaaatttgaggctggcaagtctgcaggcgatacccatggacaggttggtacccggaggtacatggctccagaggtattagagggtgctataaacttccaaagggatgcatttttgaggatagatatgtatgccatgggattagtcctatgggaactggcttctcgctgtactgctgcagatggacctgtagatgaatacatgttgccatttgaggaggaaattggccagcatccatctcttgaagacatgcaggaagttgttgtgcataaaaaaaagaggcctgttttaagagattattggcagaaacatgctggaatggcaatgctctgtgaaaccattgaagaatgttgggatcacgacgcagaagccaggttatcagctggatgtgtaggtgaaagaattacccagatgcagagactaacaaatattattaccacagaggacattgtaacagtggtcacaatggtgacaaatgttgactttcctcccaaagaatctagtctatgatggttgcgccatctgtgcacactaagaaatgggactctgaactggagctgctaagctaaagaaactgcttacagtttattttctgtgtaaaatgagtaggatgtctcttggaaatgttaagaaagaagaccctttgttgaaaaatgttgctctgggagacttactgcattgccgacagcacagatgtgaaggacatgagactaagagaaaccttgcaaactctataaagaaacttttgaaaaagtgtacatgaagaatgtagccctctccaaatcaaggatcttttggacctggctaatggagtgtttgaaaactgacatcagatttcttaatgtctgtcagaagacactaattccttaaatgaactactgctattttttttaaatcaaaaacttttcatttcagattttaaaaagggtaacttgtttttattgcatttgctgttgtttctataaatgactattgtaatgccaatatgacacagcttgtgaatgtttagtgtgctgctgttctgtgtacataaagtcatcaaagtggggtacagtaaagaggcttccaagcattactttaacctccctcaacaaggtatacctcagttccacggttgctaaattataaaattgaaaacactaacaaaatttgaataataaatcgatccatgttttgtaacaaattcactgtgttatttaaggaaaaaaaggtaagctatgcttagtgccaacaataagtggccattcgtaaagcagtgttttagcatttcttgtgctggcttgtaatgtagggaaaaaaagtgctgttttttgaaaagatggtgtcatttcccccttcttcccatgttttaaagccccatcttatatccagttcccaaaatttgcatacttacctaagtattttttttaggtgtgctgtgtttggggaatatttgaaaatttaaagcatgatttaaaattttttaaagtgagctgtgacactggaaagctcttcattttatcttttaaaatagagttttttctatttatatatgtaaaattgtagtgtatttcttttcaccaaacagtgtgtgggacattctttatcactgttttaggatcacctcaggaagtgtcgttacccagaattccccactgtctgctatgagacttgtaactttatcactatacttctgcttggtgccatcttgtcagagtaatatttgatgtctgtgatatgtaaagaattatcctaggataaagatattaaactttaagcagatttcagatgttactgctttaaaacaaatcagggataacaaattaaacgtataacttaaaatatgcaatgacatttagaggtaaccaatgttgatataggtagcatagcctagcctcctccccaaaattgcttttacaactaacactgatactaatttaggatagttcatgccttatccttgctaagaaaatggaattgatggtaggcaggtgctaaagtgcttttcaaaacaatattacgttagaatacaattggattcttcctcaaatttatacaggccaaaaagtaaaacattaattttctgaatttccagattaccaatcaattaatcaacaaatagccagtattatgctgtgtatttctgtcaggtcattttaaaatccatgttaattttataaaagaattttttacatgtcactgtcaggagctcactgtgaatgtgttgtcttcaaatggttatttaaccacacagtacactacattttacatatatgtacgtaatctctgggaatagtaaattaattatgttatttataaacaatacataggtcaacagactttaagcagggaggaaaagaagagtaatagcgtctgtgtgctgcagaccattcagaactgtcacgtgtgtccccatggtctcattcattgtattcctagcaattcccttttcaatgttgagttcacctctttatttcacaaagtacttggtctctcaatttcttgatctggttttgcttccatttaaaaactaatcaagaagggaaaatattgagaatgtgcatacaagaaaatcattaatttcctgaagatgaatttctacctgttgtgaacatttaactttctttttaaaagttaaacaaaaataaacaagggatattatgatgaatgtttggcttatgtgagtactagagataaaatttttaaacccagttattcacaatataaaatgttttcaagttagaaaaaatttttagaaatcctgggtattgtatttaactgtagctaaccaattttaaaacttgtattcttttgagaactattattaatagaaaaactttttataagcagtaaaataagaatgttccagtgactacctgtccttatacctagtcttgttaaaactttcttttgcagggtatttagtgtttggtttacagtcagtgcagagtgggcaagttaacagaaagtttgagctagagatactggaaaaaaaaaagatcaaagaatgagaaaaatggtgatccattttggggcaaactgagaccccccaaataactctttcctcatgtgtatggtgctcct

SEQ ID NO: 286708 - DNA, 545 bp, Homo sapiens
ttttttttggtctgggcttccgaatatgttttatgacggttgattttacaccaggaggtttgtctccgaggaagacccagggaactggatatctagcgagaacttcctccggattccccggcgcctcgggaaaatgggagctgctgcaaagttggcgtttgccgtctttcttatctcctgttcttcaggtgctatacttggtagatcagaaactcaggagtgtcttttctttaatgctaattgggaaaaagacagaaccaatcaaactggtgttgaaccgtgttatggtgacaaagataaacggcggcattgttttgctacctggaagaatatttctggttccattgaaatagtgaaacaaggttgttggctggatgatatcaactgctatgacaggtaagaacacatttaagattttatggtagtattgagtaattttcacacttcccctctttttgaaaggggaaagatcagtgcataaattttcacttaaatgtttcttgctttttaaaaaatgggattataaagaacattataacatgctg

SEQ ID NO: 286709 - DNA, 487 bp, Homo sapiens
atgggtaccttaaagggatattatataacgttaatttacaaatactgattgttccttatgtcctctgtgcagatggaaataggcatcctttatacctagataagaaagccccttatgcaatctttaagggaattacatgccaaattataggccttttcatttcccatacattagtttggtcacactgtggtataagtacagttgagagtctgtttctcttctgtcctcatagcatgtaaacagttgggaataggtgacagagtatattttagaaagtttgtaccagtttgaaagtcaggaggattttaatgaaaatgatttattttacttttcttacttttcaggacctgtagatgaatacatgttgccatttgaggaggaaattggccagcatccatctcttgaagacatgcaggaagttgttgtgcataaaagtacaggcaagcttcttttttttttttttcacttccttacctctcttttcttt

SEQ ID NO: 286710 - DNA, 345 bp, Homo sapiens
accgaaaacgcggccgagcccggagcccggagctggagccagagcctggaccagaacttggccgccgcctgcaccgccgccgccgctgccgcccgccgccccttccccgcgccgcagccgcctcgccgccaccgccgcgagctcggccgccagtggtcctcggactttaggtgtctgggttgaaggtcggtccggacatcggacccagtcagttcccagactgtccgggcggcagcggacgccgctgccgccgccgcctcttcgtcgcctcagcctggcgttttgttccgagagacgggagaggcgagcggagctgacagtgattttgacagtgatttaaacccg

SEQ ID NO: 286711 - DNA, 4315 bp, Homo sapiens
accgaaaacgcggccgagcccggagcccggagctggagccagagcctggaccagaacttggccgccgcctgcaccgccgccgccgctgccgcccgccgccccttccccgcgccgcagccgcctcgccgccaccgccgcgagctcggccgccagtggtcctcggactttaggtgtctgggttgaaggtgctatacttggtagatcagaaactcaggagtgtcttttctttaatgctaattgggaaaaagacagaaccaatcaaactggtgttgaaccgtgttatggtgacaaagataaacggcggcattgttttgctacctggaagaatatttctggttccattgaaatagtgaaacaaggttgttggctggatgatatcaactgctatgacaggatagtaagagaagtaagaggaaaagaagattcaagaattgtcaaagtgtggaagacaagaaaatgataaaagaagaatgaaattgaatggactgattgtgtagaaaaaaaagacagccctgaagtatatttttgttgctgtgagggcaatatgtgtaatgaaaagttttcttattttccggagatggaagtcacacagcccacttcaaatccagttacacctaagccaccctattacaacatcctgctctattccttggtgccacttatgttaattgcggggattgtcatttgtgcattttgggtgtacaggcatcacaagatggcctaccctcctgtacttgttccaactcaagacccaggaccacccccaccttctccattactaggtttgaaaccactgcagttattagaagtgaaagcaaggggaagatttggttgtgtctggaaagcccagttgcttaacgaatatgtggctgtcaaaatatttccaatacaggacaaacagtcatggcaaaatgaatacgaagtctacagtttgcctggaatgaagcatgagaacatattacagttcattggtgcagaaaaacgaggcaccagtgttgatgtggatctttggctgatcacagcatttcatgaaaagggttcactatcagactttcttaaggctaatgtggtctcttggaatgaactgtgtcatattgcagaaaccatggctagaggattggcatatttacatgaggatatacctggcctaaaagatggccacaaacctgccatatctcacagggacatcaaaagtaaaaatgtgctgttgaaaaacaacctgacagcttgcattgctgactttgggttggccttaaaatttgaggctggcaagtctgcaggcgatacccatggacaggttggtacccggaggtacatggctccagaggtattagagggtgctataaacttccaaagggatgcatttttgaggatagatatgtatgccatgggattagtcctatgggaactggcttctcgctgtactgctgcagatggacctgtagatgaatacatgttgccatttgaggaggaaattggccagcatccatctcttgaagacatgcaggaagttgttgtgcataaaaaaaagaggcctgttttaagagattattggcagaaacatgctggaatggcaatgctctgtgaaaccattgaagaatgttgggatcacgacgcagaagccaggttatcagctggatgtgtaggtgaaagaattacccagatgcagagactaacaaatattattaccacagaggacattgtaacagtggtcacaatggtgacaaatgttgactttcctcccaaagaatctagtctatgatggttgcgccatctgtgcacactaagaaatgggactctgaactggagctgctaagctaaagaaactgcttacagtttattttctgtgtaaaatgagtaggatgtctcttggaaatgttaagaaagaagaccctttgttgaaaaatgttgctctgggagacttactgcattgccgacagcacagatgtgaaggacatgagactaagagaaaccttgcaaactctataaagaaacttttgaaaaagtgtacatgaagaatgtagccctctccaaatcaaggatcttttggacctggctaatggagtgtttgaaaactgacatcagatttcttaatgtctgtcagaagacactaattccttaaatgaactactgctattttttttaaatcaaaaacttttcatttcagattttaaaaagggtaacttgtttttattgcatttgctgttgtttctataaatgactattgtaatgccaatatgacacagcttgtgaatgtttagtgtgctgctgttctgtgtacataaagtcatcaaagtggggtacagtaaagaggcttccaagcattactttaacctccctcaacaaggtatacctcagttccacggttgctaaattataaaattgaaaacactaacaaaatttgaataataaatcgatccatgttttgtaacaaattcactgtgttatttaaggaaaaaaaggtaagctatgcttagtgccaacaataagtggccattcgtaaagcagtgttttagcatttcttgtgctggcttgtaatgtagggaaaaaaagtgctgttttttgaaaagatggtgtcatttcccccttcttcccatgttttaaagccccatcttatatccagttcccaaaatttgcatacttacctaagtattttttttaggtgtgctgtgtttggggaatatttgaaaatttaaagcatgatttaaaattttttaaagtgagctgtgacactggaaagctcttcattttatcttttaaaatagagttttttctatttatatatgtaaaattgtagtgtatttcttttcaccaaacagtgtgtgggacattctttatcactgttttaggatcacctcaggaagtgtcgttacccagaattccccactgtctgctatgagacttgtaactttatcactatacttctgcttggtgccatcttgtcagagtaatatttgatgtctgtgatatgtaaagaattatcctaggataaagatattaaactttaagcagatttcagatgttactgctttaaaacaaatcagggataacaaattaaacgtataacttaaaatatgcaatgacatttagaggtaaccaatgttgatataggtagcatagcctagcctcctccccaaaattgcttttacaactaacactgatactaatttaggatagttcatgccttatccttgctaagaaaatggaattgatggtaggcaggtgctaaagtgcttttcaaaacaatattacgttagaatacaattggattcttcctcaaatttatacaggccaaaaagtaaaacattaattttctgaatttccagattaccaatcaattaatcaacaaatagccagtattatgctgtgtatttctgtcaggtcattttaaaatccatgttaattttataaaagaattttttacatgtcactgtcaggagctcactgtgaatgtgttgtcttcaaatggttatttaaccacacagtacactacattttacatatatgtacgtaatctctgggaatagtaaattaattatgttatttataaacaatacataggtcaacagactttaagcagggaggaaaagaagagtaatagcgtctgtgtgctgcagaccattcagaactgtcacgtgtgtccccatggtctcattcattgtattcctagcaattcccttttcaatgttgagttcacctctttatttcacaaagtacttggtctctcaatttcttgatctggttttgcttccatttaaaaactaatcaagaagggaaaatattgagaatgtgcatacaagaaaatcattaatttcctgaagatgaatttctacctgttgtgaacatttaactttctttttaaaagttaaacaaaaataaacaagggatattatgatgaatgtttggcttatgtgagtactagagataaaatttttaaacccagttattcacaatataaaatgttttcaagttagaaaaaatttttagaaatcctgggtattgtatttaactgtagctaaccaattttaaaacttgtattcttttgagaactattattaatagaaaaactttttataagcagtaaaataagaatgttccagtgactacctgtccttatacctagtcttgttaaaactttcttttgcagggtatttagtgtttggtttacagtcagtgcagagtgggcaagttaacagaaagtttgagctagagatactggaaaaaaaaaagatcaaagaatgagaaaaatggtgatccattttggggcaaactgagaccccccaaataactctttcctcatgtgtatggtgctcct

SEQ ID NO: 286712 - DNA, 4325 bp, Homo sapiens
agctgcatttctgattatcagcctctgctaacagaagtggtcaagtgatatgtgctgttacgaaaggtacacaggaagaaattggggaaaaatgagtttgggaatcatctttatcccaaactatcttttatcatttagttggaatcagggattcctattcttttttgtagtagaaaactactttgctctttacctaaagacaatactccagctatgtgagactcggatagtgccaaaaagagtagtgagccattttcactggagtctgcaagtgtgttattcattgcaaatacttgctcttagaatggtaattactataccatctttgtgtctggaggttaaatgctaattttaaactataaaattttgtttttatactctaaatttgattgaaaacaaataggatagtaagagaagtaagaggaaaagaagattcaagaattgtcaaagtgtggaagacaagaaaatgataaaagaagaatgaaattgaatggactgattgtgtagaaaaaaaagacagccctgaagtatatttttgttgctgtgagggcaatatgtgtaatgaaaagttttcttattttccggagatggaagtcacacagcccacttcaaatccagttacacctaagccaccctattacaacatcctgctctattccttggtgccacttatgttaattgcggggattgtcatttgtgcattttgggtgtacaggcatcacaagatggcctaccctcctgtacttgttccaactcaagacccaggaccacccccaccttctccattactaggtttgaaaccactgcagttattagaagtgaaagcaaggggaagatttggttgtgtctggaaagcccagttgcttaacgaatatgtggctgtcaaaatatttccaatacaggacaaacagtcatggcaaaatgaatacgaagtctacagtttgcctggaatgaagcatgagaacatattacagttcattggtgcagaaaaacgaggcaccagtgttgatgtggatctttggctgatcacagcatttcatgaaaagggttcactatcagactttcttaaggctaatgtggtctcttggaatgaactgtgtcatattgcagaaaccatggctagaggattggcatatttacatgaggatatacctggcctaaaagatggccacaaacctgccatatctcacagggacatcaaaagtaaaaatgtgctgttgaaaaacaacctgacagcttgcattgctgactttgggttggccttaaaatttgaggctggcaagtctgcaggcgatacccatggacaggttggtacccggaggtacatggctccagaggtattagagggtgctataaacttccaaagggatgcatttttgaggatagatatgtatgccatgggattagtcctatgggaactggcttctcgctgtactgctgcagatggacctgtagatgaatacatgttgccatttgaggaggaaattggccagcatccatctcttgaagacatgcaggaagttgttgtgcataaaaaaaagaggcctgttttaagagattattggcagaaacatgctggaatggcaatgctctgtgaaaccattgaagaatgttgggatcacgacgcagaagccaggttatcagctggatgtgtaggtgaaagaattacccagatgcagagactaacaaatattattaccacagaggacattgtaacagtggtcacaatggtgacaaatgttgactttcctcccaaagaatctagtctatgatggttgcgccatctgtgcacactaagaaatgggactctgaactggagctgctaagctaaagaaactgcttacagtttattttctgtgtaaaatgagtaggatgtctcttggaaatgttaagaaagaagaccctttgttgaaaaatgttgctctgggagacttactgcattgccgacagcacagatgtgaaggacatgagactaagagaaaccttgcaaactctataaagaaacttttgaaaaagtgtacatgaagaatgtagccctctccaaatcaaggatcttttggacctggctaatggagtgtttgaaaactgacatcagatttcttaatgtctgtcagaagacactaattccttaaatgaactactgctattttttttaaatcaaaaacttttcatttcagattttaaaaagggtaacttgtttttattgcatttgctgttgtttctataaatgactattgtaatgccaatatgacacagcttgtgaatgtttagtgtgctgctgttctgtgtacataaagtcatcaaagtggggtacagtaaagaggcttccaagcattactttaacctccctcaacaaggtatacctcagttccacggttgctaaattataaaattgaaaacactaacaaaatttgaataataaatcgatccatgttttgtaacaaattcactgtgttatttaaggaaaaaaaggtaagctatgcttagtgccaacaataagtggccattcgtaaagcagtgttttagcatttcttgtgctggcttgtaatgtagggaaaaaaagtgctgttttttgaaaagatggtgtcatttcccccttcttcccatgttttaaagccccatcttatatccagttcccaaaatttgcatacttacctaagtattttttttaggtgtgctgtgtttggggaatatttgaaaatttaaagcatgatttaaaattttttaaagtgagctgtgacactggaaagctcttcattttatcttttaaaatagagttttttctatttatatatgtaaaattgtagtgtatttcttttcaccaaacagtgtgtgggacattctttatcactgttttaggatcacctcaggaagtgtcgttacccagaattccccactgtctgctatgagacttgtaactttatcactatacttctgcttggtgccatcttgtcagagtaatatttgatgtctgtgatatgtaaagaattatcctaggataaagatattaaactttaagcagatttcagatgttactgctttaaaacaaatcagggataacaaattaaacgtataacttaaaatatgcaatgacatttagaggtaaccaatgttgatataggtagcatagcctagcctcctccccaaaattgcttttacaactaacactgatactaatttaggatagttcatgccttatccttgctaagaaaatggaattgatggtaggcaggtgctaaagtgcttttcaaaacaatattacgttagaatacaattggattcttcctcaaatttatacaggccaaaaagtaaaacattaattttctgaatttccagattaccaatcaattaatcaacaaatagccagtattatgctgtgtatttctgtcaggtcattttaaaatccatgttaattttataaaagaattttttacatgtcactgtcaggagctcactgtgaatgtgttgtcttcaaatggttatttaaccacacagtacactacattttacatatatgtacgtaatctctgggaatagtaaattaattatgttatttataaacaatacataggtcaacagactttaagcagggaggaaaagaagagtaatagcgtctgtgtgctgcagaccattcagaactgtcacgtgtgtccccatggtctcattcattgtattcctagcaattcccttttcaatgttgagttcacctctttatttcacaaagtacttggtctctcaatttcttgatctggttttgcttccatttaaaaactaatcaagaagggaaaatattgagaatgtgcatacaagaaaatcattaatttcctgaagatgaatttctacctgttgtgaacatttaactttctttttaaaagttaaacaaaaataaacaagggatattatgatgaatgtttggcttatgtgagtactagagataaaatttttaaacccagttattcacaatataaaatgttttcaagttagaaaaaatttttagaaatcctgggtattgtatttaactgtagctaaccaattttaaaacttgtattcttttgagaactattattaatagaaaaactttttataagcagtaaaataagaatgttccagtgactacctgtccttatacctagtcttgttaaaactttcttttgcagggtatttagtgtttggtttacagtcagtgcagagtgggcaagttaacagaaagtttgagctagagatactggaaaaaaaaaagatcaaagaatgagaaaaatggtgatccattttggggcaaactgagaccccccaaataactctttcctcatgtgtatggtgctcct

SEQ ID NO: 286713 - DNA, 3390 bp, Homo sapiens
aacattttattagtttttttaatacagagaaaagacctcaaaaaaagttttttttttaaagctacatttcaaacagtatgcaaaggtacaattgaaaagtatgcagcatccttctcccagctgacaattggttcagtttcttgtgattacatccagaaaggggaacataaaaacttctaagtctgtaccagcataatgtctgttgatatattttttaagtatacgcagaaaggatctttctatttatacgctatagtgtgtataccttaccctggtaatagaccacatttggttttgattcatcttacaaaatcatatgttagttcataaagttaatgaatgagtactctttgcttttaacatctttttcaggttggtacccggaggtacatggctccagaggtattagagggtgctataaacttccaaagggatgcatttttgaggatagatatgtatgccatgggattagtcctatgggaactggcttctcgctgtactgctgcagatggacctgtagatgaatacatgttgccatttgaggaggaaattggccagcatccatctcttgaagacatgcaggaagttgttgtgcataaaaaaaagaggcctgttttaagagattattggcagaaacatgctggaatggcaatgctctgtgaaaccattgaagaatgttgggatcacgacgcagaagccaggttatcagctggatgtgtaggtgaaagaattacccagatgcagagactaacaaatattattaccacagaggacattgtaacagtggtcacaatggtgacaaatgttgactttcctcccaaagaatctagtctatgatggttgcgccatctgtgcacactaagaaatgggactctgaactggagctgctaagctaaagaaactgcttacagtttattttctgtgtaaaatgagtaggatgtctcttggaaatgttaagaaagaagaccctttgttgaaaaatgttgctctgggagacttactgcattgccgacagcacagatgtgaaggacatgagactaagagaaaccttgcaaactctataaagaaacttttgaaaaagtgtacatgaagaatgtagccctctccaaatcaaggatcttttggacctggctaatggagtgtttgaaaactgacatcagatttcttaatgtctgtcagaagacactaattccttaaatgaactactgctattttttttaaatcaaaaacttttcatttcagattttaaaaagggtaacttgtttttattgcatttgctgttgtttctataaatgactattgtaatgccaatatgacacagcttgtgaatgtttagtgtgctgctgttctgtgtacataaagtcatcaaagtggggtacagtaaagaggcttccaagcattactttaacctccctcaacaaggtatacctcagttccacggttgctaaattataaaattgaaaacactaacaaaatttgaataataaatcgatccatgttttgtaacaaattcactgtgttatttaaggaaaaaaaggtaagctatgcttagtgccaacaataagtggccattcgtaaagcagtgttttagcatttcttgtgctggcttgtaatgtagggaaaaaaagtgctgttttttgaaaagatggtgtcatttcccccttcttcccatgttttaaagccccatcttatatccagttcccaaaatttgcatacttacctaagtattttttttaggtgtgctgtgtttggggaatatttgaaaatttaaagcatgatttaaaattttttaaagtgagctgtgacactggaaagctcttcattttatcttttaaaatagagttttttctatttatatatgtaaaattgtagtgtatttcttttcaccaaacagtgtgtgggacattctttatcactgttttaggatcacctcaggaagtgtcgttacccagaattccccactgtctgctatgagacttgtaactttatcactatacttctgcttggtgccatcttgtcagagtaatatttgatgtctgtgatatgtaaagaattatcctaggataaagatattaaactttaagcagatttcagatgttactgctttaaaacaaatcagggataacaaattaaacgtataacttaaaatatgcaatgacatttagaggtaaccaatgttgatataggtagcatagcctagcctcctccccaaaattgcttttacaactaacactgatactaatttaggatagttcatgccttatccttgctaagaaaatggaattgatggtaggcaggtgctaaagtgcttttcaaaacaatattacgttagaatacaattggattcttcctcaaatttatacaggccaaaaagtaaaacattaattttctgaatttccagattaccaatcaattaatcaacaaatagccagtattatgctgtgtatttctgtcaggtcattttaaaatccatgttaattttataaaagaattttttacatgtcactgtcaggagctcactgtgaatgtgttgtcttcaaatggttatttaaccacacagtacactacattttacatatatgtacgtaatctctgggaatagtaaattaattatgttatttataaacaatacataggtcaacagactttaagcagggaggaaaagaagagtaatagcgtctgtgtgctgcagaccattcagaactgtcacgtgtgtccccatggtctcattcattgtattcctagcaattcccttttcaatgttgagttcacctctttatttcacaaagtacttggtctctcaatttcttgatctggttttgcttccatttaaaaactaatcaagaagggaaaatattgagaatgtgcatacaagaaaatcattaatttcctgaagatgaatttctacctgttgtgaacatttaactttctttttaaaagttaaacaaaaataaacaagggatattatgatgaatgtttggcttatgtgagtactagagataaaatttttaaacccagttattcacaatataaaatgttttcaagttagaaaaaatttttagaaatcctgggtattgtatttaactgtagctaaccaattttaaaacttgtattcttttgagaactattattaatagaaaaactttttataagcagtaaaataagaatgttccagtgactacctgtccttatacctagtcttgttaaaactttcttttgcagggtatttagtgtttggtttacagtcagtgcagagtgggcaagttaacagaaagtttgagctagagatactggaaaaaaaaaagatcaaagaatgagaaaaatggtgatccattttggggcaaactgagaccccccaaataactctttcctcatgtgtatggtgctcct

SEQ ID NO: 286714 - DNA, 3223 bp, Homo sapiens
atgggtaccttaaagggatattatataacgttaatttacaaatactgattgttccttatgtcctctgtgcagatggaaataggcatcctttatacctagataagaaagccccttatgcaatctttaagggaattacatgccaaattataggccttttcatttcccatacattagtttggtcacactgtggtataagtacagttgagagtctgtttctcttctgtcctcatagcatgtaaacagttgggaataggtgacagagtatattttagaaagtttgtaccagtttgaaagtcaggaggattttaatgaaaatgatttattttacttttcttacttttcaggacctgtagatgaatacatgttgccatttgaggaggaaattggccagcatccatctcttgaagacatgcaggaagttgttgtgcataaaaaaaagaggcctgttttaagagattattggcagaaacatgctggaatggcaatgctctgtgaaaccattgaagaatgttgggatcacgacgcagaagccaggttatcagctggatgtgtaggtgaaagaattacccagatgcagagactaacaaatattattaccacagaggacattgtaacagtggtcacaatggtgacaaatgttgactttcctcccaaagaatctagtctatgatggttgcgccatctgtgcacactaagaaatgggactctgaactggagctgctaagctaaagaaactgcttacagtttattttctgtgtaaaatgagtaggatgtctcttggaaatgttaagaaagaagaccctttgttgaaaaatgttgctctgggagacttactgcattgccgacagcacagatgtgaaggacatgagactaagagaaaccttgcaaactctataaagaaacttttgaaaaagtgtacatgaagaatgtagccctctccaaatcaaggatcttttggacctggctaatggagtgtttgaaaactgacatcagatttcttaatgtctgtcagaagacactaattccttaaatgaactactgctattttttttaaatcaaaaacttttcatttcagattttaaaaagggtaacttgtttttattgcatttgctgttgtttctataaatgactattgtaatgccaatatgacacagcttgtgaatgtttagtgtgctgctgttctgtgtacataaagtcatcaaagtggggtacagtaaagaggcttccaagcattactttaacctccctcaacaaggtatacctcagttccacggttgctaaattataaaattgaaaacactaacaaaatttgaataataaatcgatccatgttttgtaacaaattcactgtgttatttaaggaaaaaaaggtaagctatgcttagtgccaacaataagtggccattcgtaaagcagtgttttagcatttcttgtgctggcttgtaatgtagggaaaaaaagtgctgttttttgaaaagatggtgtcatttcccccttcttcccatgttttaaagccccatcttatatccagttcccaaaatttgcatacttacctaagtattttttttaggtgtgctgtgtttggggaatatttgaaaatttaaagcatgatttaaaattttttaaagtgagctgtgacactggaaagctcttcattttatcttttaaaatagagttttttctatttatatatgtaaaattgtagtgtatttcttttcaccaaacagtgtgtgggacattctttatcactgttttaggatcacctcaggaagtgtcgttacccagaattccccactgtctgctatgagacttgtaactttatcactatacttctgcttggtgccatcttgtcagagtaatatttgatgtctgtgatatgtaaagaattatcctaggataaagatattaaactttaagcagatttcagatgttactgctttaaaacaaatcagggataacaaattaaacgtataacttaaaatatgcaatgacatttagaggtaaccaatgttgatataggtagcatagcctagcctcctccccaaaattgcttttacaactaacactgatactaatttaggatagttcatgccttatccttgctaagaaaatggaattgatggtaggcaggtgctaaagtgcttttcaaaacaatattacgttagaatacaattggattcttcctcaaatttatacaggccaaaaagtaaaacattaattttctgaatttccagattaccaatcaattaatcaacaaatagccagtattatgctgtgtatttctgtcaggtcattttaaaatccatgttaattttataaaagaattttttacatgtcactgtcaggagctcactgtgaatgtgttgtcttcaaatggttatttaaccacacagtacactacattttacatatatgtacgtaatctctgggaatagtaaattaattatgttatttataaacaatacataggtcaacagactttaagcagggaggaaaagaagagtaatagcgtctgtgtgctgcagaccattcagaactgtcacgtgtgtccccatggtctcattcattgtattcctagcaattcccttttcaatgttgagttcacctctttatttcacaaagtacttggtctctcaatttcttgatctggttttgcttccatttaaaaactaatcaagaagggaaaatattgagaatgtgcatacaagaaaatcattaatttcctgaagatgaatttctacctgttgtgaacatttaactttctttttaaaagttaaacaaaaataaacaagggatattatgatgaatgtttggcttatgtgagtactagagataaaatttttaaacccagttattcacaatataaaatgttttcaagttagaaaaaatttttagaaatcctgggtattgtatttaactgtagctaaccaattttaaaacttgtattcttttgagaactattattaatagaaaaactttttataagcagtaaaataagaatgttccagtgactacctgtccttatacctagtcttgttaaaactttcttttgcagggtatttagtgtttggtttacagtcagtgcagagtgggcaagttaacagaaagtttgagctagagatactggaaaaaaaaaagatcaaagaatgagaaaaatggtgatccattttggggcaaactgagaccccccaaataactctttcctcatgtgtatggtgctcct

SEQ ID NO: 286715 - DNA, 1669 bp, Homo sapiens
ttttttttggtctgggcttccgaatatgttttatgacggttgattttacaccaggaggtttgtctccgaggaagacccagggaactggatatctagcgagaacttcctccggattccccggcgcctcgggaaaatgggagctgctgcaaagttggcgtttgccgtctttcttatctcctgttcttcaggtgctatacttggtagatcagaaactcaggagtgtcttttctttaatgctaattgggaaaaagacagaaccaatcaaactggtgttgaaccgtgttatggtgacaaagataaacggcggcattgttttgctacctggaagaatatttctggttccattgaaatagtgaaacaaggttgttggctggatgatatcaactgctatgacaggactgattgtgtagaaaaaaaagacagccctgaagtatatttttgttgctgtgagggcaatatgtgtaatgaaaagttttcttattttccggagatggaagtcacacagcccacttcaaatccagttacacctaagccaccctattacaacatcctgctctattccttggtgccacttatgttaattgcggggattgtcatttgtgcattttgggtgtacaggcatcacaagatggcctaccctcctgtacttgttccaactcaagacccaggaccacccccaccttctccattactaggtttgaaaccactgcagttattagaagtgaaagcaaggggaagatttggttgtgtctggaaagcccagttgcttaacgaatatgtggctgtcaaaatatttccaatacaggacaaacagtcatggcaaaatgaatacgaagtctacagtttgcctggaatgaagcatgagaacatattacagttcattggtgcagaaaaacgaggcaccagtgttgatgtggatctttggctgatcacagcatttcatgaaaagggttcactatcagactttcttaaggctaatgtggtctcttggaatgaactgtgtcatattgcagaaaccatggctagaggattggcatatttacatgaggatatacctggcctaaaagatggccacaaacctgccatatctcacagggacatcaaaagtaaaaatgtgctgttgaaaaacaacctgacagcttgcattgctgactttgggttggccttaaaatttgaggctggcaagtctgcaggcgatacccatggacaggttggtacccggaggtacatggctccagaggtattagagggtgctataaacttccaaagggatgcatttttgaggatagatatgtatgccatgggattagtcctatgggaactggcttctcgctgtactgctgcagatggtaagggaaaaaaatatttttaaaaaagatatatatgcctaccacacatatatgaaaagggatgatacactccaaggtaatattttaaagtacagtttttttttaattgactccaagagatggtagagaattcaggaggcaggggagcagtgggtggggtaggagaggaaaggaattgctatgtattgatcctttaccattactagctatgttgctggacacttcacataccttaaggttatttcctaaaacggtttcagaggtagttattatgctttacatatgaggaaattgagatgcagagaaattaagtagtttgc

SEQ ID NO: 286716 - DNA, 848 bp, Homo sapiens
ttttttttggtctgggcttccgaatatgttttatgacggttgattttacaccaggaggtttgtctccgaggaagacccagggaactggatatctagcgagaacttcctccggattccccggcgcctcgggaaaatgggagctgctgcaaagttggcgtttgccgtctttcttatctcctgttcttcaggtgctatacttggtagatcagaaactcaggagtgtcttttctttaatgctaattgggaaaaagacagaaccaatcaaactggtgttgaaccgtgttatggtgacaaagataaacggcggcattgttttgctacctggaagaatatttctggttccattgaaatagtgaaacaaggttgttggctggatgatatcaactgctatgacaggactgattgtgtagaaaaaaaagacagccctgaagtatatttttgttgctgtgagggcaatatgtgtaatgaaaagttttcttattttccggagatggaagtcacacagcccacttcaaatccagttacacctaagccaccctattacaacatcctgctctattccttggtgccacttatgttaattgcggggattgtcatttgtgcattttgggtgtacaggcatcacaagatggcctaccctcctgtacttgttccaactcaagacccaggaccacccccaccttctccattactaggtttgaaaccactgcagttattagaagtgaaagcaaggggaagatttggttgtgtctggaaagcccagttgcttaacgaatatgtggctgtcaaaatatttccaatacaggacaaacatatagctgtttcctggtaccgagctgactgtataa

SEQ ID NO: 286717 - DNA, 935 bp, Homo sapiens
accgaaaacgcggccgagcccggagcccggagctggagccagagcctggaccagaacttggccgccgcctgcaccgccgccgccgctgccgcccgccgccccttccccgcgccgcagccgcctcgccgccaccgccgcgagctcggccgccagtggtcctcggactttaggtgtctgggttgaaggtgctatacttggtagatcagaaactcaggagtgtcttttctttaatgctaattgggaaaaagacagaaccaatcaaactggtgttgaaccgtgttatggtgacaaagataaacggcggcattgttttgctacctggaagaatatttctggttccattgaaatagtgaaacaaggttgttggctggatgatatcaactgctatgacaggatagtaagagaagtaagaggaaaagaagattcaagaattgtcaaagtgtggaagacaagaaaatgataaaagaagaatgaaattgaatggactgattgtgtagaaaaaaaagacagccctgaagtatatttttgttgctgtgagggcaatatgtgtaatgaaaagttttcttattttccggagatggaagtcacacagcccacttcaaatccagttacacctaagccaccctattacaacatcctgctctattccttggtgccacttatgttaattgcggggattgtcatttgtgcattttgggtgtacaggcatcacaagatggcctaccctcctgtacttgttccaactcaagacccaggaccacccccaccttctccattactaggtttgaaaccactgcagttattagaagtgaaagcaaggggaagatttggttgtgtctggaaagcccagttgcttaacgaatatgtggctgtcaaaatatttccaatacaggacaaacatatagctgtttcctggtaccgagctgactgtataa

SEQ ID NO: 286718 - DNA, 551 bp, Homo sapiens
  misc_feature (16)..(16): n is a, c, g, or t
tgagatggagcttctntcttgttgcccatcctagagtgcaatggagtgagactccatctcaaaaagtaataataataaatgaattaaaaataaataaaaataaaaaagcctcaattagggctgggcacagtgggtcatgcctataatcctagcacttgggaggctgaggcaggtggatcacttgagccactgcactcaggcccccttgtgactttccttataacattttcttttctctagtttactgtattgtaagaatacagtgtataagatacaaaatatatactgaaaatatgtactgactatgttagcagtaagtaactactaatagcatactactggtcaacagcaggctattagttaagtttttagggagtcaaaagttatacacggatttttcaactgtgcagggcagggggtgttggtgcccctaacccctgagttgttcaaggatcaactgagtttgtcttctgtttgcactgcactgtcagacatttataacatccaacgatcagagacaatttgtccatcggcaaccctgacaggactaa

SEQ ID NO: 286719 - DNA, 584 bp, Homo sapiens
ctcggacgagcggcgggcacccgctgagcggacggcggccgcgtagtgaggacctggacatcgctgtgtggctggccacggtgcacctggagcagtatgcagacacgttccgacggcatggcctggctacagcaggtgcagcccggggcctgggccacgaggagttgaagcagttgggcatcagcgccacagggcaccggaaacgcattctacgcctgctacagacaggcaccgaagagggctccctggatcccaaatcagatagtgccatggaaccatcccccagcccagccccgcaagcccagccccctaagcccgtgccgaagcccaggaccgtgtttggtggactcagtggccctgccaccactcagagacctgggctgagcccagccctcgggggaccaggagtgtccaggagcccagagcccagcccaaggcctcctcctctccccacttcctcctctgagcagtcttcagccctaaatactgtggagatgatgcctaattccatctacttcggcctggactcaagaggcagggcacaggcagctcaggacaaggccccagacagctcccaaatctct

SEQ ID NO: 286720 - DNA, 894 bp, Homo sapiens
gtgcagtcaggcaggagcagagctttgacccagacccagggtgggcaggaactgaggggccaactctagcactgacttactgtgaacctggggcaagccccttcccctctctgggcctcagtttccttaacttcaaatgaagtcccttccctaagtagagagccattgctgttgttctgggatggctctgcttccagatcgcaggcctttcagcatctttctttggaggaagattggaggctggtgctcactgtccaggcctcagactctggggcagagagggggattctcagcctgagccctcccttcaccctgcccctccccccagcaatggcctgagcccccatggctgcccctcaggacctggacatcgctgtgtggctggccacggtgcacctggagcagtatgcagacacgttccgacggcatggcctggctacagcaggtgcagcccggggcctgggccacgaggagttgaagcagttgggcatcagcgccacagggcaccggaaacgcattctacgcctgctacagacaggcaccgaagagggctccctggatcccaaatcagatagtgccatggaaccatcccccagcccagccccgcaagcccagccccctaagcccgtgccgaagcccaggaccgtgtttggtggactcagtggccctgccaccactcagagacctgggctgagcccagccctcgggggaccaggagtgtccaggagcccagagcccagcccaaggcctcctcctctccccacttcctcctctgagcagtcttcagccctaaatactgtggagatgatgcctaattccatctacttcggcctggactcaagaggcagggcacaggcagctcaggacaaggccccagacagctcccaaatctct

SEQ ID NO: 286721 - DNA, 616 bp, Homo sapiens
ctcggacgagcggcgggcacccgctgagcggacggcggccgcgtagtgagcaatggcctgagcccccatggctgcccctcaggacctggacatcgctgtgtggctggccacggtgcacctggagcagtatgcagacacgttccgacggcatggcctggctacagcaggtgcagcccggggcctgggccacgaggagttgaagcagttgggcatcagcgccacagggcaccggaaacgcattctacgcctgctacagacaggcaccgaagagggctccctggatcccaaatcagatagtgccatggaaccatcccccagcccagccccgcaagcccagccccctaagcccgtgccgaagcccaggaccgtgtttggtggactcagtggccctgccaccactcagagacctgggctgagcccagccctcgggggaccaggagtgtccaggagcccagagcccagcccaaggcctcctcctctccccacttcctcctctgagcagtcttcagccctaaatactgtggagatgatgcctaattccatctacttcggcctggactcaagaggcagggcacaggcagctcaggacaaggccccagacagctcccaaatctct

SEQ ID NO: 286722 - DNA, 326 bp, Homo sapiens
tctccctgcaagaaacaagggcacagccgtgggcagagacttgggccaagaagggcacttccagccagggggatcggcttctccttaaccccacagaatgaccagggccccggcaatggagacctgtgctccttggcacgtcatccaccaaactccacagtcagggccccggcaaaggctggtcagaaggcagtgaactggggagaggacaggtaagggctgctgggcagcacccagaggagttaaacgtggactccaggaaagagggaacggatcagggagcgcccaggttgtgatggcccagggtgggtaactcaggggccgtc

SEQ ID NO: 286723 - DNA, 909 bp, Homo sapiens
gacctgcctttgcctctcctttgtcctctgccatgagtgtgaggcctccccagccatgtggaactcaaaggcttgactgaagtcacgggtctcatcattcctttcctaagctttcttcaaacagcatggtgcgtggatgaggacacacgtgctctgtagaaggtggggccacaaagccctgccgaccgacctttcctgccttctgcctctaaggtgcaaccccgaaagcacctgctggaacctttggggctcagggagcacagcctggaagcagggggatactccccagggctgcagtccacctcggaagctgctcaccacaggtgtctgcttacacttcaattcagatcacataagatacacatgcagctcttaggcttctgagccacccttcaagagcacagccactcgtggctaatggctgctgactggaaccctggatggcccaatctggaacttttcatcaccccagagcatcctgtgcagtgcttctcccggggagccctgcaggcagtgacctccagctccgagcctgatcccacatgagcaggaagaagacagcccagggaggctgcccacagccacaagctcatttctcatggcaaaccacaaatgggagatgctaagaaattagaatagaggatgctccagagcagacgctcctgtttacagagctgaaactcagtactcattaaacaactccctcctgcagccacgctgggagctgacactctccacacatgcttcatgcacccaggcgctcatccagggatcatcctgtacctcaaatacccccaagaactgtcctgccccaggacctttgcacatgctggacccactacctgtgatgccctcttctggctcaccacgtggctggctccatctcattcattggtctcagcccagtgg

SEQ ID NO: 286724 - DNA, 823 bp, Homo sapiens
tttattgttgtttgtttcttatacttttccttgctttcctcactttctgccatgggaatatgtccttgtatgtgtgctgagtaaaacaaagaggagggaatgattcacacacagtttagctcctgtcttgggtaggtggtgcctagcacttctgcctcctggccacagaagtcccagggaagaaagatgaagtgcctggtggctccaaggcagccacctcatttatcctctttggtctcaccttttcatctcaaggcccgacaccccaccctccaaaccagtggcctttgaggagtttaagaatgagcaaggtagtgagatcaaccgaattttcaaagaaaacaaatccatcttgaatgaacggaggaaaagggccagcgagaccacacagcacatcaatgccatcaagcgggagattgatgtgaccaaggaggccctgaatttccagaagtcactacgggagaagcaaggtaaatgtgttggaaagagggctagggagctttggggtctcagagtcatgctggttgaagcagaacagcacttggcactagaggtctgagatgggagggggccagtgggggtgctgggatgtggccttcacccataggtcagatcacttagctctggtcagcccctgagagccgcagagtcctccctgtcagccagcctctgcctgtgggtcccatcattgttgctcattatctcagacctaggtgctgggccttccaccccatatgtgctactgtccctggtgaaacaggccctttgtcctgcagaggtatcactgggagatgggtagctggtgacctctacaaggtccgtg

SEQ ID NO: 286725 - DNA, 700 bp, Homo sapiens
agggaggcctcactgccagcaaccagagcaatgaggctggagcccaggcctctgttaccaggctcactattccctctggcataattcaaggcctccctatgcttatggaatctatctaaaacttgtttaataagaacatgataaatttgacctcatatcataggtggggaaacaaagacagcaccgtgtgaactagggttagaggtgctaaaactagaaagtgctccactctcctgatctttccatctccctgcaggaactctcttctcccatcccaaagaattcatctggaatatcagcccctacgtgggagtccccattcatcctacagttcatttcctctgttccctccagattaggcctcagctatcagtgattttttttatacccatttttgaacaaataacatttttttctttctcactcttttttcctagagcattgatattcacttaaaaaaagacattcggagaggagttgtcaataaccaacagacagactggtcgtttaagttggatggagttcttcacgatgcctcccaggacttggtttatgagacagttgcaaaggatgtggtttctcaggccctcgatggctataatggtaacttaattaattaaatgttgtcttatgtaagaacctgaggagtaagagatgcaaatattttatggtgaataaaataaaagctcacttactatca

SEQ ID NO: 286726 - DNA, 491 bp, Homo sapiens
agcggggtctccgtgccgagggacccgtaggaacgggaacattgtcttcctccaggcagccccgcgtggggagtgcaggtggtttcggttgcggcagtcgcgtcccgggagcgtcgctgcctggtgaacgctagaatgggtactaggaaaaaagttcatgcatttgtccgtgtcaaacccaccgatgactttgctcatgaaatgatcagatacggagatgacaaaagaagcattgatattcacttaaaaaaagacattcggagaggagttgtcaataaccaacagacagactggtcgtttaagttggatggagttcttcacgatgcctcccaggacttggtttatgagacagttgcaaaggatgtggtttctcaggccctcgatggctataatggtaacttaattaattaaatgttgtcttatgtaagaacctgaggagtaagagatgcaaatattttatggtgaataaaataaaagctcacttactatca

SEQ ID NO: 286727 - DNA, 298 bp, Homo sapiens
cctggcatctgataactcactgtccatgactgaaccctggggcttccgtgccttcttccagctccttggcaagaaaggaaggtgccagcagccctgtgaatgggaaggacttggattacgtttccacctccaagacccagctggtcccatcctccaaagatggggatgtcaaagacatgctttcgcgggaccgggaaacttccagcattgagccccttccctcagactccccgaaggaggaattacgcccaattaggtaatcagctaatgttagcttctgcaccagatcaaacaaaac

SEQ ID NO: 286728 - DNA, 3118 bp, Homo sapiens
ttcagtggtgcccatcagcatgtggagccggccaccgcccctgcctccatagaagcccgctgccgcccagtccgcggtaccttgagggtcacgtcgcacagcttgccctgccgccggatctcctccatgacgccgtagccgcgactaggcaactcagacacggagaagtgcaccagatcctccagctcctccgcgccgtcctccaccatcttccccggccgctgcaactgcgcaggcctcgccggccggctagacactaaccagggcggggcgatagcgcacgccgacagccgctcggagcgcggagcagcaatcggacgggcctccgcggccgccgtagttgaatctcctcggcgccggaagccccgccactccgcttcctggttcatgtgcggccttcgttccctcgctatctcgaccttgacttcgcatgtgcatccgccgaagtctttctagatcaatcggccccatctctcgtcttcccgattcggccatgacctcacccgtatcctcgacgtaggacctcggacttcatttccgccaccccgacacttccggaatccccggaagcgacccgttgccatggcgactatgtacacagccaggcagccccgcgtggggagtgcaggtggtttcggttgcggcagtcgcgtcccgggagcgtcgctgcctggtgaacgctagaatgggtactaggaaaaaagttcatgcatttgtccgtgtcaaacccaccgatgactttgctcatgaaatgatcagatacggagatgacaaaagaagcattgatattcacttaaaaaaagacattcggagaggagttgtcaataaccaacagacagactggtcgtttaagttggatggagttcttcacgatgcctcccaggacttggtttatgagacagttgcaaaggatgtggtttctcaggccctcgatggctataatggcaccatcatgtgttatgggcagacgggagctggcaagacatacaccatgatgggggcaactgagaattacaagcaccgggggatcctccctcgtgccctgcagcaggtttttaggatgatcgaagaacgccccacacatgccatcactgtgcgtgtttcctacttggaaatctataatgagagcctgtttgatctcctgtccactctgccctatgttggaccctcagtcacaccaatgaccatcgtggaaaaccctcaaggagtcttcattaagggcttgtcagttcacctcacaagtcaggaggaggatgcattcagcctcctttttgagggtgagaccaacaggattatagcctcccacactatgaacaaaaactcttccagatcacactgcattttcaccatctacttagaggcccattcccggaccttatcagaggaaaagtacatcacttccaaaattaacttggtggatctggcaggctcagagaggctggggaagtctgggtctgagggccaagtcctgaaggaagccacctacatcaacaaatcgctctcattcctggagcaggccatcattgcccttggggaccagaagcgggaccacatcccctttcggcagtgcaagctcacccacgctctgaaggactcgttagggggaaactgcaatatggtcctcgtgacaaacatctatggagaagctgcccagttagaagaaacgctatcttcactgagatttgccagcaggatgaagctagtcaccactgagcctgccatcaatgaaaagtatgatgctgagagaatggtcaagaacctggagaaggaactagcactactcaagcaggagctggctatccatgacagcctgaccaaccgcacctttgtgacctatgaccccatggatgaaatccagattgctgagatcaactcccaggtgcggaggtacctggaggggacactggacgagatcgacataatcagccttagacagatcaaggaggtgttcaaccagttccgggtggttctgagccaacaggaacaggaagtggagtccactttgcgcaggaagtacaccctcattgacaggaatgactttgcagccatttctgctatccagaaggcggggcttgtggatgttgatggccacctagtgggtgagcctgaaggacaaaactttggactcggagtcgcccctttctctaccaaacctgggaagaaagccaagtccaagaagacattcaaagagccactcaggcccgacaccccaccctccaaaccagtggcctttgaggagtttaagaatgagcaaggtagtgagatcaaccgaattttcaaagaaaacaaatccatcttgaatgaacggaggaaaagggccagcgagaccacacagcacatcaatgccatcaagcgggagattgatgtgaccaaggaggccctgaatttccagaagtcactacgggagaagcaaggcaagtacgaaaacaaggggctgatgatcatcgatgaggaagaattcctgctgatcctcaagctcaaagacctcaagaagcagtaccgcagcgagtaccaggacctgcgtgacctcagggctgagatccagtattgccagcacctagtggatcagtgtcgccaccgcctgctcatggaatttgacatctggtacaatgagtcctttgtcatccctgaggacatgcagatggcactgaagccaggcggcagcatccggccaggcatggtccctgtgaacaggattgtgtctctgggagaagatgaccaggacaaattcagccagctgcagcagagggtgcttcctgagggccctgattccatctccttctacaatgccaaagtcaagatagagcagaagcataattacttgaaaaccatgatgggcctccagcaggcacatagaaaatagaacctcatcgccagtaccttaaaggacaagaccagcaactcccacctactgtagtggagctgctcaaccacctgcccagagctgcagccccctctactccaatgctgggacccagcacagagaacacatttggcctgcatgttgggaggagcatcctccaaggacaaccttgctcatctccacagagcactttgggttttaattcactgtcttatatgcagggacaggataaaataactttctagtttggacttt

SEQ ID NO: 286729 - DNA, 2827 bp, Homo sapiens
tttgatagtaagtgagcttttattttattcaccataaaatatttgcatctcttactcctcaggttcttacataagacaacatttaattaattaagttaccattatagccatcgagggcctgagaaaccacatccttcgcatgtgcatccgccgaagtctttctagatcaatcggccccatctctcgtcttcccgattcggccatgacctcacccgtatcctcgacgtaggacctcggacttcatttccgccaccccgacacttccggaatccccggaagcgacccgttgccatggcgactatgtacacagccaggcagccccgcgtggggagtgcaggtggtttcggttgcggcagtcgcgtcccgggagcgtcgctgcctggtgaacgctagaatgggtactaggaaaaaagttcatgcatttgtccgtgtcaaacccaccgatgactttgctcatgaaatgatcagatacggagatgacaaaagaagcattgatattcacttaaaaaaagacattcggagaggagttgtcaataaccaacagacagactggtcgtttaagttggatggagttcttcacgatgcctcccaggacttggtttatgagacagttgcaaaggatgtggtttctcaggccctcgatggctataatggcaccatcatgtgttatgggcagacgggagctggcaagacatacaccatgatgggggcaactgagaattacaagcaccgggggatcctccctcgtgccctgcagcaggtttttaggatgatcgaagaacgccccacacatgccatcactgtgcgtgtttcctacttggaaatctataatgagagcctgtttgatctcctgtccactctgccctatgttggaccctcagtcacaccaatgaccatcgtggaaaaccctcaaggagtcttcattaagggcttgtcagttcacctcacaagtcaggaggaggatgcattcagcctcctttttgagggtgagaccaacaggattatagcctcccacactatgaacaaaaactcttccagatcacactgcattttcaccatctacttagaggcccattcccggaccttatcagaggaaaagtacatcacttccaaaattaacttggtggatctggcaggctcagagaggctggggaagtctgggtctgagggccaagtcctgaaggaagccacctacatcaacaaatcgctctcattcctggagcaggccatcattgcccttggggaccagaagcgggaccacatcccctttcggcagtgcaagctcacccacgctctgaaggactcgttagggggaaactgcaatatggtcctcgtgacaaacatctatggagaagctgcccagttagaagaaacgctatcttcactgagatttgccagcaggatgaagctagtcaccactgagcctgccatcaatgaaaagtatgatgctgagagaatggtcaagaacctggagaaggaactagcactactcaagcaggagctggctatccatgacagcctgaccaaccgcacctttgtgacctatgaccccatggatgaaatccagattgctgagatcaactcccaggtgcggaggtacctggaggggacactggacgagatcgacataatcagccttagacagatcaaggaggtgttcaaccagttccgggtggttctgagccaacaggaacaggaagtggagtccactttgcgcaggaagtacaccctcattgacaggaatgactttgcagccatttctgctatccagaaggcggggcttgtggatgttgatggccacctagtgggtgagcctgaaggacaaaactttggactcggagtcgcccctttctctaccaaacctgggaagaaagccaagtccaagaagacattcaaagagccactcaggcccgacaccccaccctccaaaccagtggcctttgaggagtttaagaatgagcaaggtagtgagatcaaccgaattttcaaagaaaacaaatccatcttgaatgaacggaggaaaagggccagcgagaccacacagcacatcaatgccatcaagcgggagattgatgtgaccaaggaggccctgaatttccagaagtcactacgggagaagcaaggcaagtacgaaaacaaggggctgatgatcatcgatgaggaagaattcctgctgatcctcaagctcaaagacctcaagaagcagtaccgcagcgagtaccaggacctgcgtgacctcagggctgagatccagtattgccagcacctagtggatcagtgtcgccaccgcctgctcatggaatttgacatctggtacaatgagtcctttgtcatccctgaggacatgcagatggcactgaagccaggcggcagcatccggccaggcatggtccctgtgaacaggattgtgtctctgggagaagatgaccaggacaaattcagccagctgcagcagagggtgcttcctgagggccctgattccatctccttctacaatgccaaagtcaagatagagcagaagcataattacttgaaaaccatgatgggcctccagcaggcacatagaaaatagaacctcatcgccagtaccttaaaggacaagaccagcaactcccacctactgtagtggagctgctcaaccacctgcccagagctgcagccccctctactccaatgctgggacccagcacagagaacacatttggcctgcatgttgggaggagcatcctccaaggacaaccttgctcatctccacagagcactttgggttttaattcactgtcttatatgcagggacaggataaaataactttctagtttggacttt

SEQ ID NO: 286730 - DNA, 3179 bp, Homo sapiens
ttcagtggtgcccatcagcatgtggagccggccaccgcccctgcctccatagaagcccgctgccgcccagtccgcggtaccttgagggtcacgtcgcacagcttgccctgccgccggatctcctccatgacgccgtagccgcgactaggcaactcagacacggagaagtgcaccagatcctccagctcctccgcgccgtcctccaccatcttccccggccgctgcaactgcgcaggcctcgccggccggctagacactaaccagggcggggcgatagcgcacgccgacagccgctcggagcgcggagcagcaatcggacgggcctccgcggccgccgtagttgaatctcctcggcgccggaagccccgccactccgcttcctggttcatgtgcggccttcgttccctcgctatctcgaccttgacttcgcatgtgcatccgccgaagtctttctagatcaatcggccccatctctcgtcttcccgattcggccatgacctcacccgtatcctcgacgtaggacctcggacttcatttccgccaccccgacacttccggaatccccggaagcgacccgttgccatggcgactatgtacacagccaggcagccccgcgtggggagtgcaggtggtttcggttgcggcagtcgcgtcccgggagcgtcgctgcctggtgaacgctagaatgggtactaggaaaaaagttcatgcatttgtccgtgtcaaacccaccgatgactttgctcatgaaatgatcagatacggagatgacaaaagaagcattgatattcacttaaaaaaagacattcggagaggagttgtcaataaccaacagacagactggtcgtttaagttggatggagttcttcacgatgcctcccaggacttggtttatgagacagttgcaaaggatgtggtttctcaggccctcgatggctataatggcaccatcatgtgttatgggcagacgggagctggcaagacatacaccatgatgggggcaactgagaattacaagcaccgggggatcctccctcgtgccctgcagcaggtttttaggatgatcgaagaacgccccacacatgccatcactgtgcgtgtttcctacttggaaatctataatgagagcctgtttgatctcctgtccactctgccctatgttggaccctcagtcacaccaatgaccatcgtggaaaaccctcaaggagtcttcattaagggcttgtcagttcacctcacaagtcaggaggaggatgcattcagcctcctttttgagggtgagaccaacaggattatagcctcccacactatgaacaaaaactcttccagatcacactgcattttcaccatctacttagaggcccattcccggaccttatcagaggaaaagtacatcacttccaaaattaacttggtggatctggcaggctcagagaggctggggaagtctgggtctgagggccaagtcctgaaggaagccacctacatcaacaaatcgctctcattcctggagcaggccatcattgcccttggggaccagaagcgggaccacatcccctttcggcagtgcaagctcacccacgctctgaaggactcgttagggggaaactgcaatatggtcctcgtgacaaacatctatggagaagctgcccagttagaagaaacgctatcttcactgagatttgccagcaggatgaagctagtcaccactgagcctgccatcaatgaaaagtatgatgctgagagaatggtcaagaacctggagaaggaactagcactactcaagcaggagctggctatccatgacagcctgaccaaccgcacctttgtgacctatgaccccatggatgaaatccagattgctgagatcaactcccaggtgcggaggtacctggaggggacactggacgagatcgacataatcagccttagacagatcaaggaggtgttcaaccagttccgggtggttctgagccaacaggaacaggaagtggagtccactttgcgcaggaagtacaccctcattgacaggaatgactttgcagccatttctgctatccagaaggcggggcttgtggatgttgatggccacctagtgggtgagcctgaaggacaaaactttggactcggagtcgcccctttctctaccaaacctgggaagaaagccaagtccaagaagacattcaaagagccactcaggcccgacaccccaccctccaaaccagtggcctttgaggagtttaagaatgagcaaggtagtgagatcaaccgaattttcaaagaaaacaaatccatcttgaatgaacggaggaaaagggccagcgagaccacacagcacatcaatgccatcaagcgggagattgatgtgaccaaggaggccctgaatttccagaagtcactacgggagaagcaaggcaagtacgaaaacaaggggctgatgatcatcgatgaggaagaattcctgctgatcctcaagctcaaagacctcaagaagcagtaccgcagcgagtaccaggacctgcgtgacctcagggctgagatccagtattgccagcacctagtggatcagtgtcgccaccgcctgctcatggaatttgacatctggtacaatgagtcctttgtcatccctgaggacatgcagatggcactgaagccaggcggcagcatccggccaggcatggtccctgtgaacaggattgtgtctctgggagaagatgaccaggacaaattcagccagctgcagcagagggtgcttcctgagggccctgattccatctccttctacaatgccaaagtcaagatagagcagaagcataattacttgaaaaccatgatgggcctccagcaggcacatagaaaatagaacctcatcgccagtaccttaaaggacaagaccagcaactcccacctactgtagtggagctgctcaaccacctgcccagagctgcagccccctctactccaatgctgggacccagcacagagaacacatttggcctgcatgttgggaggagcatcctccaaggacaaccttgctcatctccacagagcactttgggttttaattcactgtcttatatgcagggacaggataaaataactttctagtttggactttcagtgctcatctgagaactttgtcttatttcctgtctgaaaggacatattctctatgtatg

SEQ ID NO: 286731 - DNA, 2962 bp, Homo sapiens
ttcagtggtgcccatcagcatgtggagccggccaccgcccctgcctccatagaagcccgctgccgcccagtccgcggtaccttgagggtcacgtcgcacagcttgccctgccgccggatctcctccatgacgccgtagccgcgactaggcaactcagacacggagaagtgcaccagatcctccagctcctccgcgccgtcctccaccatcttccccggccgctgcaactgcgcaggcctcgccggccggctagacactaaccagggcggggcgatagcgcacgccgacagccgctcggagcgcggagcagcaatcggacgggcctccgcggccgccgtagttgaatctcctcggcgccggaagccccgccactccgcttcctggttcatgtgcggccttcgttccctcgctatctcgaccttgacttcgcatgtgcatccgccgaagtctttctagatcaatcggccccatctctcgtcttcccgattcggccatgacctcacccgtatcctcgacgtaggacctcggacttcatttccgccaccccgacacttccggaatccccggaagcgacccgttgccatggcgactatgtacacagccaggcagccccgcgtggggagtgcaggtggtttcggttgcggcagtcgcgtcccgggagcgtcgctgcctggtgaacgctagaatgggtactaggaaaaaagttcatgcatttgtccgtgtcaaacccaccgatgactttgctcatgaaatgatcagatacggagatgacaaaagaagcattgatattcacttaaaaaaagacattcggagaggagttgtcaataaccaacagacagactggtcgtttaagttggatggagttcttcacgatgcctcccaggacttggtttatgagacagttgcaaaggatgtggtttctcaggccctcgatggctataatggcaccatcatgtgttatgggcagacgggagctggcaagacatacaccatgatgggggcaactgagaattacaagcaccgggggatcctccctcgtgccctgcagcaggtttttaggatgatcgaagaacgccccacacatgccatcactgtgcgtgtttcctacttggaaatctataatgagagcctgtttgatctcctgtccactctgccctatgttggaccctcagtcacaccaatgaccatcgtggaaaaccctcaaggagtcttcattaagggcttgtcagttcacctcacaagtcaggaggaggatgcattcagcctcctttttgagggtgagaccaacaggattatagcctcccacactatgaacaaaaactcttccagatcacactgcattttcaccatctacttagaggcccattcccggaccttatcagaggaaaagtacatcacttccaaaattaacttggtggatctggcaggctcagagaggctggggaagtctgggtctgagggccaagtcctgaaggaagccacctacatcaacaaatcgctctcattcctggagcaggccatcattgcccttggggaccagaagcgggaccacatcccctttcggcagtgcaagctcacccacgctctgaaggactcgttagggggaaactgcaatatggtcctcgtgacaaacatctatggagaagctgcccagttagaagaaacgctatcttcactgagatttgccagcaggatgaagctagtcaccactgagcctgccatcaatgaaaagtatgatgctgagagaatggtcaagaacctggagaaggaactagcactactcaagcaggagctggctatccatgacagcctgaccaaccgcacctttgtgacctatgaccccatggatgaaatccagattgctgagatcaactcccaggtgcggaggtacctggaggggacactggacgagatcgacataatcagccttagacagatcaaggaggtgttcaaccagttccgggtggttctgagccaacaggaacaggaagtggagtccactttgcgcaggaagtacaccctcattgacaggaatgactttgcagccatttctgctatccagaaggcggggcttgtggatgttgatggccacctagtgggtgagcctgaaggacaaaactttggactcggagtcgcccctttctctaccaaacctgggaagaaagccaagtccaagaagacattcaaagagccactcagctccttggcaagaaaggaaggtgccagcagccctgtgaatgggaaggacttggattacgtttccacctccaagacccagctggtcccatcctccaaagatggggatgtcaaagacatgctttcgcgggaccgggaaacttccagcattgagccccttccctcagactccccgaaggaggaattacgcccaattaggcccgacaccccaccctccaaaccagtggcctttgaggagtttaagaatgagcaaggtagtgagatcaaccgaattttcaaagaaaacaaatccatcttgaatgaacggaggaaaagggccagcgagaccacacagcacatcaatgccatcaagcgggagattgatgtgaccaaggaggccctgaatttccagaagtcactacgggagaagcaagacaggaaacaccacaggttactgggctttccctcgctaaatcacaaccctgttccaggccagcttccatgagtgatctccagatgtcacttggtttattcctgcaagtcagatgcatcatctcactcacagggggtgcattttactcatttatttctcagaggagcagggcgtggtggcacacacttgtaatcctagcatcttgggaggctgaggcatgaaaatcgcttgagcccaggaggcagaggttgtagtgaggcaagattgcgccactgcactccagtctgggtgacagatgaagactgtcttggaaaaaaaatataataacaattaaacaattatttctcagagggc

SEQ ID NO: 286732 - DNA, 3534 bp, Homo sapiens
ttcagtggtgcccatcagcatgtggagccggccaccgcccctgcctccatagaagcccgctgccgcccagtccgcggtaccttgagggtcacgtcgcacagcttgccctgccgccggatctcctccatgacgccgtagccgcgactaggcaactcagacacggagaagtgcaccagatcctccagctcctccgcgccgtcctccaccatcttccccggccgctgcaactgcgcaggcctcgccggccggctagacactaaccagggcggggcgatagcgcacgccgacagccgctcggagcgcggagcagcaatcggacgggcctccgcggccgccgtagttgaatctcctcggcgccggaagccccgccactccgcttcctggttcatgtgcggccttcgttccctcgctatctcgaccttgacttcgcatgtgcatccgccgaagtctttctagatcaatcggccccatctctcgtcttcccgattcggccatgacctcacccgtatcctcgacgtaggacctcggacttcatttccgccaccccgacacttccggaatccccggaagcgacccgttgccatggcgactatgtacacagccaggcagccccgcgtggggagtgcaggtggtttcggttgcggcagtcgcgtcccgggagcgtcgctgcctggtgaacggtgagcaggggctgctcgccggtgggagtggggagacgggaaaagggtgtgcgcccggactgctgaaagtggctggggtccaaaaaccgctttatctgggggttcccagctgggtcgctcatctctgaaacccaggcgaaggagggctcgacgtcgcgggagtcctttcaacctgaccgcggcttacggtcttcggagctaatgttcattggtcccacaaaggggtcccacgtcgcgtccaggacatagaggccgtgaggcagggagccagaggtcgtctggactcttccgtactagtcagttttcgaactagagggggctttgggatcaccagtcggagcccttcgtgttacagctagaatgggtactaggaaaaaagttcatgcatttgtccgtgtcaaacccaccgatgactttgctcatgaaatgatcagatacggagatgacaaaagaagcattgatattcacttaaaaaaagacattcggagaggagttgtcaataaccaacagacagactggtcgtttaagttggatggagttcttcacgatgcctcccaggacttggtttatgagacagttgcaaaggatgtggtttctcaggccctcgatggctataatggcaccatcatgtgttatgggcagacgggagctggcaagacatacaccatgatgggggcaactgagaattacaagcaccgggggatcctccctcgtgccctgcagcaggtttttaggatgatcgaagaacgccccacacatgccatcactgtgcgtgtttcctacttggaaatctataatgagagcctgtttgatctcctgtccactctgccctatgttggaccctcagtcacaccaatgaccatcgtggaaaaccctcaaggagtcttcattaagggcttgtcagttcacctcacaagtcaggaggaggatgcattcagcctcctttttgagggtgagaccaacaggattatagcctcccacactatgaacaaaaactcttccagatcacactgcattttcaccatctacttagaggcccattcccggaccttatcagaggaaaagtacatcacttccaaaattaacttggtggatctggcaggctcagagaggctggggaagtctgggtctgagggccaagtcctgaaggaagccacctacatcaacaaatcgctctcattcctggagcaggccatcattgcccttggggaccagaagcgggaccacatcccctttcggcagtgcaagctcacccacgctctgaaggactcgttagggggaaactgcaatatggtcctcgtgacaaacatctatggagaagctgcccagttagaagaaacgctatcttcactgagatttgccagcaggatgaagctagtcaccactgagcctgccatcaatgaaaagtatgatgctgagagaatggtcaagaacctggagaaggaactagcactactcaagcaggagctggctatccatgacagcctgaccaaccgcacctttgtgacctatgaccccatggatgaaatccagattgctgagatcaactcccaggtgcggaggtacctggaggggacactggacgagatcgacataatcagccttagacagatcaaggaggtgttcaaccagttccgggtggttctgagccaacaggaacaggaagtggagtccactttgcgcaggaagtacaccctcattgacaggaatgactttgcagccatttctgctatccagaaggcggggcttgtggatgttgatggccacctagtgggtgagcctgaaggacaaaactttggactcggagtcgcccctttctctaccaaacctgggaagaaagccaagtccaagaagacattcaaagagccactcaggcccgacaccccaccctccaaaccagtggcctttgaggagtttaagaatgagcaaggtagtgagatcaaccgaattttcaaagaaaacaaatccatcttgaatgaacggaggaaaagggccagcgagaccacacagcacatcaatgccatcaagcgggagattgatgtgaccaaggaggccctgaatttccagaagtcactacgggagaagcaaggcaagtacgaaaacaaggggctgatgatcatcgatgaggaagaattcctgctgatcctcaagctcaaagacctcaagaagcagtaccgcagcgagtaccaggacctgcgtgacctcagggctgagatccagtattgccagcacctagtggatcagtgtcgccaccgcctgctcatggaatttgacatctggtacaatgagtcctttgtcatccctgaggacatgcagatggcactgaagccaggcggcagcatccggccaggcatggtccctgtgaacaggattgtgtctctgggagaagatgaccaggacaaattcagccagctgcagcagagggtgcttcctgagggccctgattccatctccttctacaatgccaaagtcaagatagagcagaagcataattacttgaaaaccatgatgggcctccagcaggcacatagaaaatagaacctcatcgccagtaccttaaaggacaagaccagcaactcccacctactgtagtggagctgctcaaccacctgcccagagctgcagccccctctactccaatgctgggacccagcacagagaacacatttggcctgcatgttgggaggagcatcctccaaggacaaccttgctcatctccacagagcactttgggttttaattcactgtcttatatgcagggacaggataaaataactttctagtttggactttcagtgctcatctgagaactttgtcttatttcctgtctgaaaggacatattctctatgtatg

SEQ ID NO: 286733 - DNA, 3778 bp, Homo sapiens
ttcagtggtgcccatcagcatgtggagccggccaccgcccctgcctccatagaagcccgctgccgcccagtccgcggtaccttgagggtcacgtcgcacagcttgccctgccgccggatctcctccatgacgccgtagccgcgactaggcaactcagacacggagaagtgcaccagatcctccagctcctccgcgccgtcctccaccatcttccccggccgctgcaactgcgcaggcctcgccggccggctagacactaaccagggcggggcgatagcgcacgccgacagccgctcggagcgcggagcagcaatcggacgggcctccgcggccgccgtagttgaatctcctcggcgccggaagccccgccactccgcttcctggttcatgtgcggccttcgttccctcgctatctcgaccttgacttcgcatgtgcatccgccgaagtctttctagatcaatcggccccatctctcgtcttcccgattcggccatgacctcacccgtatcctcgacgtaggacctcggacttcatttccgccaccccgacacttccggaatccccggaagcgacccgttgccatggcgactatgtacacagccaggcagccccgcgtggggagtgcaggtggtttcggttgcggcagtcgcgtcccgggagcgtcgctgcctggtgaacggtgagcaggggctgctcgccggtgggagtggggagacgggaaaagggtgtgcgcccggactgctgaaagtggctggggtccaaaaaccgctttatctgggggttcccagctgggtcgctcatctctgaaacccaggcgaaggagggctcgacgtcgcgggagtcctttcaacctgaccgcggcttacggtcttcggagctaatgttcattggtcccacaaaggggtcccacgtcgcgtccaggacatagaggccgtgaggcagggagccagaggtcgtctggactcttccgtactagtcagttttcgaactagagggggctttgggatcaccagtcggagcccttcgtgttacagtagtgactgaagatagacccacatatgaagattcagctgccctctgacttccagccattaccatcaccaaccaccgccatttcctgaatacctactctgtgctgggctctgccctggacattgtgaggggattcaaaagagataaaaagcacaatccttgccttcaagcagcttgtaatttaattttggaaactgaaacccactcaaatgaagcgacgtaagaatggtaacaagcagtatttcactagaatgggtactaggaaaaaagttcatgcatttgtccgtgtcaaacccaccgatgactttgctcatgaaatgatcagatacggagatgacaaaagaagcattgatattcacttaaaaaaagacattcggagaggagttgtcaataaccaacagacagactggtcgtttaagttggatggagttcttcacgatgcctcccaggacttggtttatgagacagttgcaaaggatgtggtttctcaggccctcgatggctataatggcaccatcatgtgttatgggcagacgggagctggcaagacatacaccatgatgggggcaactgagaattacaagcaccgggggatcctccctcgtgccctgcagcaggtttttaggatgatcgaagaacgccccacacatgccatcactgtgcgtgtttcctacttggaaatctataatgagagcctgtttgatctcctgtccactctgccctatgttggaccctcagtcacaccaatgaccatcgtggaaaaccctcaaggagtcttcattaagggcttgtcagttcacctcacaagtcaggaggaggatgcattcagcctcctttttgagggtgagaccaacaggattatagcctcccacactatgaacaaaaactcttccagatcacactgcattttcaccatctacttagaggcccattcccggaccttatcagaggaaaagtacatcacttccaaaattaacttggtggatctggcaggctcagagaggctggggaagtctgggtctgagggccaagtcctgaaggaagccacctacatcaacaaatcgctctcattcctggagcaggccatcattgcccttggggaccagaagcgggaccacatcccctttcggcagtgcaagctcacccacgctctgaaggactcgttagggggaaactgcaatatggtcctcgtgacaaacatctatggagaagctgcccagttagaagaaacgctatcttcactgagatttgccagcaggatgaagctagtcaccactgagcctgccatcaatgaaaagtatgatgctgagagaatggtcaagaacctggagaaggaactagcactactcaagcaggagctggctatccatgacagcctgaccaaccgcacctttgtgacctatgaccccatggatgaaatccagattgctgagatcaactcccaggtgcggaggtacctggaggggacactggacgagatcgacataatcagccttagacagatcaaggaggtgttcaaccagttccgggtggttctgagccaacaggaacaggaagtggagtccactttgcgcaggaagtacaccctcattgacaggaatgactttgcagccatttctgctatccagaaggcggggcttgtggatgttgatggccacctagtgggtgagcctgaaggacaaaactttggactcggagtcgcccctttctctaccaaacctgggaagaaagccaagtccaagaagacattcaaagagccactcaggcccgacaccccaccctccaaaccagtggcctttgaggagtttaagaatgagcaaggtagtgagatcaaccgaattttcaaagaaaacaaatccatcttgaatgaacggaggaaaagggccagcgagaccacacagcacatcaatgccatcaagcgggagattgatgtgaccaaggaggccctgaatttccagaagtcactacgggagaagcaaggcaagtacgaaaacaaggggctgatgatcatcgatgaggaagaattcctgctgatcctcaagctcaaagacctcaagaagcagtaccgcagcgagtaccaggacctgcgtgacctcagggctgagatccagtattgccagcacctagtggatcagtgtcgccaccgcctgctcatggaatttgacatctggtacaatgagtcctttgtcatccctgaggacatgcagatggcactgaagccaggcggcagcatccggccaggcatggtccctgtgaacaggattgtgtctctgggagaagatgaccaggacaaattcagccagctgcagcagagggtgcttcctgagggccctgattccatctccttctacaatgccaaagtcaagatagagcagaagcataattacttgaaaaccatgatgggcctccagcaggcacatagaaaatagaacctcatcgccagtaccttaaaggacaagaccagcaactcccacctactgtagtggagctgctcaaccacctgcccagagctgcagccccctctactccaatgctgggacccagcacagagaacacatttggcctgcatgttgggaggagcatcctccaaggacaaccttgctcatctccacagagcactttgggttttaattcactgtcttatatgcagggacaggataaaataactttctagtttggactttcagtgctcatctgagaactttgtcttatttcctgtctgaaaggacatattctctatgtatg

SEQ ID NO: 286734 - DNA, 1041 bp, Homo sapiens
ttcagtggtgcccatcagcatgtggagccggccaccgcccctgcctccatagaagcccgctgccgcccagtccgcggtaccttgagggtcacgtcgcacagcttgccctgccgccggatctcctccatgacgccgtagccgcgactaggcaactcagacacggagaagtgcaccagatcctccagctcctccgcgccgtcctccaccatcttccccggccgctgcaactgcgcaggcctcgccggccggctagacactaaccagggcggggcgatagcgcacgccgacagccgctcggagcgcggagcagcaatcggacgggcctccgcggccgccgtagttgaatctcctcggcgccggaagccccgccactccgcttcctggttcatgtgcggccttcgttccctcgctatctcgaccttgacttcgcatgtgcatccgccgaagtctttctagatcaatcggccccatctctcgtcttcccgattcggccatgacctcacccgtatcctcgacgtaggacctcggacttcatttccgccaccccgacacttccggaatccccggaagcgacccgttgccatggcgactatgtacacagccaggcagccccgcgtggggagtgcaggtggtttcggttgcggcagtcgcgtcccgggagcgtcgctgcctggtgaacgctagaatgggtactaggaaaaaagttcatgcatttgtccgtgtcaaacccaccgatgactttgctcatgaaatgatcagatacggagatgacaaaagaagcattgatattcacttaaaaaaagacattcggagaggagttgtcaataaccaacagacagactggtcgtttaagttggatggagttcttcacgatgcctcccaggacttggtttatgagacagttgcaaaggatgtggtttctcaggccctcgatggctataatggtaacttaattaattaaatgttgtcttatgtaagaacctgaggagtaagagatgcaaatattttatggtgaataaaataaaagctcacttactatca

SEQ ID NO: 286735 - DNA, 1080 bp, Homo sapiens
ttcagtggtgcccatcagcatgtggagccggccaccgcccctgcctccatagaagcccgctgccgcccagtccgcggtaccttgagggtcacgtcgcacagcttgccctgccgccggatctcctccatgacgccgtagccgcgactaggcaactcagacacggagaagtgcaccagatcctccagctcctccgcgccgtcctccaccatcttccccggccgctgcaactgcgcaggcctcgccggccggctagacactaaccagggcggggcgatagcgcacgccgacagccgctcggagcgcggagcagcaatcggacgggcctccgcggccgccgtagttgaatctcctcggcgccggaagccccgccactccgcttcctggttcatgtgcggccttcgttccctcgctatctcgaccttgacttcgcatgtgcatccgccgaagtctttctagatcaatcggccccatctctcgtcttcccgattcggccatgacctcacccgtatcctcgacgtaggacctcggacttcatttccgccaccccgacacttccggaatccccggaagcgacccgttgccatggcgactatgtacacagccaggcagccccgcgtggggagtgcaggtggtttcggttgcggcagtcgcgtcccgggagcgtcgctgcctggtgaacgctagaatgggtactaggaaaaaagttcatgcatttgtccgtgtcaaacccaccgatgactttgctcatgaaatgatcagatacggagatgacaaaagaagcattgatattcacttaaaaaaagacattcggagaggagttgtcaataaccaacagacagactggtcgtttaagttggatggagttcttcacgatgcctcccaggacttggtttatgagacagttgcaaaggatgtggtttctcaggccctcgatggctataatggtaacttaattaattaaatgttgtcttatgtaagaacctgaggagtaagagatgcaaatattttatggtgaataaaataaaagctcacttactatcaaaaaaaaaagtcgacgcggccgcgaatttagtagtagta

SEQ ID NO: 286736 - DNA, 1396 bp, Homo sapiens
ttcagtggtgcccatcagcatgtggagccggccaccgcccctgcctccatagaagcccgctgccgcccagtccgcggtaccttgagggtcacgtcgcacagcttgccctgccgccggatctcctccatgacgccgtagccgcgactaggcaactcagacacggagaagtgcaccagatcctccagctcctccgcgccgtcctccaccatcttccccggccgctgcaactgcgcaggcctcgccggccggctagacactaaccagggcggggcgatagcgcacgccgacagccgctcggagcgcggagcagcaatcggacgggcctccgcggccgccgtagttgaatctcctcggcgccggaagccccgccactccgcttcctggttcatgtgcggccttcgttccctcgctatctcgaccttgacttcgcatgtgcatccgccgaagtctttctagatcaatcggccccatctctcgtcttcccgattcggccatgacctcacccgtatcctcgacgtaggacctcggacttcatttccgccaccccgacacttccggaatccccggaagcgacccgttgccatggcgactatgtacacagccaggcagccccgcgtggggagtgcaggtggtttcggttgcggcagtcgcgtcccgggagcgtcgctgcctggtgaacggtgagcaggggctgctcgccggtgggagtggggagacgggaaaagggtgtgcgcccggactgctgaaagtggctggggtccaaaaaccgctttatctgggggttcccagctgggtcgctcatctctgaaacccaggcgaaggagggctcgacgtcgcgggagtcctttcaacctgaccgcggcttacggtcttcggagctaatgttcattggtcccacaaaggggtcccacgtcgcgtccaggacatagaggccgtgaggcagggagccagaggtcgtctggactcttccgtactagtcagttttcgaactagagggggctttgggatcaccagtcggagcccttcgtgttacagctagaatgggtactaggaaaaaagttcatgcatttgtccgtgtcaaacccaccgatgactttgctcatgaaatgatcagatacggagatgacaaaagaagcattgatattcacttaaaaaaagacattcggagaggagttgtcaataaccaacagacagactggtcgtttaagttggatggagttcttcacgatgcctcccaggacttggtttatgagacagttgcaaaggatgtggtttctcaggccctcgatggctataatggtaacttaattaattaaatgttgtcttatgtaagaacctgaggagtaagagatgcaaatattttatggtgaataaaataaaagctcacttactatca

SEQ ID NO: 286737 - DNA, 2962 bp, Homo sapiens
ttcagtggtgcccatcagcatgtggagccggccaccgcccctgcctccatagaagcccgctgccgcccagtccgcggtaccttgagggtcacgtcgcacagcttgccctgccgccggatctcctccatgacgccgtagccgcgactaggcaactcagacacggagaagtgcaccagatcctccagctcctccgcgccgtcctccaccatcttccccggccgctgcaactgcgcaggcctcgccggccggctagacactaaccagggcggggcgatagcgcacgccgacagccgctcggagcgcggagcagcaatcggacgggcctccgcggccgccgtagttgaatctcctcggcgccggaagccccgccactccgcttcctggttcatgtgcggccttcgttccctcgctatctcgaccttgacttcgcatgtgcatccgccgaagtctttctagatcaatcggccccatctctcgtcttcccgattcggccatgacctcacccgtatcctcgacgtaggacctcggacttcatttccgccaccccgacacttccggaatccccggaagcgacccgttgccatggcgactatgtacacagccaggcagccccgcgtggggagtgcaggtggtttcggttgcggcagtcgcgtcccgggagcgtcgctgcctggtgaacgctagaatgggtactaggaaaaaagttcatgcatttgtccgtgtcaaacccaccgatgactttgctcatgaaatgatcagatacggagatgacaaaagaagcattgatattcacttaaaaaaagacattcggagaggagttgtcaataaccaacagacagactggtcgtttaagttggatggagttcttcacgatgcctcccaggacttggtttatgagacagttgcaaaggatgtggtttctcaggccctcgatggctataatggcaccatcatgtgttatgggcagacgggagctggcaagacatacaccatgatgggggcaactgagaattacaagcaccgggggatcctccctcgtgccctgcagcaggtttttaggatgatcgaagaacgccccacacatgccatcactgtgcgtgtttcctacttggaaatctataatgagagcctgtttgatctcctgtccactctgccctatgttggaccctcagtcacaccaatgaccatcgtggaaaaccctcaaggagtcttcattaagggcttgtcagttcacctcacaagtcaggaggaggatgcattcagcctcctttttgagggtgagaccaacaggattatagcctcccacactatgaacaaaaactcttccagatcacactgcattttcaccatctacttagaggcccattcccggaccttatcagaggaaaagtacatcacttccaaaattaacttggtggatctggcaggctcagagaggctggggaagtctgggtctgagggccaagtcctgaaggaagccacctacatcaacaaatcgctctcattcctggagcaggccatcattgcccttggggaccagaagcgggaccacatcccctttcggcagtgcaagctcacccacgctctgaaggactcgttagggggaaactgcaatatggtcctcgtgacaaacatctatggagaagctgcccagttagaagaaacgctatcttcactgagatttgccagcaggatgaagctagtcaccactgagcctgccatcaatgaaaagtatgatgctgagagaatggtcaagaacctggagaaggaactagcactactcaagcaggagctggctatccatgacagcctgaccaaccgcacctttgtgacctatgaccccatggatgaaatccagattgctgagatcaactcccaggtgcggaggtacctggaggggacactggacgagatcgacataatcagccttagacagatcaaggaggtgttcaaccagttccgggtggttctgagccaacaggaacaggaagtggagtccactttgcgcaggaagtacaccctcattgacaggaatgactttgcagccatttctgctatccagaaggcggggcttgtggatgttgatggccacctagtgggtgagcctgaaggacaaaactttggactcggagtcgcccctttctctaccaaacctgggaagaaagccaagtccaagaagacattcaaagagccactcagctccttggcaagaaaggaaggtgccagcagccctgtgaatgggaaggacttggattacgtttccacctccaagacccagctggtcccatcctccaaagatggggatgtcaaagacatgctttcgcgggaccgggaaacttccagcattgagccccttccctcagactccccgaaggaggaattacgcccaattaggcccgacaccccaccctccaaaccagtggcctttgaggagtttaagaatgagcaaggtagtgagatcaaccgaattttcaaagaaaacaaatccatcttgaatgaacggaggaaaagggccagcgagaccacacagcacatcaatgccatcaagcgggagattgatgtgaccaaggaggccctgaatttccagaagtcactacgggagaagcaaggtaaatgtgttggaaagagggctagggagctttggggtctcagagtcatgctggttgaagcagaacagcacttggcactagaggtctgagatgggagggggccagtgggggtgctgggatgtggccttcacccataggtcagatcacttagctctggtcagcccctgagagccgcagagtcctccctgtcagccagcctctgcctgtgggtcccatcattgttgctcattatctcagacctaggtgctgggccttccaccccatatgtgctactgtccctggtgaaacaggccctttgtcctgcagaggtatcactgggagatgggtagctggtgacctctacaaggtccgtg

SEQ ID NO: 286738 - DNA, 2435 bp, Homo sapiens
ttcagtggtgcccatcagcatgtggagccggccaccgcccctgcctccatagaagcccgctgccgcccagtccgcggtaccttgagggtcacgtcgcacagcttgccctgccgccggatctcctccatgacgccgtagccgcgactaggcaactcagacacggagaagtgcaccagatcctccagctcctccgcgccgtcctccaccatcttccccggccgctgcaactgcgcaggcctcgccggccggctagacactaaccagggcggggcgatagcgcacgccgacagccgctcggagcgcggagcagcaatcggacgggcctccgcggccgccgtagttgaatctcctcggcgccggaagccccgccactccgcttcctggttcatgtgcggccttcgttccctcgctatctcgaccttgacttcgcatgtgcatccgccgaagtctttctagatcaatcggccccatctctcgtcttcccgattcggccatgacctcacccgtatcctcgacgtaggacctcggacttcatttccgccaccccgacacttccggaatccccggaagcgacccgttgccatggcgactatgtacacagccaggcagccccgcgtggggagtgcaggtggtttcggttgcggcagtcgcgtcccgggagcgtcgctgcctggtgaacgctagaatgggtactaggaaaaaagttcatgcatttgtccgtgtcaaacccaccgatgactttgctcatgaaatgatcagatacggagatgacaaaagaagcattgatattcacttaaaaaaagacattcggagaggagttgtcaataaccaacagacagactggtcgtttaagttggatggagttcttcacgatgcctcccaggacttggtttatgagacagttgcaaaggatgtggtttctcaggccctcgatggctataatggcaccatcatgtgttatgggcagacgggagctggcaagacatacaccatgatgggggcaactgagaattacaagcaccgggggatcctccctcgtgccctgcagcaggtttttaggatgatcgaagaacgccccacacatgccatcactgtgcgtgtttcctacttggaaatctataatgagagcctgtttgatctcctgtccactctgccctatgttggaccctcagtcacaccaatgaccatcgtggaaaaccctcaaggagtcttcattaagggcttgtcagttcacctcacaagtcaggaggaggatgcattcagcctcctttttgagggtgagaccaacaggattatagcctcccacactatgaacaaaaactcttccagatcacactgcattttcaccatctacttagaggcccattcccggaccttatcagaggaaaagtacatcacttccaaaattaacttggtggatctggcaggctcagagaggctggggaagtctgggtctgagggccaagtcctgaaggaagccacctacatcaacaaatcgctctcattcctggagcaggccatcattgcccttggggaccagaagcgggaccacatcccctttcggcagtgcaagctcacccacgctctgaaggactcgttagggggaaactgcaatatggtcctcgtgacaaacatctatggagaagctgcccagttagaagaaacggtatgtaaagacagtcagtgaaaccaggctggaatcccccttcatgggtgccagggcagggtaaggctccaggctggctaccctggcacagtggccatagacattgtcaagagtggaaggatccaggggtgagtctgagccacagttgctgagggggcccagagctaggatccacacaccaagcactaagctgtgcggaggaaaagggccagccagcaggcaggctcagcatgggagactgtgtgaggagggaggctgagagccagctttgtgaagacaaggaccatgtttcctggggtgctgctcctggaattgggatcaagaaggatcgttggtgacttgttctttataatcacacatgtttaaacatcttgaaaaccccacagggttccaggctgtggttataaggccagtatgagcagatggtattaagcacctgccatgtgcaccatggtaagcaggagtaacctggtagaaattagtcttaaatgcccttgggcctcagcatcctcaacccagaaagagagagaagccatggtcctaagtaacgtgaggcccagagggaggagaccttcagaggaggccaggatgggggtgatggggaacttttcctgaagctggagtagggaaagatgggcactgagctggctggggttaaaggatgggtggtaggataagcagaggtattcctggcagaggtaatagtgggactgaagatgtgacccacaccaggaacatctatctactgcggggggtgggggctctcagc

SEQ ID NO: 286739 - DNA, 1640 bp, Homo sapiens
ttcagtggtgcccatcagcatgtggagccggccaccgcccctgcctccatagaagcccgctgccgcccagtccgcggtaccttgagggtcacgtcgcacagcttgccctgccgccggatctcctccatgacgccgtagccgcgactaggcaactcagacacggagaagtgcaccagatcctccagctcctccgcgccgtcctccaccatcttccccggccgctgcaactgcgcaggcctcgccggccggctagacactaaccagggcggggcgatagcgcacgccgacagccgctcggagcgcggagcagcaatcggacgggcctccgcggccgccgtagttgaatctcctcggcgccggaagccccgccactccgcttcctggttcatgtgcggccttcgttccctcgctatctcgaccttgacttcgcatgtgcatccgccgaagtctttctagatcaatcggccccatctctcgtcttcccgattcggccatgacctcacccgtatcctcgacgtaggacctcggacttcatttccgccaccccgacacttccggaatccccggaagcgacccgttgccatggcgactatgtacacagccaggcagccccgcgtggggagtgcaggtggtttcggttgcggcagtcgcgtcccgggagcgtcgctgcctggtgaacggtgagcaggggctgctcgccggtgggagtggggagacgggaaaagggtgtgcgcccggactgctgaaagtggctggggtccaaaaaccgctttatctgggggttcccagctgggtcgctcatctctgaaacccaggcgaaggagggctcgacgtcgcgggagtcctttcaacctgaccgcggcttacggtcttcggagctaatgttcattggtcccacaaaggggtcccacgtcgcgtccaggacatagaggccgtgaggcagggagccagaggtcgtctggactcttccgtactagtcagttttcgaactagagggggctttgggatcaccagtcggagcccttcgtgttacagtagtgactgaagatagacccacatatgaagattcagctgccctctgacttccagccattaccatcaccaaccaccgccatttcctgaatacctactctgtgctgggctctgccctggacattgtgaggggattcaaaagagataaaaagcacaatccttgccttcaagcagcttgtaatttaattttggaaactgaaacccactcaaatgaagcgacgtaagaatggtaacaagcagtatttcactagaatgggtactaggaaaaaagttcatgcatttgtccgtgtcaaacccaccgatgactttgctcatgaaatgatcagatacggagatgacaaaagaagcattgatattcacttaaaaaaagacattcggagaggagttgtcaataaccaacagacagactggtcgtttaagttggatggagttcttcacgatgcctcccaggacttggtttatgagacagttgcaaaggatgtggtttctcaggccctcgatggctataatggtaacttaattaattaaatgttgtcttatgtaagaacctgaggagtaagagatgcaaatattttatggtgaataaaataaaagctcacttactatca

SEQ ID NO: 286740 - DNA, 2858 bp, Homo sapiens
tttgatagtaagtgagcttttattttattcaccataaaatatttgcatctcttactcctcaggttcttacataagacaacatttaattaattaagttaccattatagccatcgagggcctgagaaaccacatccttcgcatgtgcatccgccgaagtctttctagatcaatcggccccatctctcgtcttcccgattcggccatgacctcacccgtatcctcgacgtaggacctcggacttcatttccgccaccccgacacttccggaatccccggaagcgacccgttgccatggcgactatgtacacagccaggcagccccgcgtggggagtgcaggtggtttcggttgcggcagtcgcgtcccgggagcgtcgctgcctggtgaacgctagaatgggtactaggaaaaaagttcatgcatttgtccgtgtcaaacccaccgatgactttgctcatgaaatgatcagatacggagatgacaaaagaagcattgatattcacttaaaaaaagacattcggagaggagttgtcaataaccaacagacagactggtcgtttaagttggatggagttcttcacgatgcctcccaggacttggtttatgagacagttgcaaaggatgtggtttctcaggccctcgatggctataatggcaccatcatgtgttatgggcagacgggagctggcaagacatacaccatgatgggggcaactgagaattacaagcaccgggggatcctccctcgtgccctgcagcagggtgagaccaacaggattatagcctcccacactatgaacaaaaactcttccagatcacactgcattttcaccatctacttagaggcccattcccggaccttatcagaggaaaagtacatcacttccaaaattaacttggtggatctggcaggctcagagaggctggggaagtctgggtctgagggccaagtcctgaaggaagccacctacatcaacaaatcgctctcattcctggagcaggccatcattgcccttggggaccagaagcgggaccacatcccctttcggcagtgcaagctcacccacgctctgaaggactcgttagggggaaactgcaatatggtcctcgtgacaaacatctatggagaagctgcccagttagaagaaacgctatcttcactgagatttgccagcaggatgaagctagtcaccactgagcctgccatcaatgaaaagtatgatgctgagagaatggtcaagaacctggagaaggaactagcactactcaagcaggagctggctatccatgacagcctgaccaaccgcacctttgtgacctatgaccccatggatgaaatccagattgctgagatcaactcccaggtgcggaggtacctggaggggacactggacgagatcgacataatcagccttagacagatcaaggaggtgttcaaccagttccgggtggttctgagccaacaggaacaggaagtggagtccactttgcgcaggaagtacaccctcattgacaggaatgactttgcagccatttctgctatccagaaggcggggcttgtggatgttgatggccacctagtgggtgagcctgaaggacaaaactttggactcggagtcgcccctttctctaccaaacctgggaagaaagccaagtccaagaagacattcaaagagccactcagctccttggcaagaaaggaaggtgccagcagccctgtgaatgggaaggacttggattacgtttccacctccaagacccagctggtcccatcctccaaagatggggatgtcaaagacatgctttcgcgggaccgggaaacttccagcattgagccccttccctcagactccccgaaggaggaattacgcccaattaggcccgacaccccaccctccaaaccagtggcctttgaggagtttaagaatgagcaaggtagtgagatcaaccgaattttcaaagaaaacaaatccatcttgaatgaacggaggaaaagggccagcgagaccacacagcacatcaatgccatcaagcgggagattgatgtgaccaaggaggccctgaatttccagaagtcactacgggagaagcaaggcaagtacgaaaacaaggggctgatgatcatcgatgaggaagaattcctgctgatcctcaagctcaaagacctcaagaagcagtaccgcagcgagtaccaggacctgcgtgacctcagggctgagatccagtattgccagcacctagtggatcagtgtcgccaccgcctgctcatggaatttgacatctggtacaatgagtcctttgtcatccctgaggacatgcagatggcactgaagccaggcggcagcatccggccaggcatggtccctgtgaacaggattgtgtctctgggagaagatgaccaggacaaattcagccagctgcagcagagggtgcttcctgagggccctgattccatctccttctacaatgccaaagtcaagatagagcagaagcataattacttgaaaaccatgatgggcctccagcaggcacatagaaaatagaacctcatcgccagtaccttaaaggacaagaccagcaactcccacctactgtagtggagctgctcaaccacctgcccagagctgcagccccctctactccaatgctgggacccagcacagagaacacatttggcctgcatgttgggaggagcatcctccaaggacaaccttgctcatctccacagagcactttgggttttaattcactgtcttatatgcagggacaggataaaataactttctagtttggactttcagtgctcatctgagaactttgtcttatttcctgtctgaaaggacatattctctatgtatg

SEQ ID NO: 286741 - DNA, 3033 bp, Homo sapiens
agggaggcctcactgccagcaaccagagcaatgaggctggagcccaggcctctgttaccaggctcactattccctctggcataattcaaggcctccctatgcttatggaatctatctaaaacttgtttaataagaacatgataaatttgacctcatatcataggtggggaaacaaagacagcaccgtgtgaactagggttagaggtgctaaaactagaaagtgctccactctcctgatctttccatctccctgcaggaactctcttctcccatcccaaagaattcatctggaatatcagcccctacgtgggagtccccattcatcctacagttcatttcctctgttccctccagattaggcctcagctatcagtgattttttttatacccatttttgaacaaataacatttttttctttctcactcttttttcctagagcattgatattcacttaaaaaaagacattcggagaggagttgtcaataaccaacagacagactggtcgtttaagttggatggagttcttcacgatgcctcccaggacttggtttatgagacagttgcaaaggatgtggtttctcaggccctcgatggctataatggcaccatcatgtgttatgggcagacgggagctggcaagacatacaccatgatgggggcaactgagaattacaagcaccgggggatcctccctcgtgccctgcagcaggtttttaggatgatcgaagaacgccccacacatgccatcactgtgcgtgtttcctacttggaaatctataatgagagcctgtttgatctcctgtccactctgccctatgttggaccctcagtcacaccaatgaccatcgtggaaaaccctcaaggagtcttcattaagggcttgtcagttcacctcacaagtcaggaggaggatgcattcagcctcctttttgagggtgagaccaacaggattatagcctcccacactatgaacaaaaactcttccagatcacactgcattttcaccatctacttagaggcccattcccggaccttatcagaggaaaagtacatcacttccaaaattaacttggtggatctggcaggctcagagaggctggggaagtctgggtctgagggccaagtcctgaaggaagccacctacatcaacaaatcgctctcattcctggagcaggccatcattgcccttggggaccagaagcgggaccacatcccctttcggcagtgcaagctcacccacgctctgaaggactcgttagggggaaactgcaatatggtcctcgtgacaaacatctatggagaagctgcccagttagaagaaacgctatcttcactgagatttgccagcaggatgaagctagtcaccactgagcctgccatcaatgaaaagtatgatgctgagagaatggtcaagaacctggagaaggaactagcactactcaagcaggagctggctatccatgacagcctgaccaaccgcacctttgtgacctatgaccccatggatgaaatccagattgctgagatcaactcccaggtgcggaggtacctggaggggacactggacgagatcgacataatcagccttagacagatcaaggaggtgttcaaccagttccgggtggttctgagccaacaggaacaggaagtggagtccactttgcgcaggaagtacaccctcattgacaggaatgactttgcagccatttctgctatccagaaggcggggcttgtggatgttgatggccacctagtgggtgagcctgaaggacaaaactttggactcggagtcgcccctttctctaccaaacctgggaagaaagccaagtccaagaagacattcaaagagccactcagctccttggcaagaaaggaaggtgccagcagccctgtgaatgggaaggacttggattacgtttccacctccaagacccagctggtcccatcctccaaagatggggatgtcaaagacatgctttcgcgggaccgggaaacttccagcattgagccccttccctcagactccccgaaggaggaattacgcccaattaggcccgacaccccaccctccaaaccagtggcctttgaggagtttaagaatgagcaaggtagtgagatcaaccgaattttcaaagaaaacaaatccatcttgaatgaacggaggaaaagggccagcgagaccacacagcacatcaatgccatcaagcgggagattgatgtgaccaaggaggccctgaatttccagaagtcactacgggagaagcaaggcaagtacgaaaacaaggggctgatgatcatcgatgaggaagaattcctgctgatcctcaagctcaaagacctcaagaagcagtaccgcagcgagtaccaggacctgcgtgacctcagggctgagatccagtattgccagcacctagtggatcagtgtcgccaccgcctgctcatggaatttgacatctggtacaatgagtcctttgtcatccctgaggacatgcagatggcactgaagccaggcggcagcatccggccaggcatggtccctgtgaacaggattgtgtctctgggagaagatgaccaggacaaattcagccagctgcagcagagggtgcttcctgagggccctgattccatctccttctacaatgccaaagtcaagatagagcagaagcataattacttgaaaaccatgatgggcctccagcaggcacatagaaaatagaacctcatcgccagtaccttaaaggacaagaccagcaactcccacctactgtagtggagctgctcaaccacctgcccagagctgcagccccctctactccaatgctgggacccagcacagagaacacatttggcctgcatgttgggaggagcatcctccaaggacaaccttgctcatctccacagagcactttgggttttaattcactgtcttatatgcagggacaggataaaataactttctagtttggactttcagtgctcatctgagaactttgtcttatttcctgtctgaaaggacatattctctatgtatg

SEQ ID NO: 286742 - DNA, 1235 bp, Homo sapiens
tttattgttgtttgtttcttatacttttccttgctttcctcactttctgccatgggaatatgtccttgtatgtgtgctgagtaaaacaaagaggagggaatgattcacacacagtttagctcctgtcttgggtaggtggtgcctagcacttctgcctcctggccacagaagtcccagggaagaaagatgaagtgcctggtggctccaaggcagccacctcatttatcctctttggtctcaccttttcatctcaaggcccgacaccccaccctccaaaccagtggcctttgaggagtttaagaatgagcaaggtagtgagatcaaccgaattttcaaagaaaacaaatccatcttgaatgaacggaggaaaagggccagcgagaccacacagcacatcaatgccatcaagcgggagattgatgtgaccaaggaggccctgaatttccagaagtcactacgggagaagcaaggcaagtacgaaaacaaggggctgatgatcatcgatgaggaagaattcctgctgatcctcaagctcaaagacctcaagaagcagtaccgcagcgagtaccaggacctgcgtgacctcagggctgagatccagtattgccagcacctagtggatcagtgtcgccaccgcctgctcatggaatttgacatctggtacaatgagtcctttgtcatccctgaggacatgcagatggcactgaagccaggcggcagcatccggccaggcatggtccctgtgaacaggattgtgtctctgggagaagatgaccaggacaaattcagccagctgcagcagagggtgcttcctgagggccctgattccatctccttctacaatgccaaagtcaagatagagcagaagcataattacttgaaaaccatgatgggcctccagcaggcacatagaaaatagaacctcatcgccagtaccttaaaggacaagaccagcaactcccacctactgtagtggagctgctcaaccacctgcccagagctgcagccccctctactccaatgctgggacccagcacagagaacacatttggcctgcatgttgggaggagcatcctccaaggacaaccttgctcatctccacagagcactttgggttttaattcactgtcttatatgcagggacaggataaaataactttctagtttggactttcagtgctcatctgagaactttgtcttatttcctgtctgaaaggacatattctctatgtatg

SEQ ID NO: 286743 - DNA, 800 bp, Homo sapiens
atccccagagtatggaatgaggtgccatactggtgagggggtgcatgtggaaagtggacatttggcagagtggtcagggaccgctctacaggggacagcctgaggctggcatcagcagctgtcaaaccttggtgtgtatggtgaacatgtccaccctgagccttgggccatatacatgtgggtccccaaggggtccaagcccttaatctaactcacagacctttggctggcctctctatgtaggcggggcttgtggatgttgatggccacctagtgggtgagcctgaaggacaaaactttggactcggagtcgcccctttctctaccaaacctgggaagaaagccaagtccaagaagacattcaaagagccactcaggtgagtgaccttgccgctctgcctcctcagcagctggccctcctcggtgggtgcatgggaggatgtgcactgttcccactttccccctggtgtctcagctactgggttggcacaatggacgtcactgctgccaatactagcaagtctgtggggcccgggctgggctggtttggaaccgcacaagaatcatctctcgtcctcacagcaacctggtgaggtgggagttaatgtcttcattacactgatgaagaaacagaggcttagagaggggaagtcactcaccaaggccataccaccaatgagtagtggaatggcagcaagaagctggaccagctctccagagcccatgccctctggtactttatgttgtaccccctcccctcacttcactagggtcttcccgccgactggactcaggtcacc

SEQ ID NO: 286744 - DNA, 851 bp, Homo sapiens
gccgaggcagggctttggctactggagatcgtaggttcgaatcccgtctgggaagttcaacttgtgcacctgtaaaagaagctggcattattggcttgtactcaagggctggcacagagtgtgtcggggtgcggacgccccagccacgcccatcatccgtgcggaagatgcagaggtcatatcggatacccttctgtaccacacgatttgggcagtcatagccgcagcggcagcgggagttgcactcgtagatgggcagcccggctcgaagccgcacctggccctggtcattgtaggcaaacttgtgcagtgacgcccccgggcagcagcctccagtgggtgcccacagacagtcctggcactcgcagcccacagccacctggttgagggtgatgccctcaccaacacggtactcattgatgtacacgaaggcccgcggagggccgtccaggtccacctcattctctacagtgatgcgtcccagatggctgcgcttggcattgagctcctgctcccagcgacggagcgcccgcctctgcttggccttctgcaccaggtagttggccaagcttgggtccaggtgccggggggtctttgaccggtggtgccgccggagcagctccctttctaagtccttgtggaactgcttgaggatacgcacacacttgagattctgccgtggctcccaggtgctctctgagtctggatatccacgccatttcaccagggtcaaaggagaaaatccctttggaaacagatgtgggcagttggggacaagagggcaggacactaacttccttgtgacctgtcccctcccgaagatggttagccagatcagcggatttcttgta

SEQ ID NO: 286745 - DNA, 1271 bp, Homo sapiens
caccattattatgtgtatgtggtgttggggattgctgctgtcttacagactctgagctgcttgttttcctgggagcatctggacacatggttaatctctggagtgacatcttcccttaggtcatctgttcttgttcagcgtttttctgatttgcatccttgcctgctcctcagctaagaacttaactttctttgtttttattggaaagatccaagtaacatcctgttatgttacaggaaacttttgaaagagataaacagaattagaaaatatataaaagatgtgattgatggaggggtgatttttggaagtgtatatctttggtgagaatatactttcttatttctttttgagaggctttctggtaactacttggtgtggcagatgtcattgacatctttccagtatttccttggcttgccaatactttgtgaattaatctctctgaaatctaaacttgtatctgaggactgcagaagcacttataatacagatcttacctttgtttaggcatgcttcattctggtttgaaaaatgtccattttgtcataagagtaatactctctctaggacagcttgcatgtccaaagctggaaaatacatccggtaaacactattaactggaagcttattaatcagagttgtattctaaccagagttactttcattcattaagcttttaggaagtaagcaaatcacaagaaaaaagttggtttcaggaactttagttttagtttttaaaagcttttcctaatgtgggtcccttttgttttatgatgtattctaccatcaacgtcatggccctgtatgcatgccaggactgtttgtcttgttcaccttgaccccaggtcattgccaggcacatagcagatacacaagagatattcagtgaataaatgaaggtatgggaaaactgaaacctgggtcattgtagaattcttactcatcaagtaaaggttagttgtgatcaatctattctccttagttgagaaaacggatacacctgtgttcaaggtttttggcaaggcatacaaacgaatttcccaattattcagaaagttcagctattaatgggtcacgtagtgccctactatcactgcaaagttaccatgcctggaagcaaactctgcctcacactcgctaaaccaagtggtggtacgctgtagagtcattgccgctcagaaccccagagagagtagtattcctttatccaaataagcaccagcggttcttccttcaagcattgagcactggttctctgtcaggccgtg

SEQ ID NO: 286746 - DNA, 2096 bp, Homo sapiens
ggcacgaggccacctgcccaagaaacttgttggttgttgccctcaggtcgctcccgggcgcggacacggaacccggccatggaagatccgtcgggggctcgcgagccccgggcccggccgagagagcgggacccgggacggcgcccccacccagaccaaggccgcacccacgatcgaccgcgggaccgacccggggacccgcgcaggaagcgaagcagcgacgggaaccggcgaagggacggggaccgggacccgaagagagaccaggagagggacgggaaccgcgaccggaaccgggaccgggagagggagagagagagggaaagagacccggaccgaggcccccgccgggacacacacagggacgcgggccctcgcgcaggtgaacacggagtttgggaaaaaccgcgccaaagccggacgcgggacggagcccggggactgacctgggacgcagccgcgcctcctgggcccgcgccctgggaagccccggagccgccgcagccgcagaggaagggagaccccgggcgccgcagacccgaaagtgaacccccttcggagagatatctgccctcgacccccaggcctggacgagaggaggtggaatattaccagtcagaggcggaaggactcctggaatgccacaaatgcaaatacttgtgcactgggagagcctgctgccaaatgctggaggttctcctgaacttgctgatcctggcctgcagctctgtgtcttacagttccacagggggctacacgggcatcaccagcttggggggcatttactactatcagttcggaggggcttacagtggctttgatggtgctgacggggagaaggcccagcaactggatgtccagttctaccagctaaagctgcccatggtcactgtggcaatggcctgtagtggagccctcacagccctctgctgcctcttcgttgccatgggtgtcctgcgggtcccgtggcattgtccactgttgctggtgaccgaaggcttgttggacatgctcatcgcgggggggtacatcccggccttgtacttctacttccactacctctctgctgcctatggctctcctgtgtgtaaagagaggcaggcgctgtaccaaagcaaaggctacagcggtttcggctgcagtttccacggagcagatataggagctggaatctttgctgccctgggcattgtggtctttgccctgggggctgtcctggccataaagggctaccgaaaagttaggaagctaaaagagaagccagcagaaatgtttgaattttaagggtttctaaaacgctctgacagatgcaagtggtggtggaaggtagtctgagccactgcctttcccaagaatcccttgttgtggaagtttccaatgctggaaaagcagcgagccagcgttggtgtggtgggcggagctcccagtcgcatggagcggtgttcatggatgcaacagaccctggcttctggagtcctctgtgagtgagggaccaatcaaaattatttttcaaaaagcaaaaaaatggccggcctcggcggctcacacctgtaaccccagcactttgggaggctgaggtgggtggatcacttgaggtcaggagctcgagaccagcttggccaacatggtgagcccccgtctctactaaaatacaaaaaaattagccaggcgtggtggcgggcgcctgtaatcccagctacttgggaggctgaggcaggagaatcgcttgaatctgggaggcggagattgcagtgagccgagatcccgccactgcactccagcccaggtgacagagcgagactccatctcaaaaaaaaaaaaaagcaaaaaaactggaccccaagagccacaaggaaaaagcatgtactacaacagagtgcacctcttcattcagtaaagggaggtcaccaagagaatttgatgaaccttaccttcaaagttcctgggcacagtggctcacacctgtaatcccagagctttgggaggctgaggtaggaggattgcttgaacccaggagttcaagtttgcagtgcgctatgattgtcccactacactctagcctgagcaacagaccaagaccgtattgccaaaatacc

SEQ ID NO: 286747 - DNA, 821 bp, Homo sapiens
ggcacgaggccacctgcccaagaaacttgttggttgttgccctcaggtcgctcccgggcgcggacacggaacccggccatggaagatccgtcgggggctcgcgagccccgggcccggccgagagagcgggacccgggacggcgcccccacccagaccaaggccgcacccacgatcgaccgcgggaccgacccggggacccgcgcaggaagcgaagcagcgacgggaaccggcgaagggacggggaccgggacccgaagagagaccaggagagggacgggaaccgcgaccggaaccgggaccgggagagggagagagagagggaaagagacccggaccgaggcccccgccgggacacacacagggacgcgggccctcgcgcaggtgaacacggagtttgggaaaaaccgcgccaaagccggacgcgggacggagcccggggactgacctgggacgcagccgcgcctcctgggcccgcgccctgggaagccccggagccgccgcagccgcagaggaagggagaccccgggcgccgcagacccgaaagtgaacccccttcggagagatatctgccctcgacccccaggcctggacgagaggaggtggaatattaccagtcagaggcggaaggactcctggaatgccacaaatgcaaatacttgtgcactgggagaggtgagccgttttgcaggctgtttgatcatttactgtcactggtggttctggaagggatggtctgagctggtgaagcaaaaatttaagcagattcccttgtgggttcctagcattttcatttctgtacttgtgaggttcttgttttctt

SEQ ID NO: 286748 - DNA, 2176 bp, Homo sapiens
ctagtagaggcctcgttttaattcggacgaggtgttgccctcatgtgttgctccctgggctgcggacacggaacccggccatggaagagtcgtcgtgtggtgctcgctgatgcccctgtgtgtccctgtgctcgatgatgatgctggtgaccctgggatcgtgcgcctcccacctcatgacctaatgtgcctgctactccactgtattctgacctgctgtgtgacctgatccctggtgtgaccactgactgcagtgtgatatgctgatatgctatgcttgacggtgtgaacgctgtgcgtgaatgtgtgactgtggtgacctggtgactccgatagatgatgaccaggagagggacgggaaccgcgaccggaaccgggaccgggagagggagagagagagggaaagagacccggaccgaggcccccgccgggacacacacagggacgcgggccctcgcgcaggtgaacacggagtttgggaaaaaccgcgccaaagccggacgcgggacggagcccggggactgacctgggacgcagccgcgcctcctgggcccgcgccctgggaagccccggagccgccgcagccgcagaggaagggagaccccgggcgccgcagacccgaaagtgaacccccttcggagagatatctgccctcgacccccaggcctggacgagaggaggtggaatattaccagtcagaggcggaaggactcctggaatgccacaaatgcaaatacttgtgcactgggagagcctgctgccaaatgctggaggttctcctgaacttgctgatcctggcctgcagctctgtgtcttacagttccacagggggctacacgggcatcaccagcttggggggcatttactactatcagttcggaggggcttacagtggctttgatggtgctgacggggagaaggcccagcaactggatgtccagttctaccagctaaagctgcccatggtcactgtggcaatggcctgtagtggagccctcacagccctctgctgcctcttcgttgccatgggtgtcctgcgggtcccgtggcattgtccactgttgctggtgaccgaaggcttgttggacatgctcatcgcgggggggtacatcccggccttgtacttctacttccactacctctctgctgcctatggctctcctgtgtgtaaagagaggcaggcgctgtaccaaagcaaaggctacagcggtttcggctgcagtttccacggagcagatataggagctggaatctttgctgccctgggcattgtggtctttgccctgggggctgtcctggccataaagggctaccgaaaagttaggaagctaaaagagaagccagcagaaatgtttgaattttaagggtttctaaaacgctctgacagatgcaagtggtggtggaaggtagtctgagccactgcctttcccaagaatcccttgttgtggaagtttccaatgctggaaaagcagcgagccagcgttggtgtggtgggcggagctcccagtcgcatggagcggtgttcatggatgcaacagaccctggcttctggagtcctctgtgagtgagggaccaatcaaaattatttttcaaaaagcaaaaaaatggccggcctcggcggctcacacctgtaaccccagcactttgggaggctgaggtgggtggatcacttgaggtcaggagctcgagaccagcttggccaacatggtgagcccccgtctctactaaaatacaaaaaaattagccaggcgtggtggcgggcgcctgtaatcccagctacttgggaggctgaggcaggagaatcgcttgaatctgggaggcggagattgcagtgagccgagatcccgccactgcactccagcccaggtgacagagcgagactccatctcaaaaaaaaaaaaaagcaaaaaaactggaccccaagagccacaaggaaaaagcatgtactacaacagagtgcacctcttcattcagtaaagggaggtcaccaagagaatttgatgaaccttaccttcaaagttcctgggcacagtggctcacacctgtaatcccagagctttgggaggctgaggtaggaggattgcttgaacccaggagttcaagtttgcagtgcgctatgattgtcccactacactctagcctgagcaacagaccaagaccgtattgccaaaatacc

SEQ ID NO: 286749 - DNA, 1441 bp, Homo sapiens
ggcacgaggccacctgcccaagaaacttgttggttgttgccctcaggtcgctcccgggcgcggacacggaacccggccatggaagatccgtcgggggctcgcgagccccgggcccggccgagagagcgggacccgggacggcgcccccacccagaccaaggccgcacccacgatcgaccgcgggaccgacccggggacccgcgcaggaagcgaagcagcgacgggaaccggcgaagggacggggaccgggacccgaagagagaccaggagagggacgggaaccgcgaccggaaccgggaccgggagagggagagagagagggaaagagacccggaccgaggcccccgccgggacacacacagggacgcgggccctcgcgcaggtgaacacggagtttgggaaaaaccgcgccaaagccggacgcgggacggagcccggggactgacctgggacgcagccgcgcctcctgggcccgcgccctgggaagccccggagccgccgcagccgcagaggaagggagaccccgggcgccgcagacccgaaagtgaacccccttcggagagatatctgccctcgacccccaggcctggacgagaggaggtggaatattaccagtcagaggcggaaggactcctggaatgccacaaatgcaaatacttgtgcactgggagagcctgctgccaaatgctggaggttctcctgaacttgctgatcctggcctgcagctctgtgtcttacagttccacagggggctacacgggcatcaccagcttggggggcatttactactatcagttcggaggggcttacagtggctttgatggtgctgacggggagaaggcccagcaactggatgtccagttctaccagctaaagctgcccatggtcactgtggcaatggcctgtagtggagccctcacagccctctgctgcctcttcgttgccatgggtgtcctgcgggtcccgtggcattgtccactgttgctggtgaccgaaggcttgttggacatgctcatcgcgggggggtacatcccggccttgtacttctacttccactacctctctgctgcctatggctctcctgtgtgtaaagagaggcaggcgctgtaccaaagcaaaggctacagcggtttcggctgcagtttccacggagcagatataggagctggaatctttgctgccctgggcattgtggtctttgccctgggggctgtcctggccataaagggctaccgaaaagttaggaagctaaaagagaagccagcagaaatgtttgaattttaagggtttctaaaacgctctgacagatgcaagtggtggtggaaggtagtctgagccactgcctttcccaagaatcccttgttgtggaagtttccaatgctggaaaagcagcgagccagcgttggtggtcgacgcggccgcgaatttagtagtagtaggc

SEQ ID NO: 286750 - DNA, 1590 bp, Homo sapiens
ggggatatggcggggcctttgtctctcgctgtcgccggagtcccaggtctgtcttcactgctctgtgtcctctgctcctagaggcccagcctctgtggcgctgttaccagcagtattggagatccacagctaagatgccaggaccccctagaagcctagaaatgggactgttgacatttagggatgtggccatagaattctctctggaggagtggcaacacctggacattgcacagcagaatttatatagaaatgtgatgttagagaactacagaaacctggccttcctgggtattgctgtctctaagccagacctgatcacctgtctggaacaagggaaagagccctggaatatgaagcgacatgagatggtggatgaacccccaggtatgtgtcctcattttgctcaagacctttggccagagcagggcatggaagattcttttcaaaaagcaatactgagaagatatggaaaatatggacatgagaatttacagttaagaaaaggctgtaaaagtgtggatgagtataaggtgaacaaagaaggttataatggacttaaccagtgtttcacaactgcccagagcaaagtatttcaatgtgataaatatttgaaagtcttctataaatttttaaattcaaacagacctaagataagacatactgaaaagaaatctttcaaatgtaaaaaacgtgtcaaattattttgcatgctttcacataaaacccaacacaaaagcatttatcatagagagaagtcctacaaatgtaaagaatgtggaaaaacctttaattggtcctcaacccttactaatcataggaaaatttatactgaagagaaaccttacaaatgtgaagaatataacaaatctcctaagcaactctcaacccttactacacatgaaataattcatgctggagagaaactctacaaatgtgaagaatgtggcaaagcttttaatcggtcctcaacttttactaaacataaggtaattcatactggagtaaaaccctacaaatgtgaagaatgtggcaaagcatttttctggtcctcaaccctaactaaacataagagaattcatactggagagcaaccctacaaatgggaaaaatttggcaaagcctttaatcggtcctcgcacctcaccacagataagataactcattggagagaaatcttacaagtatgaataatgtgccaaagcctaagaaaaccctcaattcttaatagatataagattattcctactggagagaaactacaaacctgagagaggcgctaatgcttttgacagtacctaaaactttaaagaaaatcattctgctgaaaaatcctagaaatgtgaagaatgtgaaaaagcctttaaatgattgtcacacttgattgtaggtaagataattcatactggagaaaactaccagtgtgaacaacgtggccaagcttcgacaatgctcacaccctattgcacaggaaagcatttatacttgagaagaaatgtacaaatattggcaaagtaaaaaatccattaacacctgctcacatcttactcaaaattgtagagttcatagtaaataaaagcattaaaattc

SEQ ID NO: 286751 - DNA, 799 bp, Homo sapiens
catatgttattttaactaaaattaagaatgactaacttaattttaactaaaattaagaatgcttttccattcataataatgcagaggaatattattctgaacacctacctcatgcatcactcattattatgaatgaaaagcattcttaattttagttaaaattaagttagtcatatgttattttattaattgtacttctatgaaataatatgcagtctatttttaaattataaattatgtgtgaacttagcttttcaattcaacatttttaacatattaaatactattgtgaattcaatgaagtgttcttatgccactaactttaacctattcccttactcaaggatgtaggtaaaagatggtaacaatacactatttggtaagataatgtactgacatctctagcaatcttttttgccagtggctttaaattgccaataagttaaagaatattgttcctatgggttaaatttttattcttattttcacatttaaatttatttttcttaatttttgtggatacataatatgtgtatatatgtatgccatatatggtatattttgatgcaggcatactctatataataatcacattagaggaaatgagatatccattacctctagcatttattctttttattacaagcaattcaattgtacacttttagttatttttaaatttacaatgttattgattacagggtcatttttatggtcataataaaaaattttatacaaacgtgtaaaatctatacatttctgagttctgaataaatatttttaaaaattttaaaatatt

SEQ ID NO: 286752 - DNA, 442 bp, Homo sapiens
ctgaagcctgaccacagggagcattgtgacacatttcttgacccattacaatctcttctacgggcaaagctgagggactgttgacatttagggatgtggccatagaattctctctggaggagtggcaacacctggacattgcacagcagaatttatatagaaatgtgatgttagagaactacagaaacctggccttcctgggtattgctgtctctaagccagacctgatcacctgtctggaacaagggaaagagccctggaatatgaagcgacatgagatggtggatgaacccccaggattggatttttcattactgtgaagaaaaacactggaattttgataaggagttctttaaatctacaggtcactttggataatatggcagtttcataatacttattctttcaatagaaataaaacattttaaaatttaaaaaaaac

SEQ ID NO: 286753 - DNA, 498 bp, Homo sapiens
ctcatccctgaacatttctgatggtgtgattatgacatgtgactttatcttgcaacagagtgagttgattctcccgcctgagcccagcccccagaaaggattgtgacatatcgttggacccagaattgagggactgttgacatttagggatgtggccatagaattctctctggaggagtggcaacacctggacattgcacagcagaatttatatagaaatgtgatgttagagaactacagaaacctggccttcctgggtattgctgtctctaagccagacctgatcacctgtctggaacaagggaaagagccctggaatatgaagcgacatgagatggtggatgaacccccaggattggatttttcattactgtgaagaaaaacactggaattttgataaggagttctttaaatctacaggtcactttggataatatggcagtttcataatacttattctttcaatagaaataaaacattttaaaatttaaaaaaaac

SEQ ID NO: 286754 - DNA, 3068 bp, Homo sapiens
ggggatatggcggggcctttgtctctcgctgtcgccggagtcccaggtctgtcttcactgctctgtgtcctctgctcctagaggcccagcctctgtggcgctgttaccagcagtattggagatccacagctaagatgccaggaccccctagaagcctagaaatgggactgttgacatttagggatgtggccatagaattctctctggaggagtggcaacacctggacattgcacagcagaatttatatagaaatgtgatgttagagaactacagaaacctggccttcctgggtattgctgtctctaagccagacctgatcacctgtctggaacaagggaaagagccctggaatatgaagcgacatgagatggtggatgaacccccaggtatgtgtcctcattttgctcaagacctttggccagagcagggcatggaagattcttttcaaaaagcaatactgagaagatatggaaaatatggacatgagaatttacagttaagaaaaggctgtaaaagtgtggatgagtataaggtgaacaaagaaggttataatggacttaaccagtgtttcacaactgcccagagcaaagtatttcaatgtgataaatatttgaaagtcttctataaatttttaaattcaaacagacctaagataagacatactgaaaagaaatctttcaaatgtaaaaaacgtgtcaaattattttgcatgctttcacataaaacccaacacaaaagcatttatcatagagagaagtcctacaaatgtaaagaatgtggaaaaacctttaattggtcctcaacccttactaatcataggaaaatttatactgaagagaaaccttacaaatgtgaagaatataacaaatctcctaagcaactctcaacccttactacacatgaaataattcatgctggagagaaactctacaaatgtgaagaatgtggcaaagcttttaatcggtcctcaacttttactaaacataaggtaattcatactggagtaaaaccctacaaatgtgaagaatgtggcaaagcatttttctggtcctcaaccctaactaaacataagagaattcatactggagagcaaccctacaaatgggaaaaatttggcaaagcctttaatcggtcctcgcacctcaccacagataagataactcattggagagaaatcttacaagtatgaataatgtgccaaagcctaagaaaaccctcaattcttaatagatataagattattcctactggagagaaactacaaacctgagagaggcgctaatgcttttgacagtacctaaaactttaaagaaaatcattctgctgaaaaatcctagaaatgtgaagaatgtgaaaaagcctttaaatgattgtcacacttgattgtaggtaagataattcatactggagaaaactaccagtgtgaacaacgtggccaagcttcgacaatgctcacaccctattgcacaggaaagcatttatacttgagaagaaatgtacaaatattggcaaagtaaaaaatccattaacacctgctcacatcttactcaaaattgtagagttcatagtaaataaaagcattaaaattctaattactctcagaagatctgtcagaaagtatgtctttaaagtatagaagagcatttattttgaaaaaaacattacacatatgaagaggattgtaatatctttacttgtaccacagatcttattgtacacattttatactagagaaaaaccctcaggcagttgttaaaattttgttgaacatcagggagtttaagaaaaccctgcaagtataatgaatttggaaaaacattttttcaaaaactacaaattataaaacaccaaagtgttcatactaaaatatatttttgcagatacattaaatatgaaagatattcaatccaaaattaagtctatgtaaatatcagggaataattcacagtagaaatatctagggcattcaagctttagacattacactaaatcagagtgctgagtatagaaaataatacaaacagatttgtctaaacatttgtatataactttaaaaatagaatattttttggagggttataattacattcaaagtacttttttttgaaaatacagattttttttaaaagtgaataatgtgttcaactcttaaattcatgctgtttcatcattgctggtgtattcatatgtgaaagcatgtgactaattgttgctgcataaaagatatgagattcttttttattaggcattatttatgaccttttctatgaaaagataaggacattaaaatgtaagatgcgtgaggaaaatttaggtagagaggctctttgtggttaacttataatattgagtgatgcatgaggtaggtgttcagaataatattcctctgcattattatgaatgaaaagcattcttaattttagttaaaattaagttagtcatatgttattttattaattgtacttctatgaaataatatgcagtctatttttaaattataaattatgtgtgaacttagcttttcaattcaacatttttaacatattaaatactattgtgaattcaatgaagtgttcttatgccactaactttaacctattcccttactcaaggatgtaggtaaaagatggtaacaatacactatttggtaagataatgtactgacatctctagcaatcttttttgccagtggctttaaattgccaataagttaaagaatattgttcctatgggttaaatttttattcttattttcacatttaaatttatttttcttaatttttgtggatacataatatgtgtatatatgtatgccatatatggtatattttgatgcaggcatactctatataataatcacattagaggaaatgagatatccattacctctagcatttattctttttattacaagcaattcaattgtacacttttagttatttttaaatttacaatgttattgattacagggtcatttttatggtcataataaaaaattttatacaaacgtgtaaaatctatacatttctgagttctgaataaatatttttaaaaattttaaaatatt

SEQ ID NO: 286755 - DNA, 3087 bp, Homo sapiens
ctctgtgacggcctctgttgccctgtgatctgcaggtccggagagacgcacagctaagatgtcaggacatcctggaagctgggaaagggtcttgccatctctaagctggacctggtgacctttttggagggaaagaaagagccctggactgtgaagagtgaggagaccatagctgcacagccaggactgttgacatttagggatgtggccatagaattctctctggaggagtggcaacacctggacattgcacagcagaatttatatagaaatgtgatgttagagaactacagaaacctggccttcctgggtattgctgtctctaagccagacctgatcacctgtctggaacaagggaaagagccctggaatatgaagcgacatgagatggtggatgaacccccaggtatgtgtcctcattttgctcaagacctttggccagagcagggcatggaagattcttttcaaaaagcaatactgagaagatatggaaaatatggacatgagaatttacagttaagaaaaggctgtaaaagtgtggatgagtataaggtgaacaaagaaggttataatggacttaaccagtgtttcacaactgcccagagcaaagtatttcaatgtgataaatatttgaaagtcttctataaatttttaaattcaaacagacctaagataagacatactgaaaagaaatctttcaaatgtaaaaaacgtgtcaaattattttgcatgctttcacataaaacccaacacaaaagcatttatcatagagagaagtcctacaaatgtaaagaatgtggaaaaacctttaattggtcctcaacccttactaatcataggaaaatttatactgaagagaaaccttacaaatgtgaagaatataacaaatctcctaagcaactctcaacccttactacacatgaaataattcatgctggagagaaactctacaaatgtgaagaatgtggcaaagcttttaatcggtcctcaacttttactaaacataaggtaattcatactggagtaaaaccctacaaatgtgaagaatgtggcaaagcatttttctggtcctcaaccctaactaaacataagagaattcatactggagagcaaccctacaaatgggaaaaatttggcaaagcctttaatcggtcctcgcacctcaccacagataagataactcattggagagaaatcttacaagtatgaataatgtgccaaagcctaagaaaaccctcaattcttaatagatataagattattcctactggagagaaactacaaacctgagagaggcgctaatgcttttgacagtacctaaaactttaaagaaaatcattctgctgaaaaatcctagaaatgtgaagaatgtgaaaaagcctttaaatgattgtcacacttgattgtaggtaagataattcatactggagaaaactaccagtgtgaacaacgtggccaagcttcgacaatgctcacaccctattgcacaggaaagcatttatacttgagaagaaatgtacaaatattggcaaagtaaaaaatccattaacacctgctcacatcttactcaaaattgtagagttcatagtaaataaaagcattaaaattctaattactctcagaagatctgtcagaaagtatgtctttaaagtatagaagagcatttattttgaaaaaaacattacacatatgaagaggattgtaatatctttacttgtaccacagatcttattgtacacattttatactagagaaaaaccctcaggcagttgttaaaattttgttgaacatcagggagtttaagaaaaccctgcaagtataatgaatttggaaaaacattttttcaaaaactacaaattataaaacaccaaagtgttcatactaaaatatatttttgcagatacattaaatatgaaagatattcaatccaaaattaagtctatgtaaatatcagggaataattcacagtagaaatatctagggcattcaagctttagacattacactaaatcagagtgctgagtatagaaaataatacaaacagatttgtctaaacatttgtatataactttaaaaatagaatattttttggagggttataattacattcaaagtacttttttttgaaaatacagattttttttaaaagtgaataatgtgttcaactcttaaattcatgctgtttcatcattgctggtgtattcatatgtgaaagcatgtgactaattgttgctgcataaaagatatgagattcttttttattaggcattatttatgaccttttctatgaaaagataaggacattaaaatgtaagatgcgtgaggaaaatttaggtagagaggctctttgtggttaacttataatattgagtgatgcatgaggtaggtgttcagaataatattcctctgcattattatgaatgaaaagcattcttaattttagttaaaattaagttagtcatatgttattttattaattgtacttctatgaaataatatgcagtctatttttaaattataaattatgtgtgaacttagcttttcaattcaacatttttaacatattaaatactattgtgaattcaatgaagtgttcttatgccactaactttaacctattcccttactcaaggatgtaggtaaaagatggtaacaatacactatttggtaagataatgtactgacatctctagcaatcttttttgccagtggctttaaattgccaataagttaaagaatattgttcctatgggttaaatttttattcttattttcacatttaaatttatttttcttaatttttgtggatacataatatgtgtatatatgtatgccatatatggtatattttgatgcaggcatactctatataataatcacattagaggaaatgagatatccattacctctagcatttattctttttattacaagcaattcaattgtacacttttagttatttttaaatttacaatgttattgattacagggtcatttttatggtcataataaaaaattttatacaaacgtgtaaaatctatacatttctgagttctgaataaatatttttaaaaattttaaaatatt

SEQ ID NO: 286756 - DNA, 3191 bp, Homo sapiens
agcggagaggatgtaacatatccctggctgagcacccaggtgatatgacactcctgcttgtttccttccctcggggaagatgtgagataccttggctgaaatcccaggtgcagttttgacacacttctgtctagcagctgagtattgtgatcttcgaggaacgtggcccagccgtacaaataggattgtgccacactgctggacccagcacctagatgatgtaactattctcctgccttggtgctactcaaaaaagacattaacatatctcagagccttgcacccagggactgttgacatttagggatgtggccatagaattctctctggaggagtggcaacacctggacattgcacagcagaatttatatagaaatgtgatgttagagaactacagaaacctggccttcctgggtattgctgtctctaagccagacctgatcacctgtctggaacaagggaaagagccctggaatatgaagcgacatgagatggtggatgaacccccaggtatgtgtcctcattttgctcaagacctttggccagagcagggcatggaagattcttttcaaaaagcaatactgagaagatatggaaaatatggacatgagaatttacagttaagaaaaggctgtaaaagtgtggatgagtataaggtgaacaaagaaggttataatggacttaaccagtgtttcacaactgcccagagcaaagtatttcaatgtgataaatatttgaaagtcttctataaatttttaaattcaaacagacctaagataagacatactgaaaagaaatctttcaaatgtaaaaaacgtgtcaaattattttgcatgctttcacataaaacccaacacaaaagcatttatcatagagagaagtcctacaaatgtaaagaatgtggaaaaacctttaattggtcctcaacccttactaatcataggaaaatttatactgaagagaaaccttacaaatgtgaagaatataacaaatctcctaagcaactctcaacccttactacacatgaaataattcatgctggagagaaactctacaaatgtgaagaatgtggcaaagcttttaatcggtcctcaacttttactaaacataaggtaattcatactggagtaaaaccctacaaatgtgaagaatgtggcaaagcatttttctggtcctcaaccctaactaaacataagagaattcatactggagagcaaccctacaaatgggaaaaatttggcaaagcctttaatcggtcctcgcacctcaccacagataagataactcattggagagaaatcttacaagtatgaataatgtgccaaagcctaagaaaaccctcaattcttaatagatataagattattcctactggagagaaactacaaacctgagagaggcgctaatgcttttgacagtacctaaaactttaaagaaaatcattctgctgaaaaatcctagaaatgtgaagaatgtgaaaaagcctttaaatgattgtcacacttgattgtaggtaagataattcatactggagaaaactaccagtgtgaacaacgtggccaagcttcgacaatgctcacaccctattgcacaggaaagcatttatacttgagaagaaatgtacaaatattggcaaagtaaaaaatccattaacacctgctcacatcttactcaaaattgtagagttcatagtaaataaaagcattaaaattctaattactctcagaagatctgtcagaaagtatgtctttaaagtatagaagagcatttattttgaaaaaaacattacacatatgaagaggattgtaatatctttacttgtaccacagatcttattgtacacattttatactagagaaaaaccctcaggcagttgttaaaattttgttgaacatcagggagtttaagaaaaccctgcaagtataatgaatttggaaaaacattttttcaaaaactacaaattataaaacaccaaagtgttcatactaaaatatatttttgcagatacattaaatatgaaagatattcaatccaaaattaagtctatgtaaatatcagggaataattcacagtagaaatatctagggcattcaagctttagacattacactaaatcagagtgctgagtatagaaaataatacaaacagatttgtctaaacatttgtatataactttaaaaatagaatattttttggagggttataattacattcaaagtacttttttttgaaaatacagattttttttaaaagtgaataatgtgttcaactcttaaattcatgctgtttcatcattgctggtgtattcatatgtgaaagcatgtgactaattgttgctgcataaaagatatgagattcttttttattaggcattatttatgaccttttctatgaaaagataaggacattaaaatgtaagatgcgtgaggaaaatttaggtagagaggctctttgtggttaacttataatattgagtgatgcatgaggtaggtgttcagaataatattcctctgcattattatgaatgaaaagcattcttaattttagttaaaattaagttagtcatatgttattttattaattgtacttctatgaaataatatgcagtctatttttaaattataaattatgtgtgaacttagcttttcaattcaacatttttaacatattaaatactattgtgaattcaatgaagtgttcttatgccactaactttaacctattcccttactcaaggatgtaggtaaaagatggtaacaatacactatttggtaagataatgtactgacatctctagcaatcttttttgccagtggctttaaattgccaataagttaaagaatattgttcctatgggttaaatttttattcttattttcacatttaaatttatttttcttaatttttgtggatacataatatgtgtatatatgtatgccatatatggtatattttgatgcaggcatactctatataataatcacattagaggaaatgagatatccattacctctagcatttattctttttattacaagcaattcaattgtacacttttagttatttttaaatttacaatgttattgattacagggtcatttttatggtcataataaaaaattttatacaaacgtgtaaaatctatacatttctgagttctgaataaatatttttaaaaattttaaaatatt

SEQ ID NO: 286757 - DNA, 2555 bp, Homo sapiens
  misc_feature (21)..(21): n is a, c, g, or t
agttcgacggagactctctantgatatgctttcacataaaacccaacacaaaagcatttatcatagagagaagtcctacaaatgtaaagaatgtggaaaaacctttaattggtcctcaacccttactaatcataggaaaatttatactgaagagaaaccttacaaatgtgaagaatataacaaatctcccttttagccaatcctcaacccttactacacataagataattcatactggagagaaaccctacaaatgtgaagaatgtggcaaagcctttaactggtcctcaactcttactaaacataagataattcatactgaagagaaaccctacaaatgtgaaaaatgtggcaaagcctttaagcagtcttcaatccttactaaccataagagaattcatactggagagaaaccctataaatgtgaagaatgtggcaaagcttttaatcggtcctcaacttttactaaacataaggtaattcatactggagtaaaaccctacaaatgtgaagaatgtggcaaagcatttttctggtcctcaaccctaactaaacataagagaattcatactggagagcaaccctacaaatgggaaaaatttggcaaagcctttaatcggtcctcgcacctcaccacagataagataactcattggagagaaatcttacaagtatgaataatgtgccaaagcctaagaaaaccctcaattcttaatagatataagattattcctactggagagaaactacaaacctgagagaggcgctaatgcttttgacagtacctaaaactttaaagaaaatcattctgctgaaaaatcctagaaatgtgaagaatgtgaaaaagcctttaaatgattgtcacacttgattgtaggtaagataattcatactggagaaaactaccagtgtgaacaacgtggccaagcttcgacaatgctcacaccctattgcacaggaaagcatttatacttgagaagaaatgtacaaatattggcaaagtaaaaaatccattaacacctgctcacatcttactcaaaattgtagagttcatagtaaataaaagcattaaaattctaattactctcagaagatctgtcagaaagtatgtctttaaagtatagaagagcatttattttgaaaaaaacattacacatatgaagaggattgtaatatctttacttgtaccacagatcttattgtacacattttatactagagaaaaaccctcaggcagttgttaaaattttgttgaacatcagggagtttaagaaaaccctgcaagtataatgaatttggaaaaacattttttcaaaaactacaaattataaaacaccaaagtgttcatactaaaatatatttttgcagatacattaaatatgaaagatattcaatccaaaattaagtctatgtaaatatcagggaataattcacagtagaaatatctagggcattcaagctttagacattacactaaatcagagtgctgagtatagaaaataatacaaacagatttgtctaaacatttgtatataactttaaaaatagaatattttttggagggttataattacattcaaagtacttttttttgaaaatacagattttttttaaaagtgaataatgtgttcaactcttaaattcatgctgtttcatcattgctggtgtattcatatgtgaaagcatgtgactaattgttgctgcataaaagatatgagattcttttttattaggcattatttatgaccttttctatgaaaagataaggacattaaaatgtaagatgcgtgaggaaaatttaggtagagaggctctttgtggttaacttataatattgagtgatgcatgaggtaggtgttcagaataatattcctctgcattattatgaatgaaaagcattcttaattttagttaaaattaagttagtcatatgttattttattaattgtacttctatgaaataatatgcagtctatttttaaattataaattatgtgtgaacttagcttttcaattcaacatttttaacatattaaatactattgtgaattcaatgaagtgttcttatgccactaactttaacctattcccttactcaaggatgtaggtaaaagatggtaacaatacactatttggtaagataatgtactgacatctctagcaatcttttttgccagtggctttaaattgccaataagttaaagaatattgttcctatgggttaaatttttattcttattttcacatttaaatttatttttcttaatttttgtggatacataatatgtgtatatatgtatgccatatatggtatattttgatgcaggcatactctatataataatcacattagaggaaatgagatatccattacctctagcatttattctttttattacaagcaattcaattgtacacttttagttatttttaaatttacaatgttattgattacagggtcatttttatggtcataataaaaaattttatacaaacgtgtaaaatctatacatttctgagttctgaataaatatttttaaaaattttaaaatatt

SEQ ID NO: 286758 - DNA, 2941 bp, Homo sapiens
ggggatatggcggggcctttgtctctcgctgtcgccggagtcccaggtctgtcttcactgctctgtgtcctctgctcctagaggcccagcctctgtggcgctgttaccagcagtattggagatccacagctaagatgccaggaccccctagaagcctagaaatggtattgctgtctctaagccagacctgatcacctgtctggaacaagggaaagagccctggaatatgaagcgacatgagatggtggatgaacccccaggtatgtgtcctcattttgctcaagacctttggccagagcagggcatggaagattcttttcaaaaagcaatactgagaagatatggaaaatatggacatgagaatttacagttaagaaaaggctgtaaaagtgtggatgagtataaggtgaacaaagaaggttataatggacttaaccagtgtttcacaactgcccagagcaaagtatttcaatgtgataaatatttgaaagtcttctataaatttttaaattcaaacagacctaagataagacatactgaaaagaaatctttcaaatgtaaaaaacgtgtcaaattattttgcatgctttcacataaaacccaacacaaaagcatttatcatagagagaagtcctacaaatgtaaagaatgtggaaaaacctttaattggtcctcaacccttactaatcataggaaaatttatactgaagagaaaccttacaaatgtgaagaatataacaaatctcctaagcaactctcaacccttactacacatgaaataattcatgctggagagaaactctacaaatgtgaagaatgtggcaaagcttttaatcggtcctcaacttttactaaacataaggtaattcatactggagtaaaaccctacaaatgtgaagaatgtggcaaagcatttttctggtcctcaaccctaactaaacataagagaattcatactggagagcaaccctacaaatgggaaaaatttggcaaagcctttaatcggtcctcgcacctcaccacagataagataactcattggagagaaatcttacaagtatgaataatgtgccaaagcctaagaaaaccctcaattcttaatagatataagattattcctactggagagaaactacaaacctgagagaggcgctaatgcttttgacagtacctaaaactttaaagaaaatcattctgctgaaaaatcctagaaatgtgaagaatgtgaaaaagcctttaaatgattgtcacacttgattgtaggtaagataattcatactggagaaaactaccagtgtgaacaacgtggccaagcttcgacaatgctcacaccctattgcacaggaaagcatttatacttgagaagaaatgtacaaatattggcaaagtaaaaaatccattaacacctgctcacatcttactcaaaattgtagagttcatagtaaataaaagcattaaaattctaattactctcagaagatctgtcagaaagtatgtctttaaagtatagaagagcatttattttgaaaaaaacattacacatatgaagaggattgtaatatctttacttgtaccacagatcttattgtacacattttatactagagaaaaaccctcaggcagttgttaaaattttgttgaacatcagggagtttaagaaaaccctgcaagtataatgaatttggaaaaacattttttcaaaaactacaaattataaaacaccaaagtgttcatactaaaatatatttttgcagatacattaaatatgaaagatattcaatccaaaattaagtctatgtaaatatcagggaataattcacagtagaaatatctagggcattcaagctttagacattacactaaatcagagtgctgagtatagaaaataatacaaacagatttgtctaaacatttgtatataactttaaaaatagaatattttttggagggttataattacattcaaagtacttttttttgaaaatacagattttttttaaaagtgaataatgtgttcaactcttaaattcatgctgtttcatcattgctggtgtattcatatgtgaaagcatgtgactaattgttgctgcataaaagatatgagattcttttttattaggcattatttatgaccttttctatgaaaagataaggacattaaaatgtaagatgcgtgaggaaaatttaggtagagaggctctttgtggttaacttataatattgagtgatgcatgaggtaggtgttcagaataatattcctctgcattattatgaatgaaaagcattcttaattttagttaaaattaagttagtcatatgttattttattaattgtacttctatgaaataatatgcagtctatttttaaattataaattatgtgtgaacttagcttttcaattcaacatttttaacatattaaatactattgtgaattcaatgaagtgttcttatgccactaactttaacctattcccttactcaaggatgtaggtaaaagatggtaacaatacactatttggtaagataatgtactgacatctctagcaatcttttttgccagtggctttaaattgccaataagttaaagaatattgttcctatgggttaaatttttattcttattttcacatttaaatttatttttcttaatttttgtggatacataatatgtgtatatatgtatgccatatatggtatattttgatgcaggcatactctatataataatcacattagaggaaatgagatatccattacctctagcatttattctttttattacaagcaattcaattgtacacttttagttatttttaaatttacaatgttattgattacagggtcatttttatggtcataataaaaaattttatacaaacgtgtaaaatctatacatttctgagttctgaataaatatttttaaaaattttaaaatatt

SEQ ID NO: 286759 - DNA, 1096 bp, Homo sapiens
ggggatatggcggggcctttgtctctcgctgtcgccggagtcccaggtctgtcttcactgctctgtgtcctctgctcctagaggcccagcctctgtggcgctgttaccagcagtattggagatccacagctaagatgccaggaccccctagaagcctagaaatgggactgttgacatttagggatgtggccatagaattctctctggaggagtggcaacacctggacattgcacagcagaatttatatagaaatgtgatgttagagaactacagaaacctggccttcctgggtattgctgtctctaagccagacctgatcacctgtctggaacaagggaaagagccctggaatatgaagcgacatgagatggtggatgaacccccaggtatgtgtcctcattttgctcaagacctttggccagagcagggcatggaagattcttttcaaaaagcaatactgagaagatatggaaaatatggacatgagaatttacagttaagaaaaggctgtaaaagtgtggatgagtataaggtgaacaaagaaggttataatggacttaaccagtgtttcacaactgcccagagcaaagtatttcaatgtgataaatatttgaaagtcttctataaatttttaaattcaaacagacctaagataagacatactgaaaagaaatctttcaaatgtaaaaaacgtgtcaaattattttgcatgctttcacataaaacccaacacaaaagcatttatcatagagagaagtcctacaaatgtaaagaatgtggaaaaacctttaattggtcctcaacccttactaatcataggaaataagcaactctcaacccttactacacatgaaataattcatgctggagagaaactctacaaatgtgaagaatgtggtgaagcttttaatcgatcctcaaatcttactacacataagataattcatactggagagaaaccttacaagtgtgaagaatgtggcaaagcatttatctggtcctcaacccttactgagcataagaaaattcatactagaaagaaaccctacaagtgtgaagaatgtggcaaagcatttatatggtcctcaacactaa

SEQ ID NO: 286760 - DNA, 466 bp, Homo sapiens
actctaaaggatcccccagagtccaaacagtgccagaaatgatcaatgatgaagtgggggttgggcagctagctggctggagaggtgagccaaaggaacccaggagtggacacctgagggagtggggtctcagaggaactgggcagagctaaatgggctaagtcttaagaggcaggggcaggaaatgtaatggaggctttctactctacaacgtccaatcctgctggggagggcatggagtatttcagagtaggaaagaatgagggagaggatagtcagataaatcaaagtttcattcttttcctcctctttcttagctcgtcaaatcctacactttctctccagctggaattatggtggtgagtgagggagttaaaataatcctggctcctccctaatcaatggcagtagagagccgaaagttggaagaagcacgtaaaacaggtatgtagcttcaagaagacac

SEQ ID NO: 286761 - DNA, 790 bp, Homo sapiens
ggaggctgaggcacagtgagggtcaggggcttgccctgatctttgcagagaggtacctggattctccatccttgtcgtgtctctggtcttctcttggctgggtttcctgttctgcttcatctgaagccaggagctgtgatctctgcagaggcttccttgatttgctgagctctctcctgacttcttcagcaccatctcctcccaggtctgatgggattttgccttctgagaaacaagagagatgtgagagccccagggctaaacccttccaagtatctgggcaccatgatctagcagacaagttggtgagggttaaggagtggggtgtgaggaggtgtgttctacctctgggaggaatcgcggcctgggaatgcggccctcggtccactgaagcgtgcccaggtcgccctcgacctctcgtacaatcgcctcatactcagctcgcaggctctggaactggcgtcggaccaagaagccccggacgcaggcctggtatggagaacgagaggaaagaagtcccttatcacggaaaaatcctgtgaaccccgcgcccgcccccgcacctgcaatgcagacaccttccgaaccagcagctctggctccatgggcgccaactgccaggcccgcccgcgcgcctgcgaagtacgtcattggtcggcgtcgctcctgagcatgcgcgggcgtgggctttgccccagccgttcccacggcaacctcctaccgtccagggtagaggcgtcctggcgacaggcgtacctgcgtccccccagcccccgactgcccctcccac

SEQ ID NO: 286762 - DNA, 662 bp, Homo sapiens
ggaggctgaggcacagtgagggtcaggggcttgccctgatctttgcagagaggtacctggattctccatccttgtcgtgtctctggtcttctcttggctgggtttcctgttctgcttcatctgaagccaggagctgtgatctctgcagaggcttccttgatttgctgagctctctcctgacttcttcagcaccatctcctcccaggtctgatgggattttgccttctgagaaacaagagagatgtgagagccccagggctaaacccttccaagtatctgggcaccatgatctagcagacaagttggtgagggttaaggagtggggtgtgaggaggtgagtctactgcctcttccagtgagaaaagcttatcactgggaagggtgggttccaccctgcccaagtccctccttcccttctctcctaggtgtgttctacctctgggaggaatcgcggcctgggaatgcggccctcggtccactgaagcgtgcccaggtcgccctcgacctctcgtacaatcgcctcatactcagctcgcaggctctggaactggcgtcggaccaagaagccccggacgcaggcctggtatggagaacgagaggaaagaagtcccttatcacggtaagagagggggcatctcggaggactgtcctgaagaggtcgt

SEQ ID NO: 286763 - DNA, 1456 bp, Homo sapiens
gtgagcttgctccttaagttacaggaactctccttataatagacacttcattttcctagtccatccctcatgaaaaatgactgaccactgctgggcagcaggagggtcataatccctaactccaatcactggcaactcctgagatcagaggaaaaccagcaacagcgtgggagtttggggagaggcattccataccagattctgtggcctgcaggtgacatgctgcctaagagaagcaggagtctgtgacagccaccccaacacgtgacgtcatggccagtagggaagatgagctgaggaactgtgtggtatgtggggaccaagccacaggctaccactttaatgcgctgacttgtgagggctgcaagggtttcttcaggagaacagtgagaacagtcagcaaaagcattggtcccacctgcccctttgctggaagctgtgaagtcagcagccagaggcgccactgcccagcctgcaggttgcagaagtgcttagatgctggcatgaggaaagacatgatactgtcggcagaagccctggcattgcggcgagcaaagcaggcccagcggcgggcacagcaaacacctgtgcaactgagtaaggagcaagaagagctgatccggacactcctgggggcccacacccgccacatgggcaccatgtttgaacagtttgtgcagtttaggcctccagctcatctgttcatccatcaccagcccttgcccaccctggcccctgtgctgcctctggtcacacacttcgcagacatcaacactttcatggtactgcaagtcatcaagtttactaaggacctgcccgtcttccgttccctgcccattgaagaccagatctcccttctcaagggagcagctgtggaaatctgtcacatcgtactcaataccactttctgtctccaaacacaaaacttcctctgcgggcctcttcgctacacaattgaagatggagcccgtgtggggttccaggtagagtttttggagttgctctttcacttccatggaacactacgaaaactgcagctccaagagcctgagtatgtgctcttggctgccatggccctcttctctcctgaccgacctggagttacccagagagatgagattgatcagctgcaagaggagatggcactgactctgcaaagctacatcaagggccagcagcgaaggccccgggatcggtttctgtatgcgaagttgctaggcctgctggctgagctccggagcattaatgaggcctacgggtaccaaatccagcacatccagggcctgtctgccatgatgccgctgctccaggagatctgcagctgaggccatgctcacttccttccccagctcacctggaacaccctggatacactggagtgggaaaatgctgggaccaaagattgggccgggttcaaagggagcccagtggttgcaatgaaagactaaagcaaaac

SEQ ID NO: 286764 - DNA, 1324 bp, Homo sapiens
aaacagacatctcttgttttccagatactacgggtcataatccctaactccaatcactggcaactcctgagatcagaggaaaaccagcaacagcgtgggagtttggggagaggcattccataccagattctgtggcctgcaggtgacatgctgcctaagagaagcaggagtctgtgacagccaccccaacacgtgacgtcatggccagtagggaagatgagctgaggaactgtgtggtatgtggggaccaagccacaggctaccactttaatgcgctgacttgtgagggctgcaagggtttcttcaggagaacagtcagccagaggcgccactgcccagcctgcaggttgcagaagtgcttagatgctggcatgaggaaagacatgatactgtcggcagaagccctggcattgcggcgagcaaagcaggcccagcggcgggcacagcaaacacctgtgcaactgagtaaggagcaagaagagctgatccggacactcctgggggcccacacccgccacatgggcaccatgtttgaacagtttgtgcagtttaggcctccagctcatctgttcatccatcaccagcccttgcccaccctggcccctgtgctgcctctggtcacacacttcgcagacatcaacactttcatggtactgcaagtcatcaagtttactaaggacctgcccgtcttccgttccctgcccattgaagaccagatctcccttctcaagggagcagctgtggaaatctgtcacatcgtactcaataccactttctgtctccaaacacaaaacttcctctgcgggcctcttcgctacacaattgaagatggagcccgtgtggggttccaggtagagtttttggagttgctctttcacttccatggaacactacgaaaactgcagctccaagagcctgagtatgtgctcttggctgccatggccctcttctctcctgaccgacctggagttacccagagagatgagattgatcagctgcaagaggagatggcactgactctgcaaagctacatcaagggccagcagcgaaggccccgggatcggtttctgtatgcgaagttgctaggcctgctggctgagctccggagcattaatgaggcctacgggtaccaaatccagcacatccagggcctgtctgccatgatgccgctgctccaggagatctgcagctgaggccatgctcacttccttccccagctcacctggaacaccctggatacactggagtgggaaaatgctgggaccaaagattgggccgggttcaaagggagcccagtggttgcaatgaaagactaaagcaaaac

SEQ ID NO: 286765 - DNA, 1207 bp, Homo sapiens
aaacagacatctcttgttttccagatactacgggtcataatccctaactccaatcactggcaactcctgagatcagaggaaaaccagcaacagcgtgggagtttggggagaggcattccataccagattctgtggcctgcaggtgacatgctgcctaagagaagcaggagtctgtgacagccaccccaacacgtgacgtcatggccagtagggaagatgagctgaggaactgtgtggtatgtggggaccaagccacaggctaccactttaatgcgctgacttgtgagggctgcaagggtttcttcaggagaacagtcagccagaggcgccactgcccagcctgcaggttgcagaagtgcttagatgctggcatgaggaaagacatgatactgtcggcagaagccctggcattgcggcgagcaaagcaggcccagcggcgggcacagcaaacacctgtgcaactgagtaaggagcaagaagagctgatccggacactcctgggggcccacacccgccacatgggcaccatgtttgaacagtttgtgcagtttaggcctccagctcatctgttcatccatcaccagcccttgcccaccctggcccctgtgctgcctctggtcacacacttcgcagacatcaacactttcatggtactgcaagtcatcaagtttactaaggacctgcccgtcttccgttccctgcccattgaagaccagatctcccttctcaagggagcagctgtggaaatctgtcacatcgtactcaataccactttctgtctccaaacacaaaacttcctctgcgggcctcttcgctacacaattgaagatggagcccgtgaccgacctggagttacccagagagatgagattgatcagctgcaagaggagatggcactgactctgcaaagctacatcaagggccagcagcgaaggccccgggatcggtttctgtatgcgaagttgctaggcctgctggctgagctccggagcattaatgaggcctacgggtaccaaatccagcacatccagggcctgtctgccatgatgccgctgctccaggagatctgcagctgaggccatgctcacttccttccccagctcacctggaacaccctggatacactggagtgggaaaatgctgggaccaaagattgggccgggttcaaagggagcccagtggttgcaatgaaagactaaagcaaaac

SEQ ID NO: 286766 - DNA, 1613 bp, Homo sapiens
aaacagacatctcttgttttccagatactacgggtcataatccctaactccaatcactggcaactcctgagatcagaggaaaaccagcaacagcgtgggagtttggggagaggcattccataccagattctgtggcctgcaggtgacatgctgcctaagagaagcaggagtctgtgacagccaccccaacacgtgacgtcatggccagtagggaagatgagctgaggaactgtgtggtatgtggggaccaagccacaggctaccactttaatgcgctgacttgtgagggctgcaagggtttcttcaggagaacagtcagccagaggcgccactgcccagcctgcaggttgcagaagtgcttagatgctggcatgaggaaagacatgatactgtcggcagaagccctggcattgcggcgagcaaagcaggcccagcggcgggcacagcaaacacctgtgcaactgagtaaggagcaagaagagctgatccggacactcctgggggcccacacccgccacatgggcaccatgtttgaacagtttgtgcagtttaggcctccagctcatctgttcatccatcaccagcccttgcccaccctggcccctgtgctgcctctggtcacacacttcgcagacatcaacactttcatggtactgcaagtcatcaagtttactaaggacctgcccgtcttccgttccctgcccattgaagaccagatctcccttctcaagggagcagctgtggaaatctgtcacatcgtactcaataccactttctgtctccaaacacaaaacttcctctgcgggcctcttcgctacacaattgaagatggagcccgtggtgagatggtgctagagcaatagggggcatgtgtcctcatggtacaggatgtggtcaggtgacctagaggctcctaatcctagtatctcccacagtggggttccaggtagagtttttggagttgctctttcacttccatggaacactacgaaaactgcagctccaagagcctgagtatgtgctcttggctgccatggccctcttctctcctgcctggtgagcacctcccaaagcccagagccttttgctgcaccacctctgcccaaatactcagctccttgagtccatccacccaggccttctagcctagctatcaaacctgcagactaggtctatcccagcctcagtccccggggcaccacgcaggcccacccctgccacccaacttgtccttcccagctccctaaccgacctggagttacccagagagatgagattgatcagctgcaagaggagatggcactgactctgcaaagctacatcaagggccagcagcgaaggccccgggatcggtttctgtatgcgaagttgctaggcctgctggctgagctccggagcattaatgaggcctacgggtaccaaatccagcacatccagggcctgtctgccatgatgccgctgctccaggagatctgcagctgaggccatgctcacttccttccccagctcacctggaacaccctggatacactggagtgggaaaatgctgggaccaaagattgggccgggttcaaagggagcccagtggttgcaatgaaagactaaagcaaaac

SEQ ID NO: 286767 - DNA, 1551 bp, Homo sapiens
aaacagacatctcttgttttccagatactacgggtcataatccctaactccaatcactggcaactcctgagatcagaggaaaaccagcaacagcgtgggagtttggggagaggcattccataccagattctgtggcctgcaggtgacatgctgcctaagagaagcaggagtctgtgacagccaccccaacacgtgacgtcatggccagtagggaagatgagctgaggaactgtgtggtatgtggggaccaagccacaggctaccactttaatgcgctgacttgtgagggctgcaagggtttcttcaggagaacagtcagccagaggcgccactgcccagcctgcaggttgcagaagtgcttagatgctggcatgaggaaagacatgatactgtcggcagaagccctggcattgcggcgagcaaagcaggcccagcggcgggcacagcaaacacctgtgcaactgagtaaggagcaagaagagctgatccggacactcctgggggcccacacccgccacatgggcaccatgtttgaacagtttgtgcagtttaggcctccagctcatctgttcatccatcaccagcccttgcccaccctggcccctgtgctgcctctggtcacacacttcgcagacatcaacactttcatggtactgcaagtcatcaagtttactaaggacctgcccgtcttccgttccctgcccattgaagaccagatctcccttctcaagggagcagctgtggaaatctgtcacatcgtactcaataccactttctgtctccaaacacaaaacttcctctgcgggcctcttcgctacacaattgaagatggagcccgtggtgagatggtgctagagcaatagggggcatgtgtcctcatggtacaggatgtggtcaggtgacctagaggctcctaatcctagtatctcccacagtggggttccaggtagagtttttggagttgctctttcacttccatggaacactacgcctggtgagcacctcccaaagcccagagccttttgctgcaccacctctgcccaaatactcagctccttgagtccatccacccaggccttctagcctagctatcaaacctgcagactaggtctatcccagcctcagtccccggggcaccacgcaggcccacccctgccacccaacttgtccttcccagctccctaaccgacctggagttacccagagagatgagattgatcagctgcaagaggagatggcactgactctgcaaagctacatcaagggccagcagcgaaggccccgggatcggtttctgtatgcgaagttgctaggcctgctggctgagctccggagcattaatgaggcctacgggtaccaaatccagcacatccagggcctgtctgccatgatgccgctgctccaggagatctgcagctgaggccatgctcacttccttccccagctcacctggaacaccctggatacactggagtgggaaaatgctgggaccaaagattgggccgggttcaaagggagcccagtggttgcaatgaaagactaaagcaaaac

SEQ ID NO: 286768 - DNA, 813 bp, Homo sapiens
gtgagcttgctccttaagttacaggaactctccttataatagacacttcattttcctagtccatccctcatgaaaaatgactgaccactgctgggcagcaggagggtcataatccctaactccaatcactggcaactcctgagatcagaggaaaaccagcaacagcgtgggagtttggggagaggcattccataccagattctgtggcctgcaggtgacatgctgcctaagagaagcaggagtctgtgacagccaccccaacacgtgacgtcatggccagtagggaagatgagctgaggaactgtgtggtatgtggggaccaagccacaggctaccactttaatgcgctgacttgtgagggctgcaagggtttcttcaggagaacagtgagtctcctccccaatggaaatagccctccaaaccaaactccctattagtcagcctttacaccctcgctggtgcccaagcctgtccagctacattactcctttatcttagagtctaactaccctgtggctggcatcctacatcttgccaaacacatcactgtataaactggtggcataacagagggaaagctgaatgtttgtctgatggacacagcccattagtcaagagcatttattatgtacccactgcctgtgaagcacctagctagtactacatcaactaggctttctggagtgatcctgtgttgccatggaaatgcttgagatgtgttggatactatccacccctggggacctttgggcacagctcagattagtccatttcaccagattcccaggtcttttagaccatgtcatctcagcc

SEQ ID NO: 286769 - DNA, 255 bp, Homo sapiens
ggagggccctagggccagagcctctagctaatgttctgatcattgcagcctccagctcatctgttcatccatcaccagcccttgcccaccctggcccctgtgctgcctctggtcacacacttcgcagacatcaacactttcatggtactgcaagtcatcaagtttactaaggacctgcccgtcttccggtgagtgacctcccctcatctttcaggaggcaaacacttcagtaaattgtatatccaccccgaaaag

SEQ ID NO: 286770 - DNA, 878 bp, Homo sapiens
gagggcaggcgtgagcaaccatggccgggcagcacctcccggtaccccggctggagggcgtttctcgggagcagttcatgcagcacctctacccacagagaaaacctcttgtgttggaagggattgatttggggccatgtacaagcaaatggacagtggattacctaagccaagttggagggaagaaagaagtaaagattcatgttgctgcagttgcacagatggacttcattaaactttaccttttgaccagttggtccagagggcagctgaagagaaacataaagaattctttgtttcagaggatgagaaatactacttacggtcacttggagaagaccctagaaaggatgttgcagatatcagaaagcagtttcctttgttgaaaggagatattaagtttccagaattcttcaaagaggaacagttcttttccagtgtttttcgaattagttcaccaggattacaactatggactcattatgatgtatgctacataaatgagaaatttaaagctacaatagatctttagcattatagatttaacagtcacagtttcaacttcctataggttaccctaaacatctgtgtaatttgctgaaacatgacttttgaaaataggtgctgtgcatagcagtgatacaggaatgaattattttgctaatggcaaagcctagttggttcctcacatttgtatttccctgtggtcctattcttgattcatcatcatatatataccaagttttgtgaagtgatttttttttccatgtgaaaaatggccaccagataatgggggaaattgtattggaaaaagtgataagcctttagtataaggaggtataaatgatacacatgactctggctacccagagatccat

SEQ ID NO: 286771 - DNA, 2134 bp, Homo sapiens
gagggcaggcgtgagcaaccatggccgggcagcacctcccggtaccccggctggagggcgtttctcgggagcagttcatgcagcacctctacccacagagaaaacctcttgtgttggaagggattgatttggggccatgtacaagcaaatggacagtggattacctaagccaagttggagggaagaaagaagtaaagattcatgttgctgcagttgcacagatggacttcattaaactttaccttttgaccagttggtccagagggcagctgaagagaaacataaagaattctttgtttcagaggatgagaaatactacttacggtcacttggagaagaccctagaaaggatgttgcagatatcagaaagcagtttcctttgttgaaaggagatattaagtttccagaattcttcaaagaggaacagttcttttccagtgtttttcgaattagttcaccaggattacaactatggactcattatgatgtaatggataatttgttaatacaagtgacaggaaaaaagcgtgttgtactcttcagtcctcgagatgcccagtatttatatttaaaaggtactaaatcagaagtactgaatatagataacccagacttggctaaatatccacttttttccaaggctagaagatatgaatgttcccttgaagctggtgatgtattattcattcctgctttatggttccataatgtaatttctgaagagtttggagtgggagtgaatatcttttggaagcaccttccatctgaatgctatgataaaacagatacctatggaaacaaagatcctacagcagcatcaagagctgcacaaattctggacagagccttgaaaacactggccgagttaccagaggaatatagggacttctatgcacgacgaatggtcctacacattcaagacaaagcctacagcaagaactctgagtaaataatgaagtgaatgcaatgcacattaacactttagtaaggtataacgatataaattaaagattttgttaaaataggaaagatacatcagatttacagattatgtaagtacgaaggggtgtttgtgtggattctacttgatacagattgttataattaaagaatgctgtgctgggaccactctttaacattcagatgctgaccactaaaagtccaacttaaaatgacttaaaaacagtaagaaaatatattgattcacaatacatgaaatctattgacagaatgtgctgcagtgtttctgatccaatgattcagtaatgtcatcaagaaccttgggaacccgcctccacaccccacccccttttcaaccacaacattggcatcatcctaaggctggctaccctcgtggtcatgggatgattgccagtagcagttggagccttgtgcatcttcatttacatgcagcggaagagtcaggctggattctaggggccctgtcctagtatgagaaagctttcccagaattcactttccatatccttaggtctcattgctctaaagtaacttagacctgtccatccctgagccagtcactggcaaagggtctagaataacctttagggcagtcaggtccactggagctgagagtagaagtggaggccacatgagggatatatggggacagaaaggatagtttttttaaaatcatggttctgataggaaaaacatgagcaacgcacaatatctattacatttgcctagaagcagaattttttgaggaactttaaaaaatgtacagatacctaggtcccaactttgtagactgattcaagagtgtttgggatttggtataggaacttaatagacctcacagggtgttctgatgcataatcagagctgagatcaactggagttgatgatagtgacttggattattagttttgtgattagtgcaaaacaaatgtttaatctgatcttgacttttcttgccacccagtatgtcagggtggtttttggtttttgaatgttacaaaataaatattttaatttatacctatgtctaaaccttagcctagttaaagatttcccaactattttttccacctatcccttttttaaaagaaaaattacttaaagaatgaataaatgagatcctaaaagtgttgtcatcgaagacagtgagcca

SEQ ID NO: 286772 - DNA, 1818 bp, Homo sapiens
gatcgagtcggtacccctagttttagaagtttcgatgttgcagatatcagaaagcagtttcctttgttgaaaggagatattaagtttccagaattcttcaaagaggaacagttcttttccagtgtttttcgaattagttcaccaggattacaactatggactcattatgatgtaatggataatttgttaatacaagtgacaggaaaaaagcgtgttgtactcttcagtcctcgagatgcccagtatttatatttaaaaggtactaaatcagaagtactgaatatagataacccagacttggctaaatatccacttttttccaaggctagaagatatgaatgttcccttgaagctggtgatgtattattcattcctgctttatggttccataatgtaatttctgaagagtttggagtgggagtgaatatcttttggaagcaccttccatctgaatgctatgataaaacagatacctatggaaacaaagatcctacagcagcatcaagagctgcacaaattctggacagagccttgaaaacactggccgagttaccagaggaatatagggacttctatgcacgacgaatggtcctacacattcaagacaaagcctacagcaagaactctgagtaaataatgaagtgaatgcaatgcacattaacactttagtaaggtataacgatataaattaaagattttgttaaaataggaaagatacatcagatttacagattatgtaagtacgaaggggtgtttgtgtggattctacttgatacagattgttataattaaagaatgctgtgctgggaccactctttaacattcagatgctgaccactaaaagtccaacttaaaatgacttaaaaacagtaagaaaatatattgattcacaatacatgaaatctattgacagaatgtgctgcagtgtttctgatccaatgattcagtaatgtcatcaagaaccttgggaacccgcctccacaccccacccccttttcaaccacaacattggcatcatcctaaggctggctaccctcgtggtcatgggatgattgccagtagcagttggagccttgtgcatcttcatttacatgcagcggaagagtcaggctggattctaggggccctgtcctagtatgagaaagctttcccagaattcactttccatatccttaggtctcattgctctaaagtaacttagacctgtccatccctgagccagtcactggcaaagggtctagaataacctttagggcagtcaggtccactggagctgagagtagaagtggaggccacatgagggatatatggggacagaaaggatagtttttttaaaatcatggttctgataggaaaaacatgagcaacgcacaatatctattacatttgcctagaagcagaattttttgaggaactttaaaaaatgtacagatacctaggtcccaactttgtagactgattcaagagtgtttgggatttggtataggaacttaatagacctcacagggtgttctgatgcataatcagagctgagatcaactggagttgatgatagtgacttggattattagttttgtgattagtgcaaaacaaatgtttaatctgatcttgacttttcttgccacccagtatgtcagggtggtttttggtttttgaatgttacaaaataaatattttaatttatacctatgtctaaaccttagcctagttaaagatttcccaactattttttccacctatcccttttttaaaagaaaaattacttaaagaatgaataaatgagatcctaaaagtgttgtcatcgaagacagtgagcca

SEQ ID NO: 286773 - DNA, 2043 bp, Homo sapiens
gagggcaggcgtgagcaaccatggccgggcagcacctcccggtaccccggctggagggcgtttctcgggagcagttcatgcagcacctctacccacagagaaaacctcttgtgttggaagggattgatttggggccatgtacaagcaaatggacagtggattacctaagccaagttggagggaagaaagaagtaaagattcatgttgctgcagttgcacagatggacttcattaaactttaccttttgaccagttggtccagagggcagctgaagagaaacataaagaattctttgtttcagaggatgagaaatactacttacggtcacttggagaagaccctagaaaggatgttgcagatatcagaaagcagtttcctttgttgaaaggagatattaagtttccagaattcttcaaagaggaacagttcttttccagtgtttttcgaattagttcaccaggattacaactatggactcattatgatctaaatcagaagtactgaatatagataacccagacttggctaaatatccacttttttccaaggctagaagatatgaatgttcccttgaagctggtgatgtattattcattcctgctttatggttccataatgtaatttctgaagagtttggagtgggagtgaatatcttttggaagcaccttccatctgaatgctatgataaaacagatacctatggaaacaaagatcctacagcagcatcaagagctgcacaaattctggacagagccttgaaaacactggccgagttaccagaggaatatagggacttctatgcacgacgaatggtcctacacattcaagacaaagcctacagcaagaactctgagtaaataatgaagtgaatgcaatgcacattaacactttagtaaggtataacgatataaattaaagattttgttaaaataggaaagatacatcagatttacagattatgtaagtacgaaggggtgtttgtgtggattctacttgatacagattgttataattaaagaatgctgtgctgggaccactctttaacattcagatgctgaccactaaaagtccaacttaaaatgacttaaaaacagtaagaaaatatattgattcacaatacatgaaatctattgacagaatgtgctgcagtgtttctgatccaatgattcagtaatgtcatcaagaaccttgggaacccgcctccacaccccacccccttttcaaccacaacattggcatcatcctaaggctggctaccctcgtggtcatgggatgattgccagtagcagttggagccttgtgcatcttcatttacatgcagcggaagagtcaggctggattctaggggccctgtcctagtatgagaaagctttcccagaattcactttccatatccttaggtctcattgctctaaagtaacttagacctgtccatccctgagccagtcactggcaaagggtctagaataacctttagggcagtcaggtccactggagctgagagtagaagtggaggccacatgagggatatatggggacagaaaggatagtttttttaaaatcatggttctgataggaaaaacatgagcaacgcacaatatctattacatttgcctagaagcagaattttttgaggaactttaaaaaatgtacagatacctaggtcccaactttgtagactgattcaagagtgtttgggatttggtataggaacttaatagacctcacagggtgttctgatgcataatcagagctgagatcaactggagttgatgatagtgacttggattattagttttgtgattagtgcaaaacaaatgtttaatctgatcttgacttttcttgccacccagtatgtcagggtggtttttggtttttgaatgttacaaaataaatattttaatttatacctatgtctaaaccttagcctagttaaagatttcccaactattttttccacctatcccttttttaaaagaaaaattacttaaagaatgaataaatgagatcctaaaagtgttgtcatcgaagacagtgagcca

SEQ ID NO: 286774 - DNA, 459 bp, Homo sapiens
gagggcaggcgtgagcaaccatggccgggcagcacctcccggtaccccggctggagggcgtttctcgggagcagttcatgcagcacctctacccacagagaaaacctcttgtgttggaagggattgatttggggccatgtacaagcaaatggacagtggattacctaagccaagttggagggaagaaagaagtaaagattcatgttgctgcagttgcacagatggacttcattaaactttaccttttgaccagttggtccagagggcagctgaagagaaacataaagaattctttgtttcagaggatgagaaatactacttacggtcacttggagaagaccctagaaaggtaagaattctaaatgtaaaacaattccctaaaatctaaatggatgtatgtatgttaactggcaacactgtaattttatacttactgcctgacatattccctgttctatc

SEQ ID NO: 286775 - DNA, 2153 bp, Homo sapiens
gagggcaggcgtgagcaaccatggccgggcagcacctcccggtaccccggctggagggcgtttctcgggagcagttcatgcagcacctctacccacagagaaaacctcttgtgttggaagggattgatttggggccatgtacaagcaaatggacagtggattacctaagccaagttggagggaagaaagaagtaaagattcatgttgctgcagttgcacagatggacttcattagtaagaactttgtatatagaactttaccttttgaccagttggtccagagggcagctgaagagaaacataaagaattctttgtttcagaggatgagaaatactacttacggtcacttggagaagaccctagaaaggatgttgcagatatcagaaagcagtttcctttgttgaaaggagatattaagtttccagaattcttcaaagaggaacagttcttttccagtgtttttcgaattagttcaccaggattacaactatggactcattatgatgtaatggataatttgttaatacaagtgacaggaaaaaagcgtgttgtactcttcagtcctcgagatgcccagtatttatatttaaaaggtactaaatcagaagtactgaatatagataacccagacttggctaaatatccacttttttccaaggctagaagatatgaatgttcccttgaagctggtgatgtattattcattcctgctttatggttccataatgtaatttctgaagagtttggagtgggagtgaatatcttttggaagcaccttccatctgaatgctatgataaaacagatacctatggaaacaaagatcctacagcagcatcaagagctgcacaaattctggacagagccttgaaaacactggccgagttaccagaggaatatagggacttctatgcacgacgaatggtcctacacattcaagacaaagcctacagcaagaactctgagtaaataatgaagtgaatgcaatgcacattaacactttagtaaggtataacgatataaattaaagattttgttaaaataggaaagatacatcagatttacagattatgtaagtacgaaggggtgtttgtgtggattctacttgatacagattgttataattaaagaatgctgtgctgggaccactctttaacattcagatgctgaccactaaaagtccaacttaaaatgacttaaaaacagtaagaaaatatattgattcacaatacatgaaatctattgacagaatgtgctgcagtgtttctgatccaatgattcagtaatgtcatcaagaaccttgggaacccgcctccacaccccacccccttttcaaccacaacattggcatcatcctaaggctggctaccctcgtggtcatgggatgattgccagtagcagttggagccttgtgcatcttcatttacatgcagcggaagagtcaggctggattctaggggccctgtcctagtatgagaaagctttcccagaattcactttccatatccttaggtctcattgctctaaagtaacttagacctgtccatccctgagccagtcactggcaaagggtctagaataacctttagggcagtcaggtccactggagctgagagtagaagtggaggccacatgagggatatatggggacagaaaggatagtttttttaaaatcatggttctgataggaaaaacatgagcaacgcacaatatctattacatttgcctagaagcagaattttttgaggaactttaaaaaatgtacagatacctaggtcccaactttgtagactgattcaagagtgtttgggatttggtataggaacttaatagacctcacagggtgttctgatgcataatcagagctgagatcaactggagttgatgatagtgacttggattattagttttgtgattagtgcaaaacaaatgtttaatctgatcttgacttttcttgccacccagtatgtcagggtggtttttggtttttgaatgttacaaaataaatattttaatttatacctatgtctaaaccttagcctagttaaagatttcccaactattttttccacctatcccttttttaaaagaaaaattacttaaagaatgaataaatgagatcctaaaagtgttgtcatcgaagacagtgagcca

SEQ ID NO: 286776 - DNA, 896 bp, Homo sapiens
cccaggacgatcatcttggttttctggtgctgctggggcttctcctccgtgctgtagctgcgctgagggcaggcagggaaagaagcgaaggctgcggggagtcccgggctgctgagcactggccaccgggagccctgggcaggtagcgccgaggctgccaaggccctagcgcttcgtggaaataacgccgctcccaagccgaggcgacagcggcagaagtagcaaagtgtggccgacggcagcctcacctcggccacagcaggagtccggagtcggacggccccgcagggcagcgaccgagagtgcaggaactggggtagcaaacgagcggccagcgccatttttatgacccttcaccccggtgcctgccggtgctgtatggaaaggaagtcggtgggaaaccgcctcagcggtgtcggagaaagagactggagagcaaagtggacctgttgctgcagcctctggtgagtcggccccgtccccgctctccagcacgcagcccaggccgaggcccttcggcaacccgccccgcgctcggacccagccactctggagtctgccggcctcgcggaccttttctctgtcgctcgtgtttccgggcggatggcgctgaggaacgctttagagccgaagttccgaagacctggaagagggcaggcgtgagcaaccatggccgggcagcacctcccggtaccccggctggagggcgtttctcgggagcagttcatgcagcacctctacccacaggtgaggccctcgcgcggggcagaacctcgagaaaccagcgagagacacgtctttacctttcggacagctgggaactggtttttagagacccagggtgtgggaaagaggcgcaggacggcagcagatcactggttggcccttagaccaag

SEQ ID NO: 286777 - DNA, 953 bp, Homo sapiens
gcggccgcccgtagcctaattgcgcagagggctcgccttgcacctcctcttcccccgccgccctccctctcgcccagaaaggaggacggacccagctgcaggctccgagctggtttattctgcggccgaggattacatttatgcacgaacgggcttactggttccagattccccacttgggcacaggcataggaggcttgttttccaaattgctggttttaattgcacctgcctttcagattacctctgggaatctgtgggaggagccgagagggtggaaaatgtttcttagctttgcaaaaggaagaaaactttgtcacccagcgggagacctcagccacgagtaacccggggagacaccagaaccgggacgggctttgactgatttgcctacgagggttccgtaggaaaggacgcttgaattcggcgcttcggcggcggcggcggccgcgcgagttccctgctcaccctccctctccgcggaagtccccacgaggtggcttcagggtgtaacagagcgcgcggctccagtccgaaggcagcggccgggggagggaaggaggggaccgaacccccgaggagtttcgcagaatcaacttctggttagagttatgggaagcgcggttatggacaccaagaagaaaaaagatgtttccagccccggcgggagcggcggcaagaaaaatgccagccagaagaggcgttcgctgcgcgtgcacattccgcactctcaacgccctgcgagcgccgacggttggatggagggagggtcgcccggattcacccccagctgccatccccgtgggccagcactgcctctttctctccctcttcttccaccttatcttcctgtccactttccccctttccctcccccataattgaccccaatgtggaattgagggtcatttcaaaatatttctgatactatttgaagaaaataaactttatct

SEQ ID NO: 286778 - DNA, 931 bp, Homo sapiens
gcggccgcccgtagcctaattgcgcagagggctcgccttgcacctcctcttcccccgccgccctccctctcgcccagaaaggaggacggacccagctgcaggctccgagctggtttattctgcggccgaggattacatttatgcacgaacgggcttactggttccagattccccacttgggcacaggcataggaggcttgttttccaaattgctggttttaattgcacctgcctttcagattacctctgggaatctgtgggaggagccgagagggtggaaaatgtttcttagctttgcaaaaggaagaaaactttgtcacccagcgggagacctcagccacgagtaacccggggagacaccagaaccgggacgggctttgactgatttgcctacgagggttccgtaggaaaggacgcttgaattcggcgcttcggcggcggcggcggccgcgcgagttccctgctcaccctccctctccgcggaagtccccacgaggtggcttcagggtgtaacagagcgcgcggctccagtccgaaggcagcggccgggggagggaaggaggggaccgaacccccgaggagtttcgcagaatcaacttctggttagagttatgggaagcgcggttatggacaccaagaagaaaaaagatgtttccagccccggcgggagcggcggcaagaaaaatgccagccagaagaggcgttcgctgcgcgtgcacattccggacctgagctccttcgccatgccgctcctggacggagacctggagggttccggaaagcattcctctcgaaaggtggacagccccttcggcccgggcagcccctccaaagggttcttcttcagaggcccccagccccggccctccagccccatgtctgcacctgtgaggcccaagaccagccccggctctcccaaaaccgtgttccc

SEQ ID NO: 286779 - DNA, 799 bp, Homo sapiens
  misc_feature (723)..(723): n is a, c, g, or t
gcggccgcccgtagcctaattgcgcagagggctcgccttgcacctcctcttcccccgccgccctccctctcgcccagaaaggaggacggacccagctgcaggctccgagctggtttattctgcggccgaggattacatttatgcacgaacgggcttactggttccagattccccacttgggcacaggcataggaggcttgttttccaaattgctggttttaattgcacctgcctttcagattacctctgggaatctgtgggaggagccgagagggtggaaaatgtttcttagctttgcaaaaggaagaaaactttgtcacccagcgggagacctcagccacgagtaacccggggagacaccagaaccgggacgggctttgactgatttgcctacgagggttccgtaggaaaggacgcttgaattcggcgcttcggcggcggcggcggccgcgcgagttccctgctcaccctccctctccgcggaagtccccacgaggtggcttcagggtgtaacagagcgcgcggctccagtccgaaggcagcggccgggggagggaaggaggggaccgaacccccgaggagtttcgcagaatcaacttctggttagagttatgggaagcgcggttatggacaccaagaagaaaaaagatgtttccagccggggcgcacgcgtgtgaaacaacaccgagcttgaatggtggaagtctttgaaccttttaccanatcagtttgttttctttagatttgcaaaaagttgtaatttgaatataaataattactttaaaattttatgacactt

SEQ ID NO: 286780 - DNA, 645 bp, Homo sapiens
ccagctttgtcactccaagagatggccctgggactgagaagtggatggcagctgtgacagcaggagaggactgcctgaggctccccgggcagaggctctggtgccaggttagcagcaggaccgacggcagacccagcagccagagagtgaaaggtgggtaaattgaggcccaaggagaggaatggacttgctgtggacattccaagagcccagaggcaactcaggccaaggcgagtctgtctgttctgaatctcttaggtcagttctgaatccaaacagtaaccggacaagcccattctcaggagctcctcagctccattccgtgggggcttggttacctgtaacagggcctcaacaggagggtcatagacttgcccattgcttccaagcaacagggagttggcattgccctgcctcctgtgggactcgcaaacataaaatctcaggctctctcattctcacatctacattacatagcactgactctgtgccggacactgttcttagtgctttgcaaatagtaatttatatagtcctcattgactgggaagctatattaattttgacattattcctgagaaaagcatatcccttcctgggttctggccctgttaacaggaatgttttaaaactttgtctctctga

SEQ ID NO: 286781 - DNA, 1028 bp, Homo sapiens
tcaacatttgtctggcatttgtttttaacttttgtcatagtcatggagggtttacagaacatttataagacgaaagcatgtgtttgaaacactccaatcctttggcttatttttgttctataatttgggaagagtcctctctttggctggtgggataccagagtcccataaggccatagttagataactactggcctaacataaggagggtttatttatttatttatttatttatttttagatggagtttcactcttgttgtccaggctggagtgcaatggcatgttctcggctcaccgcaacctccgcctcccagtttcaagcgattcttctgcctcagcctcccaagtagctgggattacaggcatgcgccaccatgcctgactaattttgtatttttagtagaaatggggtttctccatgttggtcaggctggtctcgaactcccgacctcaggtgatccgcccaccttggcctcccaaggaggtattaatagcaaggtggaagccttcatagagtctggaaagagagaaccagggaggaagcccaggtccccagtgctccagcgttgattgagggagaaagcttgaaaatgggaggaacacattttcccatctcttgagggaaatctgagtcactctcaggcctttccaggttcacagtgctctctctgcaaggctgttcatttgccagatttcccagaggtcacttagaaaccagcatcttgtgagtatagttagaatgagtcaagtcctagggctctggcgatcagctagaaggaattgatgaggtctaagagcctataaagctgactcgggccttgttgaccccattaggacacttgtttaacaagacatctgcccatgtccctggcccatctcattggctgcagcacatcacagtggaccttctgcctcctcccagatgcccagggacagtgatctggaaggaaggggcttgaggctgttttcctagaactcgagtaagtactgatgaaaatgatggacaggggatattaagccctcgtg

SEQ ID NO: 286782 - DNA, 821 bp, Homo sapiens
gagaggccgcgtcctcagctggtcctagacatgcgtggcgtcggggctgtggcacggtcgggtccggggacacttgtttaacaagacatctgcccatgtccctggcccatctcattggctgcagcacatcacagtggaccttctgcctcctcccagatgcccagggacagtgatctggaaggaaggggcttgaggctgttttcctagaactcgacttgaatgcaccaaggaaaggccatttgtggggacatagcaagaaggcagctgtctgcaagccaggaggagaaccctcaccagaaacctcacagaaatcggccaacaccctcatctcgggcttccagcttcagaacaacgagaaaacaaatttctgttgtgtcctggttcccatttgtaattggcaccctaatgaaaccgttttctgtagccctggaaatggctgaaaatgaggggagggaaataaagtgctataattcagagcatggagcacaccttcctggttcacctgagctggattcggagaggtaaaatggccattacctcgtctaagctgccacttacagacacagtacaggatgaggcccaggcccacagagacaacaatgatggccacagctaagatgatccagaaattattcctccaccagctcattgcagtggaatcctgagaagaatggagaaagaagaatgagagggcaaagcagatggctacaccgagaactcacgccagccaacacactttgatctcgaggctctggaagggaaggtgccctattgaactactgaaagccaagatgcaatgacaaagcagtcgtccaggtccc

SEQ ID NO: 286783 - DNA, 728 bp, Homo sapiens
gagaggccgcgtcctcagctggtcctagacatgcgtggcgtcggggctgtggcacggtcgggtccgggcttgaatgcaccaaggaaaggccatttgtggggacatagcaagaaggcagctgtctgcaagccaggaggagaaccctcaccagaaacctcacagaaatcggccaacaccctcatctcgggcttccagcttcagaacaacgagaaaacaaatttctgttgtgtcctggttcccatttgtaattggcaccctaatgaaaccgttttctgtagccctggaaatggctgaaaatgaggggagggaaataaagtgctataattcagagcatggagcacaccttcctggttcacctgagctggattcggagaggtaaaatggccattacctcgtctaagctgccacttacagacatctgcttaggaatcaggcactggatcacagccataccctactcattaacacctgggggacctcaggcatgtcactcgaccttctgtgagcctcatctataatatgggaatgatatctcctacttcactgaggtttgtgaggactggagatcgaacatgtacctactgggccctctagaaatggtagacatcatcactgctctttcagacatgcagcaggagggggaaggtgccatttaaagcaataattgactgcagggttgttttttttcttgagacggagtctcgctctgtaactcaggctggagtgca

SEQ ID NO: 286784 - DNA, 1544 bp, Homo sapiens
tcaacatttgtctggcatttgtttttaacttttgtcatagtcatggagggtttacagaacatttataagacgaaagcatgtgtttgaaacactccaatcctttggcttatttttgttctataatttgggaagagtcctctctttggctggtgggataccagagtcccataaggccatagttagataactactggcctaacataaggagggtttatttatttatttatttatttatttttagatggagtttcactcttgttgtccaggctggagtgcaatggcatgttctcggctcaccgcaacctccgcctcccagtttcaagcgattcttctgcctcagcctcccaagtagctgggattacaggcatgcgccaccatgcctgactaattttgtatttttagtagaaatggggtttctccatgttggtcaggctggtctcgaactcccgacctcaggtgatccgcccaccttggcctcccaaggaggtattaatagcaaggtggaagccttcatagagtctggaaagagagaaccagggaggaagcccaggtccccagtgctccagcgttgattgagggagaaagcttgaaaatgggaggaacacattttcccatctcttgagggaaatctgagtcactctcaggcctttccaggttcacagtgctctctctgcaaggctgttcatttgccagatttcccagaggtcacttagaaaccagcatcttgtgagtatagttagaatgagtcaagtcctagggctctggcgatcagctagaaggaattgatgaggtctaagagcctataaagctgactcgggccttgttgaccccattaggacacttgtttaacaagacatctgcccatgtccctggcccatctcattggctgcagcacatcacagtggaccttctgcctcctcccagatgcccagggacagtgatctggaaggaaggggcttgaggctgttttcctagaactcgacttgaatgcaccaaggaaaggccatttgtggggacatagcaagaaggcagctgtctgcaagccaggaggagaaccctcaccagaaacctcacagaaatcggccaacaccctcatctcgggcttccagcttcagaacaacgagaaaacaaatttctgttgtgtcctggttcccatttgtaattggcaccctaatgaaaccgttttctgtagccctggaaatggctgaaaatgaggggagggaaataaagtgctataattcagagcatggagcacaccttcctggttcacctgagctggattcggagaggtaaaatggccattacctcgtctaagctgccacttacagacacagtacaggatgaggcccaggcccacagagacaacaatgatggccacagctaagatgatccagaaattattcctccaccagctcattgcagtggaatcctgagaagaatgcaggagaatcacttgaaactggaaggcggaggttgcagtgagccgagatcatgccactgcattccagcctgggcgaaagagctaaactccgtctctcaaaaaa

SEQ ID NO: 286785 - DNA, 776 bp, Homo sapiens
gagaggccgcgtcctcagctggtcctagacatgcgtggcgtcggggctgtggcacggtcgggtccggggacacttgtttaacaagacatctgcccatgtccctggcccatctcattggctgcagcacatcacagtggaccttctgcctcctcccagatgcccagggacagtgatctggaaggaaggggcttgaggctgttttcctagaactcgacttgaatgcaccaaggaaaggccatttgtggggacatagcaagaaggcagctgtctgcaagccaggaggagaaccctcaccagaaacctcacagaaatcggccaacaccctcatctcgggcttccagcttcagaacaacgagaaaacaaatttctgttgtgtcctggttcccatttgtaattggcaccctaatgaaaccgttttctgtagccctggaaatggctgaaaatgaggggagggaaataaagtgctataattcagagcatggagcacaccttcctggttcacctgagctggattcggagaggtaaaatggccattacctcgtctaagctgccacttacagacacagtacaggatgaggcccaggcccacagagacaacaatgatggccacagctaagatgatccagaaattattcctccaccagctcattgcagtggaatcctgagaagaatgcaggagaatcacttgaaactggaaggcggaggttgcagtgagccgagatcatgccactgcattccagcctgggcgaaagagctaaactccgtctctcaaaaaa

SEQ ID NO: 286786 - DNA, 1753 bp, Homo sapiens
tcaacatttgtctggcatttgtttttaacttttgtcatagtcatggagggtttacagaacatttataagacgaaagcatgtgtttgaaacactccaatcctttggcttatttttgttctataatttgggaagagtcctctctttggctggtgggataccagagtcccataaggccatagttagataactactggcctaacataaggagggtttatttatttatttatttatttatttttagatggagtttcactcttgttgtccaggctggagtgcaatggcatgttctcggctcaccgcaacctccgcctcccagtttcaagcgattcttctgcctcagcctcccaagtagctgggattacaggcatgcgccaccatgcctgactaattttgtatttttagtagaaatggggtttctccatgttggtcaggctggtctcgaactcccgacctcaggtgatccgcccaccttggcctcccaaggaggtattaatagcaaggtggaagccttcatagagtctggaaagagagaaccagggaggaagcccaggtccccagtgctccagcgttgattgagggagaaagcttgaaaatgggaggaacacattttcccatctcttgagggaaatctgagtcactctcaggcctttccaggttcacagtgctctctctgcaaggctgttcatttgccagatttcccagaggtcacttagaaaccagcatcttgtgagtatagttagaatgagtcaagtcctagggctctggcgatcagctagaaggaattgatgaggtctaagagcctataaagctgactcgggccttgttgaccccattaggacacttgtttaacaagacatctgcccatgtccctggcccatctcattggctgcagcacatcacagtggaccttctgcctcctcccagatgcccagggacagtgatctggaaggaaggggcttgaggctgttttcctagaactcgacttgaatgcaccaaggaaaggccatttgtggggacatagcaagaaggcagctgtctgcaagccaggaggagaaccctcaccagaaacctcacagaaatcggccaacaccctcatctcgggcttccagcttcagaacaacgagaaaacaaatttctgttgtgtcctggttcccatttgtaattggcaccctaatgaaaccgttttctgtagccctggaaatggctgaaaatgaggggagggaaataaagtgctataattcagagcatggagcacaccttcctggttcacctgagctggattcggagaggtaaaatggccattacctcgtctaagctgccacttacagacacagtacaggatgaggcccaggcccacagagacaacaatgatggccacagctaagatgatccagaaattattcctccaccagctcattgcagtggaatcctgagaagaatggagaaagaagaatgagcttcttgcatgactgcctgaaatccgcctcctgtcagatcagcaggggcattggattatgataggagtgagaacaccattgtggactgcgcatgccagggatctaggttccgcgctccttatgagaatctgatgcctgatgatctgtcactgtctcccatcacccccagatgggactgtctagttgaagaaaaacaagttcagggctcccactgatgctacgttacggtgagttgtataattatttcattataattacaatgtaatgataatagaaataaagggcacaataaatat

SEQ ID NO: 286787 - DNA, 576 bp, Homo sapiens
  misc_feature (250)..(250): n is a, c, g, or t
  misc_feature (521)..(521): n is a, c, g, or t
  misc_feature (576)..(576): n is a, c, g, or t
tgaacaagaagttgtttcttcacctgtacaagtgttgatggtggatgggctaggctagttgtggtgaaaaagaccacattcaggacctgttttggagatatgccactaagacttgctaatgaggtgtatatgggaatgagagaagggaagatcatcagagacttctagacttacggcttgagcaatgagtgaatagtgttgcactcaagagtgcgaatgagcagggagggcaacaggttccagaggaaangaagaactttattttggacacttggggttgagactctgttagacccagaaggaagattgacagctcctacaagtgtactcaggtgatgaccgactgagatgtctctggaggtgcgatccactgtgagaagacctgcagaagggcaggcttcctgaagagtcatcatgactccaacactgacatattctgaccactagagactgaattggagttactgatgacaactccatgctgtttgggtcagccagcttgacaaaacatgctgacacancaatcacgtgtcacaacaccagactcacagacaacattttcatggacactgagcn

SEQ ID NO: 286788 - DNA, 1745 bp, Homo sapiens
  misc_feature (921)..(921): n is a, c, g, or t
  misc_feature (993)..(993): n is a, c, g, or t
ctcaccccagacactcactgcaccggagtgagcgcgaccatcatgtccatgctcgtggtctttctcttgctgtggggtgtcacctggggcccagtgacagaagcagccatattttatgagacgcagcccagcctgtgggcagagtccgaatcactgctgaaacccttggccaatgtgacgctgacgtgccaggcccgcctggagactccagacttccagctgttcaagaatggggtggcccaggagcctgtgcaccttgactcacctgccatcaagcaccagttcctgctgacgggtgacacccagggccgctaccgctgccgctcgggcttgtccacaggatggacccagctgagcaagctcctggagctgacagggccaaagtccttgcctgctccctggctctcgatggcgccagtgtcctggatcacccccggcctgaaaacaacagcagtgtgccgaggtgtgctgcggggtgtgacttttctgctgaggcgggagggcgaccatgagtttctggaggtgcctgaggcccaggaggatgtggaggccacctttccagtccatcagcctggcaactacagctgcagctaccggaccgatggggaaggcgccctctctgagcccagcgctactgtgaccattgaggagctcgctgcaccaccaccgcctgtgctgatgcaccatggagagtcctcccaggtcctgcaccctggcaacaaggtgaccctcacctgcgtggctcccctgagtggagtggacttccagctacggcgcggggagaaagagctgctggtacccaggagcagcaccagcccagatcgcatcttctttcacctgaacgcggtggccctgggggatggaggtcactacacctgccgctaccggctgcatgacaaccaaaacggctggtccgggganagcgcgccggtcgagctgattctgagcgatgagacgctgcccgcgccggagttctccccggagccggagtcnggcagggccttgcggctgcggtgcctggcgcccctggagggcgcgcgcttcgccctggtgcgcgaggacaggggcgggcgccgcgtgcaccgtttccagagccccgctgggaccgaggcgctcttcgagctgcacaacatttccgtggctgactccgccaactacagctgcgtctacgtggacctgaagccgcctttcgggggctccgcgcccagcgagcgcttggagctgcacgtggacggaccccctcccaggcctcagctccgggcgacgtggagtggggcggtcctggcgggccgagatgccgtcctgcgctgcgagggacccatccccgacgtcaccttcgagctgctgcgcgagggcgagacgaaggccgtgaagacggtccgcacccccggggccgcggcgaacctcgagctgatcttcgtggggccccagcacgccggcaactacaggtgccgctaccgctcctgggtgccccacaccttcgaatcggagctcagcgaccctgtggagctcctggtggcagaaagctgatgcagccgcgggcccagggtgctgttggtgtcctcagaagtgccggggattctggactggctccctcccctcctgttgcagcacaaggccggggtctctggggggctggagaagcctccctcattcctcccaggaattaataaatgtgaagagagctctgtttaaaatgtctttggactcccagggctgagtgggctgggatctcgtgtcctcaa

SEQ ID NO: 286789 - DNA, 1399 bp, Homo sapiens
  misc_feature (921)..(921): n is a, c, g, or t
  misc_feature (993)..(993): n is a, c, g, or t
  misc_feature (1296)..(1296): n is a, c, g, or t
  misc_feature (1347)..(1347): n is a, c, g, or t
  misc_feature (1375)..(1375): n is a, c, g, or t
  misc_feature (1394)..(1394): n is a, c, g, or t
ctcaccccagacactcactgcaccggagtgagcgcgaccatcatgtccatgctcgtggtctttctcttgctgtggggtgtcacctggggcccagtgacagaagcagccatattttatgagacgcagcccagcctgtgggcagagtccgaatcactgctgaaacccttggccaatgtgacgctgacgtgccaggcccgcctggagactccagacttccagctgttcaagaatggggtggcccaggagcctgtgcaccttgactcacctgccatcaagcaccagttcctgctgacgggtgacacccagggccgctaccgctgccgctcgggcttgtccacaggatggacccagctgagcaagctcctggagctgacagggccaaagtccttgcctgctccctggctctcgatggcgccagtgtcctggatcacccccggcctgaaaacaacagcagtgtgccgaggtgtgctgcggggtgtgacttttctgctgaggcgggagggcgaccatgagtttctggaggtgcctgaggcccaggaggatgtggaggccacctttccagtccatcagcctggcaactacagctgcagctaccggaccgatggggaaggcgccctctctgagcccagcgctactgtgaccattgaggagctcgctgcaccaccaccgcctgtgctgatgcaccatggagagtcctcccaggtcctgcaccctggcaacaaggtgaccctcacctgcgtggctcccctgagtggagtggacttccagctacggcgcggggagaaagagctgctggtacccaggagcagcaccagcccagatcgcatcttctttcacctgaacgcggtggccctgggggatggaggtcactacacctgccgctaccggctgcatgacaaccaaaacggctggtccgggganagcgcgccggtcgagctgattctgagcgatgagacgctgcccgcgccggagttctccccggagccggagtcnggcagggccttgcggctgcggtgcctggcgcccctggagggcgcgcgcttcgccctggtgcgcgaggacaggggcgggcgccgcgtgcaccgtttccagagccccgctgggaccgaggcgctcttcgagctgcacaacatttccgtggctgactccgccaactacagctgcgtctacgtggacctgaagccgcctttcgggggctccgcgcccagcgagcgcttggagctgcacgtggacggaccccctcccagcctcagccccggcacttctgaggacaccaacagcaccctggcccgcggntgcatcagctttctgccaccaggagctccacagggtgctgagctccgattngaaggtgtggggcacccaggagcggtanggcacctgtagttgcctgncgtgc

SEQ ID NO: 286790 - DNA, 3004 bp, Homo sapiens
gaaaaggcaaatctacccttcacagaactgtgaagggtagatttgctgaaatggagaaacaaagacaagaggaacaaaggaagagaacggaggaggaacgaaaacgcagaattgagcaggatatgttagaaaagaggaaaatacagcgtgaattagcaaaaagggctgaacagattgaggacataaacaatacgggaactgaatcagcatcagaggaaggagatgattcactacttataactgtggtacctgtcaaatcatataaaacatctggaaaaatgaaaaagaattttgaggatctagaaaaagaacgtgaagagaaagaaaggatcaagtacgaggaagataaaagaataagatatgaagaacaacgaccatctctcaaggaagcaaagtgtctttcattagttatggatgatgaaatagaaagtgaagcaaaaaaagaatcactttctcccggaaaattgaaactaacttttgaagaactggagcgacaaagacaagaaaaccgaaagaagcaagctgaagaggaagcaagaaaacgtttagaagaagagaagcgtgcttttgaagaagcaaggcggcaaatggtaaatgaagatgaggaaaaccaagacacagcaaaaatttttaaagggtaccgccctggtaaactcaaactcagttttgaagaaatggaaaggcaaagaagagaagatgaaaaaaggaaagcagaagaagaagccagaaggagaatagaggaagaaaagaaggcgtttgctgaagcaaggagaaatatggtagtagatgatgactccccagagatgtataagacaatctctcaagaatttcttacaccgggaaaactggaaattaattttgaagaattattaaaacaaaaaatggaagaagaaaaacgacgaacagaggaggaacggaagcataagctagaaatggagaaacaagaatttgaacaactgagacaggaaatgggagaggaagaggaagaaaatgaaacctttggattgagcagagaatatgaagaactgatcaaattaaaaaggagtggctctattcaagctaaaaacctaaaaagcaagtttgaaaaaattggacagttgtctgaaaaagaaatacagaaaaaaatagaagaagagcgagcaagaaggagagcaattgaccttgaaattaaagagcgagaagctgaaaattttcatgaggaagatgatgttgatgttaggcctgcaagaaaaagcgaggctccatttactcacaaagtgaatatgaaagctagatttgaacaaatggctaaggcaagagaagaagaagaacaaagaagaattgaagaacaaaagttactacgcatgcagtttgaacaaagggaaattgatgcagcactacaaaagaaaagagaagaggaggaggaggaagaaggtagcatcatgaatggctccactgctgaagatgaagagcaaaccagatcaggagctccatggttcaagaagcctcttaaaaacacatcagttgtagacagtgagccagtcagatttacggttaaagtaacaggagaacccaaaccagaaattacatggtggtttgaaggagaaatactgcaggatggagaagactatcaatatattgaaaggggagaaacttactgcctttacttaccagaaactttcccagaagatggaggagagtatatgtgtaaagcagtcaacaataaaggatctgcagctagtacctgtattcttaccattgaaactgatgactactagctcccctcccctctccctggaactttctctttcactccaactttcttactacatccatcttttctgtggcggggccaaaaaaggaaaccaggagtgccactatgctgacttcttattccttttcataacagtcttcaaagcacagctcatctaaagaatgcctacttcttttccaaataagcatcagatttatcgcctattatgcagtaacagtcaataaaatgtacttatgggggggaattactcaattattctatcagaacctattataaagactgtatttcccatagacgtttacagcaactatgtttaaaaaacaaaaacaaaaaaaaaacacacaaacctaagtagaatacattattttgcatgaaggaatgtcatttctgagctttttacacctaaaattaggctgaaatagctgagataattaatttggaacctatcaatttgagtggactttttctttagtagtacaccattttggttgttgtagtttcaaagtctttctgaagcagatatattgggattggagcggggtggggaaaactgtcactcctttcagaggaaaaggggaggagcatggagaaaaacaaaaattaaaggacttaaagaatggctatacagtgttgagtgttgaggatattaaacatgttatttttcaaacgtatgtaatatatattaaatttataaagcaaatttatgttgtgatcttgcctgaacaaattatattttaatgaaaaaactttctattaatagttcacgcaagagaaaacactttcaacatagtcgaaggcttcaagatctaagtgtatcagacttagggaaaaagtggcacaaccttcgatttaaaattctagtctttaaaatgagtttgtaaataattagctattacgttctattaagttgttttatattttaattttctggaagacaattttattttacaacgtgaacccaaataaagtaacttctgtatttaaaagtctttctgtattttaagacttgtgcaaccagatgttacccttttatcattaaaactttttaaaatcattttttctcacagtaaacataaaaaaaaacccagtcaagtagaaaattttaccatgtaatatatgtataaaaaacacaaagcactcctttataatagtcatcaatgtacatttattgaggaaaccataatgaatacaaaattacagcaatcatgtgaccttttacatacaatgtcattaaagcaaactctaaaccac

SEQ ID NO: 286791 - DNA, 2640 bp, Homo sapiens
gtactttagaaaccatgaattaactacccacattaaccccactccaccaaaactgctctagaccttatcattaccaaattattattttcctagacacactatttgacagttgagactctgctcttaaatcactcccttattagcatttcgcccttccaattcacccctcagatgactcaaacatattttacttagtgatttccccatgtttcagccattgcctctttcaacagttgtctctacctgtttttctacttgtaaacacccttcccctgccatttcaccatcaatacattatttggagggaattcattagggacatagttctaagaagggtaaagaaggaaaatcattaagtgagaaaacatttattatgcagtagggaatggtatggacttacaggaatcaagggagtacttttaacaattatttagaatgtatagcattctgacctttttcagttaagtgctatcaaaaccaagcagagttggtaggacaaacaggctaggatcccagtgatattgtgatctttacatttggagaaaaagtctataactaagagaatgcttcataaatgtatctatcacttttcctgaactggagagttagaaaaaatctgagtgtctgcagtgtagcaaaaatatgcattataaacatgttaatcattttgtgcttctaaacacctttagaactagtaacgcttctttgtttttagaaggcaagcaattgttaatcttggcccactttcttgcaggaagatgatgttgatgttaggcctgcaagaaaaagcgaggctccatttactcacaaagtgaatatgaaagctagatttgaacaaatggctaaggcaagagaagaagaagaacaaagaagaattgaagaacaaaagttactacgcatgcagtttgaacaaagggaaattgatgcagcactacaaaagaaaagagaagaggaggaggaggaagaaggtagcatcatgaatggctccactgctgaagatgaagagcaaaccagatcaggagctccatggttcaagaagcctcttaaaaacacatcagttgtagacagtgagccagtcagatttacggttaaagtaacaggagaacccaaaccagaaattacatggtggtttgaaggagaaatactgcaggatggagaagactatcaatatattgaaaggggagaaacttactgcctttacttaccagaaactttcccagaagatggaggagagtatatgtgtaaagcagtcaacaataaaggatctgcagctagtacctgtattcttaccattgaaagtaagaattaatcactctttttatcttttattctattaatttttttttccttaaaatcacttttcttcttctcttttttagctgatgactactagctcccctcccctctccctggaactttctctttcactccaactttcttactacatccatcttttctgtggcggggccaaaaaaggaaaccaggagtgccactatgctgacttcttattccttttcataacagtcttcaaagcacagctcatctaaagaatgcctacttcttttccaaataagcatcagatttatcgcctattatgcagtaacagtcaataaaatgtacttatgggggggaattactcaattattctatcagaacctattataaagactgtatttcccatagacgtttacagcaactatgtttaaaaaacaaaaacaaaaaaaaaacacacaaacctaagtagaatacattattttgcatgaaggaatgtcatttctgagctttttacacctaaaattaggctgaaatagctgagataattaatttggaacctatcaatttgagtggactttttctttagtagtacaccattttggttgttgtagtttcaaagtctttctgaagcagatatattgggattggagcggggtggggaaaactgtcactcctttcagaggaaaaggggaggagcatggagaaaaacaaaaattaaaggacttaaagaatggctatacagtgttgagtgttgaggatattaaacatgttatttttcaaacgtatgtaatatatattaaatttataaagcaaatttatgttgtgatcttgcctgaacaaattatattttaatgaaaaaactttctattaatagttcacgcaagagaaaacactttcaacatagtcgaaggcttcaagatctaagtgtatcagacttagggaaaaagtggcacaaccttcgatttaaaattctagtctttaaaatgagtttgtaaataattagctattacgttctattaagttgttttatattttaattttctggaagacaattttattttacaacgtgaacccaaataaagtaacttctgtatttaaaagtctttctgtattttaagacttgtgcaaccagatgttacccttttatcattaaaactttttaaaatcattttttctcacagtaaacataaaaaaaaacccagtcaagtagaaaattttaccatgtaatatatgtataaaaaacacaaagcactcctttataatagtcatcaatgtacatttattgaggaaaccataatgaatacaaaattacagcaatcatgtgaccttttacatacaatgtcattaaagcaaactctaaaccac

SEQ ID NO: 286792 - DNA, 269 bp, Homo sapiens
  misc_feature (2)..(2): n is a, c, g, or t
cntcgaggatccccgctgtgcggaccatctctcaaggaagcaaagtgtctttcattagttatggatgatgaaatagaaagtgaagcaaaaaaagaatcactttctcccggaaaattgaaactaacttttgaagaactggagcgacaaagacaagaaaaccgaaagaagcaagctgaagaggaagcaagaaaacgtttagaagaagagaagcgtgcttttgaagaagcaaggcggcaaatggaagttgaggatggtccgcacaggggtac

SEQ ID NO: 286793 - DNA, 867 bp, Homo sapiens
cccagcggctggagcagaagtgttagcggccagagctcccagacccctacccacagccaggcgggacgcgcacagtccctccacgcggaaagaagtaccttcgccggtcaccggctcctgcagggtgcaaatatatacagagcttcataatcagcccaagaccacatagagcaaacatgaatgatatttcccaaaaggctgagattaaagaaatgcttgcttctgatgatgaggaagatgtatcttctaaagtagaaaaggcttatgttccaaaattaacaggaactgtgaagggtagatttgctgaaatggagaaacaaagacaagaggaacaaaggaagagaacggaggaggaacgaaaacgcagaattgagcaggatatgttagaaaagaggaaaatacagcgtgaattagcaaaaagggctgaacagattgaggacataaacaatacgggaactgaatcagcatcagaggaaggagatgattcactacttataactgtggtacctgtcaaatcatataaaacatctggaaaaaaaccaaacaaaaaaacaaaaaaaaaacacacaccaaacaacacccgaaaaatacactaaacccaggtgacgtagtgcgaaaaaagatatattaaatcaacagacagccaaggagcgagggcagccccaatccaagcagacgagaacaaaacaaaaccgtgagagtacacaaagataatatatcccatcgaacaagcaacccccggcgaatgcgagaaactaaaaacaacacccgcagtggtagtacatccacaacaaccaatacgagaagaaagaccagctgtaaacgaccgaaaacggcagaagagataccccccactgcgacagagca

SEQ ID NO: 286794 - DNA, 466 bp, Homo sapiens
cccagcggctggagcagaagtgttagcggccagagctcccagacccctacccacagccaggcgggacgcgcacagtccctccacgcggaaagaagtaccttcgccggtcaccggctcctgcagggggctatctgatgggttagagtgcctttgagaagaaatcagtggatactggatttgctcctgtcaatgaagttttaaaggctgtaccaatcctctaatatgaaatgtggaaaagaatgaagagcagcagtaaaagaaatatctagtgaaaaaacaggaagcgtattgaagcttggactagaatttcttcttggtattaaagagacaagtttatcacagaattttttttcctgctggcctattgctataccaatgatgttgagtggcattttctttttagtttttcattaaaatatattccatatctacaactataatatcaaataaagtgattattttttac

SEQ ID NO: 286795 - DNA, 157 bp, Homo sapiens
ccattccttatttctgcctctttactgcagtctctagacaagaaaaccgaaagaagcaagctgaagaggaagcaagaaaacgtttagaagaagagaagcgtgcttttgaagaagcaaggcggcaaatggaagttgaggatggtccgcacaggggtac

SEQ ID NO: 286796 - DNA, 3535 bp, Homo sapiens
cccagcggctggagcagaagtgttagcggccagagctcccagacccctacccacagccaggcgggacgcgcacagtccctccacgcggaaagaagtaccttcgccggtcaccggctcctgcagggtgcaaatatatacagagcttcataatcagcccaagaccacatagagcaaacatgaatgatatttcccaaaaggctgagattctgctttcttcatctaaacctgtcccaaaaacctatgtaccaaaacttggcaagggtgatgtaaaggataagtttgaagccatgcagagagccagggaagaaagaaatcaaaggagatctagagacgaaaaacaaagaagaaaagaacaatatattagagagagagaatggaacaggagaaagcaggagattaaagaaatgcttgcttctgatgatgaggaagatgtatcttctaaagtagaaaaggcttatgttccaaaattaacaggaactgtgaagggtagatttgctgaaatggagaaacaaagacaagaggaacaaaggaagagaacggaggaggaacgaaaacgcagaattgagcaggatatgttagaaaagaggaaaatacagcgtgaattagcaaaaagggctgaacagattgaggacataaacaatacgggaactgaatcagcatcagaggaaggagatgattcactacttataactgtggtacctgtcaaatcatataaaacatctggaaaaatgaaaaagaattttgaggatctagaaaaagaacgtgaagagaaagaaaggatcaagtacgaggaagataaaagaataagatatgaagaacaacgaccatctctcaaggaagcaaagtgtctttcattagttatggatgatgaaatagaaagtgaagcaaaaaaagaatcactttctcccggaaaattgaaactaacttttgaagaactggagcgacaaagacaagaaaaccgaaagaagcaagctgaagaggaagcaagaaaacgtttagaagaagagaagcgtgcttttgaagaagcaaggcggcaaatggtaaatgaagatgaggaaaaccaagacacagcaaaaatttttaaagggtaccgccctggtaaactcaaactcagttttgaagaaatggaaaggcaaagaagagaagatgaaaaaaggaaagcagaagaagaagccagaaggagaatagaggaagaaaagaaggcgtttgctgaagcaaggagaaatatggtagtagatgatgactccccagagatgtataagacaatctctcaagaatttcttacaccgggaaaactggaaattaattttgaagaattattaaaacaaaaaatggaagaagaaaaacgacgaacagaggaggaacggaagcataagctagaaatggagaaacaagaatttgaacaactgagacaggaaatgggagaggaagaggaagaaaatgaaacctttggattgagcagagaatatgaagaactgatcaaattaaaaaggagtggctctattcaagctaaaaacctaaaaagcaagtttgaaaaaattggacagttgtctgaaaaagaaatacagaaaaaaatagaagaagagcgagcaagaaggagagcaattgaccttgaaattaaagagcgagaagctgaaaattttcatgaggaagatgatgttgatgttaggcctgcaagaaaaagcgaggctccatttactcacaaagtgaatatgaaagctagatttgaacaaatggctaaggcaagagaagaagaagaacaaagaagaattgaagaacaaaagttactacgcatgcagtttgaacaaagggaaattgatgcagcactacaaaagaaaagagaagaggaggaggaggaagaaggtagcatcatgaatggctccactgctgaagatgaagagcaaaccagatcaggagctccatggttcaagaagcctcttaaaaacacatcagttgtagacagtgagccagtcagatttacggttaaagtaacaggagaacccaaaccagaaattacatggtggtttgaaggagaaatactgcaggatggagaagactatcaatatattgaaaggggagaaacttactgcctttacttaccagaaactttcccagaagatggaggagagtatatgtgtaaagcagtcaacaataaaggatctgcagctagtacctgtattcttaccattgaaagtaagaattaatcactctttttatcttttattctattaatttttttttccttaaaatcacttttcttcttctcttttttagctgatgactactagctcccctcccctctccctggaactttctctttcactccaactttcttactacatccatcttttctgtggcggggccaaaaaaggaaaccaggagtgccactatgctgacttcttattccttttcataacagtcttcaaagcacagctcatctaaagaatgcctacttcttttccaaataagcatcagatttatcgcctattatgcagtaacagtcaataaaatgtacttatgggggggaattactcaattattctatcagaacctattataaagactgtatttcccatagacgtttacagcaactatgtttaaaaaacaaaaacaaaaaaaaaacacacaaacctaagtagaatacattattttgcatgaaggaatgtcatttctgagctttttacacctaaaattaggctgaaatagctgagataattaatttggaacctatcaatttgagtggactttttctttagtagtacaccattttggttgttgtagtttcaaagtctttctgaagcagatatattgggattggagcggggtggggaaaactgtcactcctttcagaggaaaaggggaggagcatggagaaaaacaaaaattaaaggacttaaagaatggctatacagtgttgagtgttgaggatattaaacatgttatttttcaaacgtatgtaatatatattaaatttataaagcaaatttatgttgtgatcttgcctgaacaaattatattttaatgaaaaaactttctattaatagttcacgcaagagaaaacactttcaacatagtcgaaggcttcaagatctaagtgtatcagacttagggaaaaagtggcacaaccttcgatttaaaattctagtctttaaaatgagtttgtaaataattagctattacgttctattaagttgttttatattttaattttctggaagacaattttattttacaacgtgaacccaaataaagtaacttctgtatttaaaagtctttctgtattttaagacttgtgcaaccagatgttacccttttatcattaaaactttttaaaatcattttttctcacagtaaacataaaaaaaaacccagtcaagtagaaaattttaccatgtaatatatgtataaaaaacacaaagcactcctttataatagtcatcaatgtacatttattgaggaaaccataatgaatacaaaattacagcaatcatgtgaccttttacatacaatgtcattaaagcaaactctaaaccac

SEQ ID NO: 286797 - DNA, 3493 bp, Homo sapiens
cccagcggctggagcagaagtgttagcggccagagctcccagacccctacccacagccaggcgggacgcgcacagtccctccacgcggaaagaagtaccttcgccggtcaccggctcctgcagggtgcaaatatatacagagcttcataatcagcccaagaccacatagagcaaacatgaatgatatttcccaaaaggctgagattctgctttcttcatctaaacctgtcccaaaaacctatgtaccaaaacttggcaagggtgatgtaaaggataagtttgaagccatgcagagagccagggaagaaagaaatcaaaggagatctagagacgaaaaacaaagaagaaaagaacaatatattagagagagagaatggaacaggagaaagcaggagattaaagaaatgcttgcttctgatgatgaggaagatgtatcttctaaagtagaaaaggcttatgttccaaaattaacaggaactgtgaagggtagatttgctgaaatggagaaacaaagacaagaggaacaaaggaagagaacggaggaggaacgaaaacgcagaattgagcaggatatgttagaaaagaggaaaatacagcgtgaattagcaaaaagggctgaacaggaaggagatgattcactacttataactgtggtacctgtcaaatcatataaaacatctggaaaaatgaaaaagaattttgaggatctagaaaaagaacgtgaagagaaagaaaggatcaagtacgaggaagataaaagaataagatatgaagaacaacgaccatctctcaaggaagcaaagtgtctttcattagttatggatgatgaaatagaaagtgaagcaaaaaaagaatcactttctcccggaaaattgaaactaacttttgaagaactggagcgacaaagacaagaaaaccgaaagaagcaagctgaagaggaagcaagaaaacgtttagaagaagagaagcgtgcttttgaagaagcaaggcggcaaatggtaaatgaagatgaggaaaaccaagacacagcaaaaatttttaaagggtaccgccctggtaaactcaaactcagttttgaagaaatggaaaggcaaagaagagaagatgaaaaaaggaaagcagaagaagaagccagaaggagaatagaggaagaaaagaaggcgtttgctgaagcaaggagaaatatggtagtagatgatgactccccagagatgtataagacaatctctcaagaatttcttacaccgggaaaactggaaattaattttgaagaattattaaaacaaaaaatggaagaagaaaaacgacgaacagaggaggaacggaagcataagctagaaatggagaaacaagaatttgaacaactgagacaggaaatgggagaggaagaggaagaaaatgaaacctttggattgagcagagaatatgaagaactgatcaaattaaaaaggagtggctctattcaagctaaaaacctaaaaagcaagtttgaaaaaattggacagttgtctgaaaaagaaatacagaaaaaaatagaagaagagcgagcaagaaggagagcaattgaccttgaaattaaagagcgagaagctgaaaattttcatgaggaagatgatgttgatgttaggcctgcaagaaaaagcgaggctccatttactcacaaagtgaatatgaaagctagatttgaacaaatggctaaggcaagagaagaagaagaacaaagaagaattgaagaacaaaagttactacgcatgcagtttgaacaaagggaaattgatgcagcactacaaaagaaaagagaagaggaggaggaggaagaaggtagcatcatgaatggctccactgctgaagatgaagagcaaaccagatcaggagctccatggttcaagaagcctcttaaaaacacatcagttgtagacagtgagccagtcagatttacggttaaagtaacaggagaacccaaaccagaaattacatggtggtttgaaggagaaatactgcaggatggagaagactatcaatatattgaaaggggagaaacttactgcctttacttaccagaaactttcccagaagatggaggagagtatatgtgtaaagcagtcaacaataaaggatctgcagctagtacctgtattcttaccattgaaagtaagaattaatcactctttttatcttttattctattaatttttttttccttaaaatcacttttcttcttctcttttttagctgatgactactagctcccctcccctctccctggaactttctctttcactccaactttcttactacatccatcttttctgtggcggggccaaaaaaggaaaccaggagtgccactatgctgacttcttattccttttcataacagtcttcaaagcacagctcatctaaagaatgcctacttcttttccaaataagcatcagatttatcgcctattatgcagtaacagtcaataaaatgtacttatgggggggaattactcaattattctatcagaacctattataaagactgtatttcccatagacgtttacagcaactatgtttaaaaaacaaaaacaaaaaaaaaacacacaaacctaagtagaatacattattttgcatgaaggaatgtcatttctgagctttttacacctaaaattaggctgaaatagctgagataattaatttggaacctatcaatttgagtggactttttctttagtagtacaccattttggttgttgtagtttcaaagtctttctgaagcagatatattgggattggagcggggtggggaaaactgtcactcctttcagaggaaaaggggaggagcatggagaaaaacaaaaattaaaggacttaaagaatggctatacagtgttgagtgttgaggatattaaacatgttatttttcaaacgtatgtaatatatattaaatttataaagcaaatttatgttgtgatcttgcctgaacaaattatattttaatgaaaaaactttctattaatagttcacgcaagagaaaacactttcaacatagtcgaaggcttcaagatctaagtgtatcagacttagggaaaaagtggcacaaccttcgatttaaaattctagtctttaaaatgagtttgtaaataattagctattacgttctattaagttgttttatattttaattttctggaagacaattttattttacaacgtgaacccaaataaagtaacttctgtatttaaaagtctttctgtattttaagacttgtgcaaccagatgttacccttttatcattaaaactttttaaaatcattttttctcacagtaaacataaaaaaaaacccagtcaagtagaaaattttaccatgtaatatatgtataaaaaacacaaagcactcctttataatagtcatcaatgtacatttattgaggaaaccataatgaatacaaaattacagcaatcatgtgaccttttacatacaatgtcattaaagcaaactctaaaccac

SEQ ID NO: 286798 - DNA, 3065 bp, Homo sapiens
  misc_feature (13)..(13): n is a, c, g, or t
ctggtaaactcanactcaggtttgaagaaatggaaaggcaaagaagagaagatgaaaaaaggaaagcagaagaagaagccagaaggagaatagaggaagaaaagaaggcgtttgctgaagcaaggagaaatatggaagaggaagaaaatgaaacctttggattgagcagagaatatgaagaactgatcaaattaaaaaggagtggctctattcaagctaaaaacctaaaaagcaagtttgaaaaaattggacagttgtctgaaaaagaattttgaggatctagaaaaagaacgtgaagagaaagaaaggatcaagtacgaggaagataaaagaataagatatgaagaacaacgaccatctctcaaggaagcaaagtgtctttcattagttatggatgatgaaatagaaagtgaagcaaaaaaagaatcactttctcccggaaaattgaaactaacttttgaagaactggagcgacaaagacaagaaaaccgaaagaagcaagctgaagaggaagcaagaaaacgtttagaagaagagaagcgtgcttttgaagaagcaaggcggcaaatggtaaatgaagatgaggaaaaccaagacacagcaaaaatttttaaagggtaccgccctggtaaactcaaactcagttttgaagaaatggaaaggcaaagaagagaagatgaaaaaaggaaagcagaagaagaagccagaaggagaatagaggaagaaaagaaggcgtttgctgaagcaaggagaaatatggtagtagatgatgactccccagagatgtataagacaatctctcaagaatttcttacaccgggaaaactggaaattaattttgaagaattattaaaacaaaaaatggaagaagaaaaacgacgaacagaggaggaacggaagcataagctagaaatggagaaacaagaatttgaacaactgagacaggaaatgggagaggaagaggaagaaaatgaaacctttggattgagcagagaatatgaagaactgatcaaattaaaaaggagtggctctattcaagctaaaaacctaaaaagcaagtttgaaaaaattggacagttgtctgaaaaagaaatacagaaaaaaatagaagaagagcgagcaagaaggagagcaattgaccttgaaattaaagagcgagaagctgaaaattttcatgaggaagatgatgttgatgttaggcctgcaagaaaaagcgaggctccatttactcacaaagtgaatatgaaagctagatttgaacaaatggctaaggcaagagaagaagaagaacaaagaagaattgaagaacaaaagttactacgcatgcagtttgaacaaagggaaattgatgcagcactacaaaagaaaagagaagaggaggaggaggaagaaggtagcatcatgaatggctccactgctgaagatgaagagcaaaccagatcaggagctccatggttcaagaagcctcttaaaaacacatcagttgtagacagtgagccagtcagatttacggttaaagtaacaggagaacccaaaccagaaattacatggtggtttgaaggagaaatactgcaggatggagaagactatcaatatattgaaaggggagaaacttactgcctttacttaccagaaactttcccagaagatggaggagagtatatgtgtaaagcagtcaacaataaaggatctgcagctagtacctgtattcttaccattgaaagtaagaattaatcactctttttatcttttattctattaatttttttttccttaaaatcacttttcttcttctcttttttagctgatgactactagctcccctcccctctccctggaactttctctttcactccaactttcttactacatccatcttttctgtggcggggccaaaaaaggaaaccaggagtgccactatgctgacttcttattccttttcataacagtcttcaaagcacagctcatctaaagaatgcctacttcttttccaaataagcatcagatttatcgcctattatgcagtaacagtcaataaaatgtacttatgggggggaattactcaattattctatcagaacctattataaagactgtatttcccatagacgtttacagcaactatgtttaaaaaacaaaaacaaaaaaaaaacacacaaacctaagtagaatacattattttgcatgaaggaatgtcatttctgagctttttacacctaaaattaggctgaaatagctgagataattaatttggaacctatcaatttgagtggactttttctttagtagtacaccattttggttgttgtagtttcaaagtctttctgaagcagatatattgggattggagcggggtggggaaaactgtcactcctttcagaggaaaaggggaggagcatggagaaaaacaaaaattaaaggacttaaagaatggctatacagtgttgagtgttgaggatattaaacatgttatttttcaaacgtatgtaatatatattaaatttataaagcaaatttatgttgtgatcttgcctgaacaaattatattttaatgaaaaaactttctattaatagttcacgcaagagaaaacactttcaacatagtcgaaggcttcaagatctaagtgtatcagacttagggaaaaagtggcacaaccttcgatttaaaattctagtctttaaaatgagtttgtaaataattagctattacgttctattaagttgttttatattttaattttctggaagacaattttattttacaacgtgaacccaaataaagtaacttctgtatttaaaagtctttctgtattttaagacttgtgcaaccagatgttacccttttatcattaaaactttttaaaatcattttttctcacagtaaacataaaaaaaaacccagtcaagtagaaaattttaccatgtaatatatgtataaaaaacacaaagcactcctttataatagtcatcaatgtacatttattgaggaaaccataatgaatacaaaattacagcaatcatgtgaccttttacatacaatgtcattaaagcaaactctaaaccac

SEQ ID NO: 286799 - DNA, 3022 bp, Homo sapiens
tagaggatccccttattgccttcttaatggaggaacgaaaacgcagaattgagcaggatatgttagaaaagaggaaaatacagcgtgaattagcaaaaagggctgaacagattgaggacataaacaatacgggaactgaatcagcatcagaggaaggagatgattcactacttataactgtggtacctgtcaaatcatataaaacatctggaaaaatgaaaaagaattttgaggatctagaaaaagaacgtgaagagaaagaaaggatcaagtacgaggaagataaaagaataagatatgaagaacaacgaccatctctcaaggaagcaaagtgtctttcattagttatggatgatgaaatagaaagtgaagcaaaaaaagaatcactttctcccggaaaattgaaactaacttttgaagaactggagcgacaaagacaagaaaaccgaaagaagcaagctgaagaggaagcaagaaaacgtttagaagaagagaagcgtgcttttgaagaagcaaggcggcaaatggtaaatgaagatgaggaaaaccaagacacagcaaaaatttttaaagggtaccgccctggtaaactcaaactcagttttgaagaaatggaaaggcaaagaagagaagatgaaaaaaggaaagcagaagaagaagccagaaggagaatagaggaagaaaagaaggcgtttgctgaagcaaggagaaatatggtagtagatgatgactccccagagatgtataagacaatctctcaagaatttcttacaccgggaaaactggaaattaattttgaagaattattaaaacaaaaaatggaagaagaaaaacgacgaacagaggaggaacggaagcataagctagaaatggagaaacaagaatttgaacaactgagacaggaaatgggagaggaagaggaagaaaatgaaacctttggattgagcagagaatatgaagaactgatcaaattaaaaaggagtggctctattcaagctaaaaacctaaaaagcaagtttgaaaaaattggacagttgtctgaaaaagaaatacagaaaaaaatagaagaagagcgagcaagaaggagagcaattgaccttgaaattaaagagcgagaagctgaaaattttcatgaggaagatgatgttgatgttaggcctgcaagaaaaagcgaggctccatttactcacaaagtgaatatgaaagctagatttgaacaaatggctaaggcaagagaagaagaagaacaaagaagaattgaagaacaaaagttactacgcatgcagtttgaacaaagggaaattgatgcagcactacaaaagaaaagagaagaggaggaggaggaagaaggtagcatcatgaatggctccactgctgaagatgaagagcaaaccagatcaggagctccatggttcaagaagcctcttaaaaacacatcagttgtagacagtgagccagtcagatttacggttaaagtaacaggagaacccaaaccagaaattacatggtggtttgaaggagaaatactgcaggatggagaagactatcaatatattgaaaggggagaaacttactgcctttacttaccagaaactttcccagaagatggaggagagtatatgtgtaaagcagtcaacaataaaggatctgcagctagtacctgtattcttaccattgaaagtaagaattaatcactctttttatcttttattctattaatttttttttccttaaaatcacttttcttcttctcttttttagctgatgactactagctcccctcccctctccctggaactttctctttcactccaactttcttactacatccatcttttctgtggcggggccaaaaaaggaaaccaggagtgccactatgctgacttcttattccttttcataacagtcttcaaagcacagctcatctaaagaatgcctacttcttttccaaataagcatcagatttatcgcctattatgcagtaacagtcaataaaatgtacttatgggggggaattactcaattattctatcagaacctattataaagactgtatttcccatagacgtttacagcaactatgtttaaaaaacaaaaacaaaaaaaaaacacacaaacctaagtagaatacattattttgcatgaaggaatgtcatttctgagctttttacacctaaaattaggctgaaatagctgagataattaatttggaacctatcaatttgagtggactttttctttagtagtacaccattttggttgttgtagtttcaaagtctttctgaagcagatatattgggattggagcggggtggggaaaactgtcactcctttcagaggaaaaggggaggagcatggagaaaaacaaaaattaaaggacttaaagaatggctatacagtgttgagtgttgaggatattaaacatgttatttttcaaacgtatgtaatatatattaaatttataaagcaaatttatgttgtgatcttgcctgaacaaattatattttaatgaaaaaactttctattaatagttcacgcaagagaaaacactttcaacatagtcgaaggcttcaagatctaagtgtatcagacttagggaaaaagtggcacaaccttcgatttaaaattctagtctttaaaatgagtttgtaaataattagctattacgttctattaagttgttttatattttaattttctggaagacaattttattttacaacgtgaacccaaataaagtaacttctgtatttaaaagtctttctgtattttaagacttgtgcaaccagatgttacccttttatcattaaaactttttaaaatcattttttctcacagtaaacataaaaaaaaacccagtcaagtagaaaattttaccatgtaatatatgtataaaaaacacaaagcactcctttataatagtcatcaatgtacatttattgaggaaaccataatgaatacaaaattacagcaatcatgtgaccttttacatacaatgtcattaaagcaaactctaaaccac

SEQ ID NO: 286800 - DNA, 3481 bp, Homo sapiens
cccagcggctggagcagaagtgttagcggccagagctcccagacccctacccacagccaggcgggacgcgcacagtccctccacgcggaaagaagtaccttcgccggtcaccggctcctgcagggtgcaaatatatacagagcttcataatcagcccaagaccacatagagcaaacatgaatgatatttcccaaaaggctgagattctgctttcttcatctaaacctgtcccaaaaacctatgtaccaaaacttggcaagggtgatgtaaaggataagtttgaagccatgcagagagccagggaagaaagaaatcaaaggagatctagagacgaaaaacaaagaagaaaagaacaatatattagagagagagaatggaacaggagaaagcaggagattaaagaaatgcttgcttctgatgatgaggaagatgtatcttctaaagtagaaaaggcttatgttccaaaattaacaggaactgtgaagggtagatttgctgaaatggagaaacaaagacaagaggaacaaaggaagagaacggaggaggaacgaaaacgcagaattgagcaggatatgttagaaaagaggaaaatacagcgtgaattagcaaaaagggctgaacagattgaggacataaacaatacgggaactgaatcagcatcagaggaaggagatgattcactacttataactgtggtacctgtcaaatcatataaaacatctggaaaaatgaaaaagaattttgaggatctagaaaaagaacgtgaagagaaagaaaggatcaagtacgaggaagataaaagaataagatatgaagaacaacgaccatctctcaaggaagcaaagtgtctttcattagttatggatgatgaaatagaaagtgaagcaaaaaaagaatcactttctcccggaaaattgaaactaacttttgaagaactggagcgacaaagacaagaaaaccgaaagaagcaagctgaagaggaagcaagaaaacgtttagaagaagagaagcgtgcttttgaagaagcaaggcggcaaatggtaaatgaagatgaggaaaaccaagacacagcaaaaatttttaaagggtaccgccctggtaaactcaaactcagttttgaagaaatggaaaggcaaagaagagaagatgaaaaaaggaaagcagaagaagaagccagaaggagaatagaggaagaaaagaaggcgtttgctgaagcaaggagaaatatggtagtagatgatgactccccagagatgtataagacaatctctcaagaatttcttacaccgggaaaactggaaattaattttgaagaattattaaaacaaaaaatggaagaagaaaaacgacgaacagaggaggaacggaagcataagctagaaatggagaaacaagaatttgaacaactgagacaggaaatgggagaggaagaggaagaaaatgaaacctttggattgagcagagaatatgaagaactgatcaaattaaaaaggagtggctctattcaagctaaaaacctaaaaagcaagtttgaaaaaattggacagttgtctgaaaaagaaatacagaaaaaaatagaagaagagcgagcaagaaggagagcaattgaccttgaaattaaagagcgagaagctgaaaattttcatgaggaagatgatgttgatgttaggcctgcaagaaaaagcgaggctccatttactcacaaagtgaatatgaaagctagatttgaacaaatggctaaggcaagagaagaagaagaacaaagaagaattgaagaacaaaagttactacgcatgcagtttgaacaaagggaaattgatgcagcactacaaaagaaaagagaagaggaggaggaggaagaaggtagcatcatgaatggctccactgctgaagatgaagagcaaaccagatcaggagctccatggttcaagaagcctcttagagaacccaaaccagaaattacatggtggtttgaaggagaaatactgcaggatggagaagactatcaatatattgaaaggggagaaacttactgcctttacttaccagaaactttcccagaagatggaggagagtatatgtgtaaagcagtcaacaataaaggatctgcagctagtacctgtattcttaccattgaaagtaagaattaatcactctttttatcttttattctattaatttttttttccttaaaatcacttttcttcttctcttttttagctgatgactactagctcccctcccctctccctggaactttctctttcactccaactttcttactacatccatcttttctgtggcggggccaaaaaaggaaaccaggagtgccactatgctgacttcttattccttttcataacagtcttcaaagcacagctcatctaaagaatgcctacttcttttccaaataagcatcagatttatcgcctattatgcagtaacagtcaataaaatgtacttatgggggggaattactcaattattctatcagaacctattataaagactgtatttcccatagacgtttacagcaactatgtttaaaaaacaaaaacaaaaaaaaaacacacaaacctaagtagaatacattattttgcatgaaggaatgtcatttctgagctttttacacctaaaattaggctgaaatagctgagataattaatttggaacctatcaatttgagtggactttttctttagtagtacaccattttggttgttgtagtttcaaagtctttctgaagcagatatattgggattggagcggggtggggaaaactgtcactcctttcagaggaaaaggggaggagcatggagaaaaacaaaaattaaaggacttaaagaatggctatacagtgttgagtgttgaggatattaaacatgttatttttcaaacgtatgtaatatatattaaatttataaagcaaatttatgttgtgatcttgcctgaacaaattatattttaatgaaaaaactttctattaatagttcacgcaagagaaaacactttcaacatagtcgaaggcttcaagatctaagtgtatcagacttagggaaaaagtggcacaaccttcgatttaaaattctagtctttaaaatgagtttgtaaataattagctattacgttctattaagttgttttatattttaattttctggaagacaattttattttacaacgtgaacccaaataaagtaacttctgtatttaaaagtctttctgtattttaagacttgtgcaaccagatgttacccttttatcattaaaactttttaaaatcattttttctcacagtaaacataaaaaaaaacccagtcaagtagaaaattttaccatgtaatatatgtataaaaaacacaaagcactcctttataatagtcatcaatgtacatttattgaggaaaccataatgaatacaaaattacagcaatcatgtgaccttttacatacaatgtcattaaagcaaactctaaaccac

SEQ ID NO: 286801 - DNA, 3229 bp, Homo sapiens
cccagcggctggagcagaagtgttagcggccagagctcccagacccctacccacagccaggcgggacgcgcacagtccctccacgcggaaagaagtaccttcgccggtcaccggctcctgcagggtgcaaatatatacagagcttcataatcagcccaagaccacatagagcaaacatgaatgatatttcccaaaaggctgagattctgctttcttcatctaaacctgtcccaaaaacctatgtaccaaaacttggcaagggtgatgtaaaggataagtttgaagccatgcagagagccagggaagaaagaaatcaaaggagatctagagacgaaaaacaaagaagaaaagaacaatatattagagagagagaatggaacaggagaaagcaggagattaaagaaatgcttgcttctgatgatgaggaagatgtatcttctaaagtagaaaaggcttatgttccaaaattaacaggaactgtgaagggtagatttgctgaaatggagaaacaaagacaagaggaacaaaggaagagaacggaggaggaacgaaaacgcagaattgagcaggatatgttagaaaagaggaaaatacagcgtgaattagcaaaaagggctgaacaggaaggagatgattcactacttataactgtggtacctgtcaaatcatataaaacatctggaaaaatgaaaaagaattttgaggatctagaaaaagaacgtgaagagaaagaaaggatcaagtacgaggaagataaaagaataagatatgaagaacaacgaccatctctcaaggaagcaaagtgtctttcattagttatggatgatgaaatagaaagtgaagcaaaaaaagaatcactttctcccggaaaattgaaactaacttttgaagaactggagcgacaaagacaagaaaaccgaaagaagcaagctgaagaggaagcaagaaaacgtttagaagaagagaagcgtgcttttgaagaagcaaggcggcaaatggtaaatgaagatgaggaaaaccaagacacagcaaaaatttttaaagggtaccgccctggtaaactcaaactcagttttgaagaaatggaaaggcaaagaagagaagatgaaaaaaggaaagcagaagaagaagccagaaggagaatagaggaagaaaagaaggcgtttgctgaagcaaggagaaatatggtagtagatgatgactccccagagatgtataagacaatctctcaagaatttcttacaccgggaaaactggaaattaattttgaagaattattaaaacaaaaaatggaagaagaaaaacgacgaacagaggaggaacggaagcataagctagaaatggaagatgatgttgatgttaggcctgcaagaaaaagcgaggctccatttactcacaaagtgaatatgaaagctagatttgaacaaatggctaaggcaagagaagaagaagaacaaagaagaattgaagaacaaaagttactacgcatgcagtttgaacaaagggaaattgatgcagcactacaaaagaaaagagaagaggaggaggaggaagaaggtagcatcatgaatggctccactgctgaagatgaagagcaaaccagatcaggagctccatggttcaagaagcctcttaaaaacacatcagttgtagacagtgagccagtcagatttacggttaaagtaacaggagaacccaaaccagaaattacatggtggtttgaaggagaaatactgcaggatggagaagactatcaatatattgaaaggggagaaacttactgcctttacttaccagaaactttcccagaagatggaggagagtatatgtgtaaagcagtcaacaataaaggatctgcagctagtacctgtattcttaccattgaaagtaagaattaatcactctttttatcttttattctattaatttttttttccttaaaatcacttttcttcttctcttttttagctgatgactactagctcccctcccctctccctggaactttctctttcactccaactttcttactacatccatcttttctgtggcggggccaaaaaaggaaaccaggagtgccactatgctgacttcttattccttttcataacagtcttcaaagcacagctcatctaaagaatgcctacttcttttccaaataagcatcagatttatcgcctattatgcagtaacagtcaataaaatgtacttatgggggggaattactcaattattctatcagaacctattataaagactgtatttcccatagacgtttacagcaactatgtttaaaaaacaaaaacaaaaaaaaaacacacaaacctaagtagaatacattattttgcatgaaggaatgtcatttctgagctttttacacctaaaattaggctgaaatagctgagataattaatttggaacctatcaatttgagtggactttttctttagtagtacaccattttggttgttgtagtttcaaagtctttctgaagcagatatattgggattggagcggggtggggaaaactgtcactcctttcagaggaaaaggggaggagcatggagaaaaacaaaaattaaaggacttaaagaatggctatacagtgttgagtgttgaggatattaaacatgttatttttcaaacgtatgtaatatatattaaatttataaagcaaatttatgttgtgatcttgcctgaacaaattatattttaatgaaaaaactttctattaatagttcacgcaagagaaaacactttcaacatagtcgaaggcttcaagatctaagtgtatcagacttagggaaaaagtggcacaaccttcgatttaaaattctagtctttaaaatgagtttgtaaataattagctattacgttctattaagttgttttatattttaattttctggaagacaattttattttacaacgtgaacccaaataaagtaacttctgtatttaaaagtctttctgtattttaagacttgtgcaaccagatgttacccttttatcattaaaactttttaaaatcattttttctcacagtaaacataaaaaaaaacccagtcaagtagaaaattttaccatgtaatatatgtataaaaaacacaaagcactcctttataatagtcatcaatgtacatttattgaggaaaccataatgaatacaaaattacagcaatcatgtgaccttttacatacaatgtcattaaagcaaactctaaaccac

SEQ ID NO: 286802 - DNA, 3272 bp, Homo sapiens
cccagcggctggagcagaagtgttagcggccagagctcccagacccctacccacagccaggcgggacgcgcacagtccctccacgcggaaagaagtaccttcgccggtcaccggctcctgcagggtgcaaatatatacagagcttcataatcagcccaagaccacatagagcaaacatgaatgatatttcccaaaaggctgagattctgctttcttcatctaaacctgtcccaaaaacctatgtaccaaaacttggcaagggtgatgtaaaggataagtttgaagccatgcagagagccagggaagaaagaaatcaaaggagatctagagacgaaaaacaaagaagaaaagaacaatatattagagagagagaatggaacaggagaaagcaggagattaaagaaatgcttgcttctgatgatgaggaagatgtatcttctaaagtagaaaaggcttatgttccaaaattaacaggaactgtgaagggtagatttgctgaaatggagaaacaaagacaagaggaacaaaggaagagaacggaggaggaacgaaaacgcagaattgagcaggatatgttagaaaagaggaaaatacagcgtgaattagcaaaaagggctgaacagattgaggacataaacaatacgggaactgaatcagcatcagaggaaggagatgattcactacttataactgtggtacctgtcaaatcatataaaacatctggaaaaatgaaaaagaattttgaggatctagaaaaagaacgtgaagagaaagaaaggatcaagtacgaggaagataaaagaataagatatgaagaacaacgaccatctctcaaggaagcaaagtgtctttcattagttatggatgatgaaatagaaagtgaagcaaaaaaagaatcactttctcccggaaaattgaaactaacttttgaagaactggagcgacaaagacaagaaaaccgaaagaagcaagctgaagaggaagcaagaaaacgtttagaagaagagaagcgtgcttttgaagaagcaaggcggcaaatggtaaatgaagatgaggaaaaccaagacacagcaaaaatttttaaagggtaccgccctggtaaactcaaactcagttttgaagaaatggaaaggcaaagaagagaagatgaaaaaaggaaagcagaagaagaagccagaaggagaatagaggaagaaaagaaggcgtttgctgaagcaaggagaaatatggtagtagatgatgactccccagagatgtataagacaatctctcaagaatttcttacaccgggaaaactggaaattaattttgaagaattattaaaacaaaaaatggaagaagaaaaacgacgaacagaggaggaacggaagcataagctagaaatggagaaacaagaatttgaacaactgagacaggaaatgggagaggaagaggaagaaaatgaaacctttggattgagcagagaatatgaagaactgatcaaattaaaaaggagtggctctattcaagctaaaaacctaaaaagcaagtttgaaaaaattggacagttgtctgaaaaagaaatacagaaaaaaatagaagaagagcgagcaagaaggagagcaattgaccttgaaattaaagagcgagaagctgaaaattttcatgaggaagatgatgttgatgttaggcctgcaagaaaaagcgaggctccatttactcacaaagtgaatatgaaagctagatttgaacaaatggctaaggcaagagaagaagaagaacaaagaagaattgaagaacaaaagttactacgcatgcagtttgaacaaagggaaattgatgcagcactacaaaagaaaagagaagaggaggaggaggaagaaggtagcatcatgaatggctccactgctgaagatgaagagcaaaccagatcaggagctccatggttcaagaagcctcttaaaaacacatcagttgtagacagtgagccagtcagatttacggttaaagtaacaggagaacccaaaccagaaattacatggtggtttgaaggagaaatactgcagaactttctctttcactccaactttcttactacatccatcttttctgtggcggggccaaaaaaggaaaccaggagtgccactatgctgacttcttattccttttcataacagtcttcaaagcacagctcatctaaagaatgcctacttcttttccaaataagcatcagatttatcgcctattatgcagtaacagtcaataaaatgtacttatgggggggaattactcaattattctatcagaacctattataaagactgtatttcccatagacgtttacagcaactatgtttaaaaaacaaaaacaaaaaaaaaacacacaaacctaagtagaatacattattttgcatgaaggaatgtcatttctgagctttttacacctaaaattaggctgaaatagctgagataattaatttggaacctatcaatttgagtggactttttctttagtagtacaccattttggttgttgtagtttcaaagtctttctgaagcagatatattgggattggagcggggtggggaaaactgtcactcctttcagaggaaaaggggaggagcatggagaaaaacaaaaattaaaggacttaaagaatggctatacagtgttgagtgttgaggatattaaacatgttatttttcaaacgtatgtaatatatattaaatttataaagcaaatttatgttgtgatcttgcctgaacaaattatattttaatgaaaaaactttctattaatagttcacgcaagagaaaacactttcaacatagtcgaaggcttcaagatctaagtgtatcagacttagggaaaaagtggcacaaccttcgatttaaaattctagtctttaaaatgagtttgtaaataattagctattacgttctattaagttgttttatattttaattttctggaagacaattttattttacaacgtgaacccaaataaagtaacttctgtatttaaaagtctttctgtattttaagacttgtgcaaccagatgttacccttttatcattaaaactttttaaaatcattttttctcacagtaaacataaaaaaaaacccagtcaagtagaaaattttaccatgtaatatatgtataaaaaacacaaagcactcctttataatagtcatcaatgtacatttattgaggaaaccataatgaatacaaaattacagcaatcatgtgaccttttacatacaatgtcattaaagcaaactctaaaccac

SEQ ID NO: 286803 - DNA, 3482 bp, Homo sapiens
cccagcggctggagcagaagtgttagcggccagagctcccagacccctacccacagccaggcgggacgcgcacagtccctccacgcggaaagaagtaccttcgccggtcaccggctcctgcagggtgcaaatatatacagagcttcataatcagcccaagaccacatagagcaaacatgaatgatatttcccaaaaggctgagattctgctttcttcatctaaacctgtcccaaaaacctatgtaccaaaacttggcaagggtgatgtaaaggataagtttgaagccatgcagagagccagggaagaaagaaatcaaaggagatctagagacgaaaaacaaagaagaaaagaacaatatattagagagagagaatggaacaggagaaagcaggagattaaagaaatgcttgcttctgatgatgaggaagatgtatcttctaaagtagaaaaggcttatgttccaaaattaacaggaactgtgaagggtagatttgctgaaatggagaaacaaagacaagaggaacaaaggaagagaacggaggaggaacgaaaacgcagaattgagcaggatatgttagaaaagaggaaaatacagcgtgaattagcaaaaagggctgaacagattgaggacataaacaatacgggaactgaatcagcatcagaggaaggagatgattcactacttataactgtggtacctgtcaaatcatataaaacatctggaaaaatgaaaaagaattttgaggatctagaaaaagaacgtgaagagaaagaaaggatcaagtacgaggaagataaaagaataagatatgaagaacaacgaccatctctcaaggaagcaaagtgtctttcattagttatggatgatgaaatagaaagtgaagcaaaaaaagaatcactttctcccggaaaattgaaactaacttttgaagaactggagcgacaaagacaagaaaaccgaaagaagcaagctgaagaggaagcaagaaaacgtttagaagaagagaagcgtgcttttgaagaagcaaggcggcaaatggtaaatgaagatgaggaaaaccaagacacagcaaaaatttttaaagggtaccgccctggtaaactcaaactcagttttgaagaaatggaaaggcaaagaagagaagatgaaaaaaggaaagcagaagaagaagccagaaggagaatagaggaagaaaagaaggcgtttgctgaagcaaggagaaatatggtagtagatgatgactccccagagatgtataagacaatctctcaagaatttcttacaccgggaaaactggaaattaattttgaagaattattaaaacaaaaaatggaagaagaaaaacgacgaacagaggaggaacggaagcataagctagaaatggagaaacaagaatttgaacaactgagacaggaaatgggagaggaagaggaagaaaatgaaacctttggattgagcagagaatatgaagaactgatcaaattaaaaaggagtggctctattcaagctaaaaacctaaaaagcaagtttgaaaaaattggacagttgtctgaaaaagaaatacagaaaaaaatagaagaagagcgagcaagaaggagagcaattgaccttgaaattaaagagcgagaagctgaaaattttcatgaggaagatgatgttgatgttaggcctgcaagaaaaagcgaggctccatttactcacaaagtgaatatgaaagctagatttgaacaaatggctaaggcaagagaagaagaagaacaaagaagaattgaagaacaaaagttactacgcatgcagtttgaacaaagggaaattgatgcagcactacaaaagaaaagagaagaggaggaggaggaagaaggtagcatcatgaatggctccactgctgaagatgaagagcaaaccagatcaggagctccatggttcaagaagcctcttaaaaacacatcagttgtagacagtgagccagtcagatttacggttaaagtaacaggagaacccaaaccagaaattacatggtggtttgaaggagaaatactgcaggatggagaagactatcaatatattgaaaggggagaaacttactgcctttacttaccagaaactttcccagaagatggaggagagtatatgtgtaaagcagtcaacaataaaggatctgcagctagtacctgtattcttaccattgaaagtaagaattaatcactctttttatcttttattctattaatttttttttccttaaaatcacttttcttcttctcttttttagctgatgactactagctcccctcccctctccctggaactttctctttcactccaactttcttactacatccatcttttctgtggcggggccaatcttcaaagcacagctcatctaaagaatgcctacttcttttccaaataagcatcagatttatcgcctattatgcagtaacagtcaataaaatgtacttatgggggggaattactcaattattctatcagaacctattataaagactgtatttcccatagacgtttacagcaactatgtttaaaaaacaaaaacaaaaaaaaaacacacaaacctaagtagaatacattattttgcatgaaggaatgtcatttctgagctttttacacctaaaattaggctgaaatagctgagataattaatttggaacctatcaatttgagtggactttttctttagtagtacaccattttggttgttgtagtttcaaagtctttctgaagcagatatattgggattggagcggggtggggaaaactgtcactcctttcagaggaaaaggggaggagcatggagaaaaacaaaaattaaaggacttaaagaatggctatacagtgttgagtgttgaggatattaaacatgttatttttcaaacgtatgtaatatatattaaatttataaagcaaatttatgttgtgatcttgcctgaacaaattatattttaatgaaaaaactttctattaatagttcacgcaagagaaaacactttcaacatagtcgaaggcttcaagatctaagtgtatcagacttagggaaaaagtggcacaaccttcgatttaaaattctagtctttaaaatgagtttgtaaataattagctattacgttctattaagttgttttatattttaattttctggaagacaattttattttacaacgtgaacccaaataaagtaacttctgtatttaaaagtctttctgtattttaagacttgtgcaaccagatgttacccttttatcattaaaactttttaaaatcattttttctcacagtaaacataaaaaaaaacccagtcaagtagaaaattttaccatgtaatatatgtataaaaaacacaaagcactcctttataatagtcatcaatgtacatttattgaggaaaccataatgaatacaaaattacagcaatcatgtgaccttttacatacaatgtcattaaagcaaactctaaaccac

SEQ ID NO: 286804 - DNA, 3118 bp, Homo sapiens
cccagcggctggagcagaagtgttagcggccagagctcccagacccctacccacagccaggcgggacgcgcacagtccctccacgcggaaagaagtaccttcgccggtcaccggctcctgcagggtgcaaatatatacagagcttcataatcagcccaagaccacatagagcaaacatgaatgatatttcccaaaaggctgagattctgctttcttcatctaaacctgtcccaaaaacctatgtaccaaaacttggcaagggtgatgtaaaggataagtttgaagccatgcagagagccagggaagaaagaaatcaaaggagatctagagacgaaaaacaaagaagaaaagaacaatatattagagagagagaatggaacaggagaaagcaggagattaaagaaatgcttgcttctgatgatgaggaagatgtatcttctaaagtagaaaaggcttatgttccaaaattaacaggaactgtgaagggtagatttgctgaaatggagaaacaaagacaagaggaacaaaggaagagaacggaggaggaacgaaaacgcagaattgagcaggatatgttagaaaagaggaaaatacagcgtgaattagcaaaaagggctgaacaggtaaatgaagatgaggaaaaccaagacacagcaaaaatttttaaagggtaccgccctggtaaactcaaactcagttttgaagaaatggaaaggcaaagaagagaagatgaaaaaaggaaagcagaagaagaagccagaaggagaatagaggaagaaaagaaggcgtttgctgaagcaaggagaaatatggtagtagatgatgactccccagagatgtataagacaatctctcaagaatttcttacaccgggaaaactggaaattaattttgaagaattattaaaacaaaaaatggaagaagaaaaacgacgaacagaggaggaacggaagcataagctagaaatggagaaacaagaatttgaacaactgagacaggaaatgggagaggaagaggaagaaaatgaaacctttggattgagcagagaatatgaagaactgatcaaattaaaaaggagtggctctattcaagctaaaaacctaaaaagcaagtttgaaaaaattggacagttgtctgaaaaagaaatacagaaaaaaatagaagaagagcgagcaagaaggagagcaattgaccttgaaattaaagagcgagaagctgaaaattttcatgaggaagatgatgttgatgttaggcctgcaagaaaaagcgaggctccatttactcacaaagtgaatatgaaagctagatttgaacaaatggctaaggcaagagaagaagaagaacaaagaagaattgaagaacaaaagttactacgcatgcagtttgaacaaagggaaattgatgcagcactacaaaagaaaagagaagaggaggaggaggaagaaggtagcatcatgaatggctccactgctgaagatgaagagcaaaccagatcaggagctccatggttcaagaagcctcttaaaaacacatcagttgtagacagtgagccagtcagatttacggttaaagtaacaggagaacccaaaccagaaattacatggtggtttgaaggagaaatactgcaggatggagaagactatcaatatattgaaaggggagaaacttactgcctttacttaccagaaactttcccagaagatggaggagagtatatgtgtaaagcagtcaacaataaaggatctgcagctagtacctgtattcttaccattgaaagtaagaattaatcactctttttatcttttattctattaatttttttttccttaaaatcacttttcttcttctcttttttagctgatgactactagctcccctcccctctccctggaactttctctttcactccaactttcttactacatccatcttttctgtggcggggccaaaaaaggaaaccaggagtgccactatgctgacttcttattccttttcataacagtcttcaaagcacagctcatctaaagaatgcctacttcttttccaaataagcatcagatttatcgcctattatgcagtaacagtcaataaaatgtacttatgggggggaattactcaattattctatcagaacctattataaagactgtatttcccatagacgtttacagcaactatgtttaaaaaacaaaaacaaaaaaaaaacacacaaacctaagtagaatacattattttgcatgaaggaatgtcatttctgagctttttacacctaaaattaggctgaaatagctgagataattaatttggaacctatcaatttgagtggactttttctttagtagtacaccattttggttgttgtagtttcaaagtctttctgaagcagatatattgggattggagcggggtggggaaaactgtcactcctttcagaggaaaaggggaggagcatggagaaaaacaaaaattaaaggacttaaagaatggctatacagtgttgagtgttgaggatattaaacatgttatttttcaaacgtatgtaatatatattaaatttataaagcaaatttatgttgtgatcttgcctgaacaaattatattttaatgaaaaaactttctattaatagttcacgcaagagaaaacactttcaacatagtcgaaggcttcaagatctaagtgtatcagacttagggaaaaagtggcacaaccttcgatttaaaattctagtctttaaaatgagtttgtaaataattagctattacgttctattaagttgttttatattttaattttctggaagacaattttattttacaacgtgaacccaaataaagtaacttctgtatttaaaagtctttctgtattttaagacttgtgcaaccagatgttacccttttatcattaaaactttttaaaatcattttttctcacagtaaacataaaaaaaaacccagtcaagtagaaaattttaccatgtaatatatgtataaaaaacacaaagcactcctttataatagtcatcaatgtacatttattgaggaaaccataatgaatacaaaattacagcaatcatgtgaccttttacatacaatgtcattaaagcaaactctaaaccac

SEQ ID NO: 286805 - DNA, 1940 bp, Homo sapiens
ctacttatcgactatattaccccaccaccaccggaaaaaacacaacaaactgagggagcagcatgttgtgttttgcctgcaagaaaaagcgaggctccatttactcacaaagtgaatatgaaagctagatttgaacaaatggctaaggcaagagaagaagaagaacaaagaagaattgaagaacaaaagttactacgcatgcagtttgaacaaagggaaattgatgcagcactacaaaagaaaagagaagaggaggaggaggaagaaggtagcatcatgaatggctccactgctgaagatgaagagcaaaccagatcaggagctccatggttcaagaagcctcttaaaaacacatcagttgtagacagtgagccagtcagatttacggttaaagtaacaggagaacccaaaccagaaattacatggtggtttgaaggagaaatactgcaggatggagaagactatcaatatattgaaaggggagaaacttactgcctttacttaccagaaactttcccagaagatggaggagagtatatgtgtaaagcagtcaacaataaaggatctgcagctagtacctgtattcttaccattgaaagtaagaattaatcactctttttatcttttattctattaatttttttttccttaaaatcacttttcttcttctcttttttagctgatgactactagctcccctcccctctccctggaactttctctttcactccaactttcttactacatccatcttttctgtggcggggccaaaaaaggaaaccaggagtgccactatgctgacttcttattccttttcataacagtcttcaaagcacagctcatctaaagaatgcctacttcttttccaaataagcatcagatttatcgcctattatgcagtaacagtcaataaaatgtacttatgggggggaattactcaattattctatcagaacctattataaagactgtatttcccatagacgtttacagcaactatgtttaaaaaacaaaaacaaaaaaaaaacacacaaacctaagtagaatacattattttgcatgaaggaatgtcatttctgagctttttacacctaaaattaggctgaaatagctgagataattaatttggaacctatcaatttgagtggactttttctttagtagtacaccattttggttgttgtagtttcaaagtctttctgaagcagatatattgggattggagcggggtggggaaaactgtcactcctttcagaggaaaaggggaggagcatggagaaaaacaaaaattaaaggacttaaagaatggctatacagtgttgagtgttgaggatattaaacatgttatttttcaaacgtatgtaatatatattaaatttataaagcaaatttatgttgtgatcttgcctgaacaaattatattttaatgaaaaaactttctattaatagttcacgcaagagaaaacactttcaacatagtcgaaggcttcaagatctaagtgtatcagacttagggaaaaagtggcacaaccttcgatttaaaattctagtctttaaaatgagtttgtaaataattagctattacgttctattaagttgttttatattttaattttctggaagacaattttattttacaacgtgaacccaaataaagtaacttctgtatttaaaagtctttctgtattttaagacttgtgcaaccagatgttacccttttatcattaaaactttttaaaatcattttttctcacagtaaacataaaaaaaaacccagtcaagtagaaaattttaccatgtaatatatgtataaaaaacacaaagcactcctttataatagtcatcaatgtacatttattgaggaaaccataatgaatacaaaattacagcaatcatgtgaccttttacatacaatgtcattaaagcaaactctaaaccac

SEQ ID NO: 286806 - DNA, 1671 bp, Homo sapiens
cccagcggctggagcagaagtgttagcggccagagctcccagacccctacccacagccaggcgggacgcgcacagtccctccacgcggaaagaagtaccttcgccggtcaccggctcctgcagggtgcaaatatatacagagcttcataatcagcccaagaccacatagagcaaacatgaatgatatttcccaaaaggctgagattctgctttcttcatctaaacctgtcccaaaaacctatgtaccaaaacttggcaagggtgatgtaaaggataagtttgaagccatgcagagagccagggaagaaagaaatcaaaggagatctagagacgaaaaacaaagaagaaaagaacaatatattagagagagagaatggaacaggagaaagcaggagattaaagaaatgcttgcttctgatgatgaggaagatgtatcttctaaagtagaaaaggcttatgttccaaaattaacaggaactgtgaagggtagatttgctgaaatggagaaacaaagacaagaggaacaaaggaagagaacggaggaggaacgaaaacgcagaattgagcaggatatgttagaaaagaggaaaatacagcgtgaattagcaaaaagggctgaacagattgaggacataaacaatacgggaactgaatcagcatcagaggaaggagatgattcactacttataactgtggtacctgtcaaatcatataaaacatctggaaaaatgaaaaagaattttgaggatctagaaaaagaacgtgaagagaaagaaaggatcaagtacgaggaagataaaagaataagatatgaagaacaacgaccatctctcaaggaagcaaagtgtctttcattagttatggatgatgaaatagaaagtgaagcaaaaaaagaatcactttctcccggaaaattgaaactaacttttgaagaactggagcgacaaagacaagaaaaccgaaagaagcaagctgaagaggaagcaagaaaacgtttagaagaagagaagcgtgcttttgaagaagcaaggcggcaaatggtaaatgaagatgaggaaaaccaagacacagcaaaaatttttaaagggtaccgccctggtaaactcaaactcagttttgaagaaatggaaaggcaaagaagagaagatgaaaaaaggaaagcagaagaagaagccagaaggagaatagaggaagaaaagaaggcgtttgctgaagcaaggagaaatatggtagtagatgatgactccccagagatgtataagacaatctctcaagaatttcttacaccgggaaaactggaaattaattttgaagaattattaaaacaaaaaatggaagaagaaaaacgacgaacagaggaggaacggaagcataagctagaaatggagaaacaagaatttgaacaactgagacaggaaatgggagaggaagaggaagaaaatgaaacctttggattgagcagagaatatgaagaactgatcaaattaaaaaggagtggctctattcaagctaaaaacctaaaaagcaagtttgaaaaaattggacagttgtctgaaaaagaaatacagaaaaaaatagaagaagagcgagcaagaaggagagcaattgaccttgaaattaaagagcgagaagctgaaaattttcatgaggtatattacctttatatttaac

SEQ ID NO: 286807 - DNA, 1467 bp, Homo sapiens
cccagcggctggagcagaagtgttagcggccagagctcccagacccctacccacagccaggcgggacgcgcacagtccctccacgcggaaagaagtaccttcgccggtcaccggctcctgcagggtgcaaatatatacagagcttcataatcagcccaagaccacatagagcaaacatgaatgatatttcccaaaaggctgagattctgctttcttcatctaaacctgtcccaaaaacctatgtaccaaaacttggcaagggtgatgtaaaggataagtttgaagccatgcagagagccagggaagaaagaaatcaaaggagatctagagacgaaaaacaaagaagaaaagaacaatatattagagagagagaatggaacaggagaaagcaggagattaaagaaatgcttgcttctgatgatgaggaagatgtatcttctaaagtagaaaaggcttatgttccaaaattaacaggaactgtgaagggtagatttgctgaaatggagaaacaaagacaagaggaacaaaggaagagaacggaggaggaacgaaaacgcagaattgagcaggatatgttagaaaagaggaaaatacagcgtgaattagcaaaaagggctgaacaggaaggagatgattcactacttataactgtggtacctgtcaaatcatataaaacatctggaaaaatgaaaaagaattttgaggatctagaaaaagaacgtgaagagaaagaaaggatcaagtacgaggaagataaaagaataagatatgaagaacaacgaccatctctcaaggaagcaaagtgtctttcattagttatggatgatgaaatagaaagtgaagcaaaaaaagaatcactttctcccggaaaattgaaactaacttttgaagaactggagcgacaaagacaagaaaaccgaaagaagcaagctgaagaggaagcaagaaaacgtttagaagaagagaagcgtgcttttgaagaagcaaggcggcaaatggtaaatgaagatgaggaaaaccaagacacagcaaaaatttttaaagggtaccgccctggtaaactcaaactcagttttgaagaaatggaaaggcaaagaagagaagatgaaaaaaggaaagcagaagaagaagccagaaggagaatagaggaagaaaagaaggcgtttgctgaagcaaggagaaatatggtaagacagaagctaactggagaatgctattagaattcacctttgagaatatgttaatagaatcattagactttagagaataccctattatttctggaaactgtgccaagagtagaaatggcaaatatgttttaaagtctcccatggaataacaccagttggttgaaggtatttgcttcaatttagtgttcagaagattctgctttaaattgccatgcttggcacaaaggatggaatattatctcccttctctgggaaggcatgttttccagaactaagg

SEQ ID NO: 286808 - DNA, 1027 bp, Homo sapiens
cccagcggctggagcagaagtgttagcggccagagctcccagacccctacccacagccaggcgggacgcgcacagtccctccacgcggaaagaagtaccttcgccggtcaccggctcctgcagggtgcaaatatatacagagcttcataatcagcccaagaccacatagagcaaacatgaatgatatttcccaaaaggctgagattctgctttcttcatctaaacctgtcccaaaaacctatgtaccaaaacttggcaagggtgatgtaaaggataagtttgaagccatgcagagagccagggaagaaagaaatcaaaggagatctagagacgaaaaacaaagaagaaaagaacaatatattagagagagagaatggaacaggagaaagcaggagattaaagaaatgcttgcttctgatgatgaggaagatgtatcttctaaagtagaaaaggcttatgttccaaaattaacaggaactgtgaagggtagatttgctgaaatggagaaacaaagacaagaggaacaaaggaagagaacggaggaggaacgaaaacgcagaattgagcaggatatgttagaaaagaggaaaatacagcgtgaattagcaaaaagggctgaacaggaaggagatgattcactacttataactgtggtacctgtcaaatcatataaaacatctggaaaaatgaaaaagaattttgaggatctagaaaaagaacgtgaagagaaagaaaggatcaagtacgaggaagataaaagaataagatatgaagaacaacgaccatctctcaaggaagcaaagtgtctttcattagttatggatgatgaaatagaaagtgaagcaaaaaaagaatcactttctcccggaaaattgaaactaacttttgaagaactggagcgacaaagacaagaaaaccgaaagaagcaagctgaagaggaagcaagaaaacgtttagaagaagagaagcgtgcttttgaagaagcaaggcggcaaatggaagttgaggatggtccgcacaggggtac

SEQ ID NO: 286809 - DNA, 176 bp, Homo sapiens
cataataacattgatgacagtgtaatgaaattcacctatgatggaggtaaagtcccatgaaacccaattttgattaagaagaaataggctaattatctattttataaaataggaaggagatgattcactacttataactgtggtacctgtcaaatcatataaaacatctggaaaaa

SEQ ID NO: 286810 - DNA, 237 bp, Homo sapiens
tcacattaaccacatttcacattaactataactaaaatacttttctgtatttgtaacctaatttaaactctgcatataatgtgatttagtctaatttttggacatgtgctcacattaatttatttaaccatctagattaaagaaatgcttgcttctgatgatgaggaagatgtatcttctaaagtagaaaaggcttatgttccaaaattaacaggtaagaagcttgaggggtaaata

SEQ ID NO: 286811 - DNA, 1010 bp, Homo sapiens
ttccccagggaaaaacagagattggcacaatctttgtaaatatctggcagtctttattgaaagcctgaacaatgttcatacctttggctgtggtcatttcgctcttagaaatatagcctaaagtacaattgcaaccaagatgaatgtgccagagacgttcagcacagtggtattgcagcatcaaactggaaataaactgaatatcaaaagggaacaattaaatcaagcgtagcttgaagaagctacatgtctaaggtgtatatgaaacataagtgaatttcttgtcagatcctcaaattatcttattatatatttatgagtattccaaaatccaaaaaagaaaaatccgaaatccaaaacacttttggtccccagcattttggataagggattctttccctgtaatagacacatagacggactgggaaaaagtaaaccaaaatgttaataacaagagttacttctggaaagtaggcctgcaggtgatttttattatctactctatttactgatgtattttccaaaatttctgtaatgaaaattatttttagaactagtaaaatccataaaagaaggcagtgatatagtaaagaagcactctcagctgggtgcagtggtcgtaaactttcttaaaaccttatgaaattgttttgcgatttttttttagctcatgagctatttttagtgtttgtgtattttatgtgtagtccaagacaattcttcttccaatgtggcccagggaagccaagagattggacacccctgcactatatttactgaatgtgtttgtgaaggctgtgcatctgaatgtcagacttgctaatgaaaaattaaatggagtccatgttttgggtacggccctaggccaaccacccacagccatgtaaggcatttaaaatacattgatttctcccttgagttcaggagttggagactgcaatgagctatgatggcaccactacactccaccctgggtgacagagcaagaccctgtctctcttaaaaacaac

SEQ ID NO: 286812 - DNA, 743 bp, Homo sapiens
gcgttgattctagggtcagggccctcactcacactgctggaaggttaaagtcgacttcacgctagtttaaggaaatatctgacgctgataaccatgtcccaagcactgctctaagttcccaatgtgtccggaattggtgggttcttggtctcactgacttcaagaatgaagccacggaccctcgcgttttagactatgctaaaaacagcctcaggaccttcagcactgatcaacaatcctgggcatgggctgaccgacagttttcacccagagagtgaagatcatggaggagccatcttaaattccgcccagcgcaggctcccaggaatcctaatgtcacgatctcactgcagccaatgtgacaaacacagcagtaattaagtctagagagctaaacacacctcaaaaagaattgtctcttggtatgagtggaatggaataaaatacatggaaacccaaaaaaaaaaaaaaaaaaaaaaaaactttgggggcggccctggagcccctggaaaaaaagttttccgagaacaaatcggtgtgggggggcggcggggccccaagtgggttcacgtggcaccggggccagaccgggctcccaagagaaccggtgcgcatgcaacaggggcgcggtgtcccccccatataaaaaaggccgcggggaacagcaggggttcggacacaattccgagaggggtcgaggccagaggatcctacagagggccccaggagacgaattaagccgg

SEQ ID NO: 286813 - DNA, 2022 bp, Homo sapiens
ctggcagttggcgcccatggagccagagctgctggttcggaaggtgtctgcattgcaggcctgcgtccggggcttcttggtccgacgccagttccagagcctgcgagctgagtatgaggcgattgtacgagaggtcgagggcgacctgggcacgcttcagtggaccgagggccgcattcccaggccgcgattcctcccagagaaggcaaaatcccatcagacctggaaagcaggagacagggtagcaaatccagagcaggggctgtggaaccacttcccatgtgaagagtctgagggagaggccacctgggaggagatggtgctgaagaagtcaggagagagctcagcaaatcaaggaagcctctgcagagatcacagctcctggcttcagatgaagcagaacaggaaacccagccaagagaagaccagagacacgacaaggatggagaatccagaagccacagatcaaagactgccccacagccaacctcagcttcaagagcttcagtaccaccgcagccacttggccatggaattgctgtggctgcaacaggccatcaatagccgtaaggagtacctacttcttaaacaaacactgagatccccagaggcgggcccgatcagagaggaaccccgcgtgttcctagaacatggggaacaggcctgtgagagggaccagtcacaaccaagcgcaccactggaggaccagtcctacagagacaggaccactggagagctagaacaggaggatgactcctgtcacagggtcaaatcaccccacagatccccaggaagtttggccactacacaaaaaaacattgctggggctaagtgcagagaaccatgctacagcaagtctggaccaccgtcgtctataccatcaaacagccaggccttgggggacaggctcaccaaagggccagacgatggaagacagacctttggagggacctgcctgctgcagatgaaaatcctggaggaccagacccccagaggtttaaaacctaggaaccattgtcccaggaagtccaggacacagctgtctgcactctatgaggactcaaatattaaggagatgtctcccagaaaactagaccacaaagagcctgactgccgaacagtcaggacacaagagttgggcctctcagaggaccacatcatctgggatggtaccttgggggggccagagcatagtgtcctcgatctctggaggactaaaccacccaaaggccaggcccccactgatagaagctccagagatggaacctccaatgagcctagtcatgaaggacagaaaaagcagaggactataccatggagatcaaagtcacctgagattctgtcttctacaaaggcaggctgtacaggagaggaacagtggaggggcaggccatggaaaacagaaccacctggctagaccctaggaagccaggagaggatcaggttccaaaggggaatgctatgaaagggcagtgagacaagacctcatcctacctccctgaccagctctggcttctgctcctgcccctggccattggtgactagtggggccaagagaagctggagcagagagctggcatgagtatagggaaggaggaaggacacattttcaatcctctgcctgtagctcaatccaaatttgtggataaggggccgggtgcagtggctcacacctgtaatcccagcactttgggaggccaaggtgagtggatcacctgaggtcagaagtttgagaccagcctgaccaacatggtgaaatgaaaccccatctcaactaaaaatataaaaattagccaggcgtggtggtgcatgcctgtagtcccagttactcgggaggctgagacaggagaatcgcttgaacccaggagatggagattgcagtaggccaagatgatgccactgcactccagcctgggctacagagcgagacacggtctcaaaaaacaaatgtgtggctaaggagttacctgggggaagtagaatgagaggtctgttgggaataaaggtttttcttagattctg

SEQ ID NO: 286814 - DNA, 1993 bp, Homo sapiens
ctggcagttggcgcccatggagccagagctgctggttcggaaggtgtctgcattgcaggcctgcgtccggggcttcttggtccgacgccagttccagagcctgcgagctgagtatgaggcgattgtacgagaggtcgaggggccgcattcccaggccgcgattcctcccagagaaggcaaaatcccatcagacctggaaagcaggagacagggtagcaaatccagagcaggggctgtggaaccacttcccatgtgaagagtctgagggagaggccacctgggaggagatggtgctgaagaagtcaggagagagctcagcaaatcaaggaagcctctgcagagatcacagctcctggcttcagatgaagcagaacaggaaacccagccaagagaagaccagagacacgacaaggatggagaatccagaagccacagatcaaagactgccccacagccaacctcagcttcaagagcttcagtaccaccgcagccacttggccatggaattgctgtggctgcaacaggccatcaatagccgtaaggagtacctacttcttaaacaaacactgagatccccagaggcgggcccgatcagagaggaaccccgcgtgttcctagaacatggggaacaggcctgtgagagggaccagtcacaaccaagcgcaccactggaggaccagtcctacagagacaggaccactggagagctagaacaggaggatgactcctgtcacagggtcaaatcaccccacagatccccaggaagtttggccactacacaaaaaaacattgctggggctaagtgcagagaaccatgctacagcaagtctggaccaccgtcgtctataccatcaaacagccaggccttgggggacaggctcaccaaagggccagacgatggaagacagacctttggagggacctgcctgctgcagatgaaaatcctggaggaccagacccccagaggtttaaaacctaggaaccattgtcccaggaagtccaggacacagctgtctgcactctatgaggactcaaatattaaggagatgtctcccagaaaactagaccacaaagagcctgactgccgaacagtcaggacacaagagttgggcctctcagaggaccacatcatctgggatggtaccttgggggggccagagcatagtgtcctcgatctctggaggactaaaccacccaaaggccaggcccccactgatagaagctccagagatggaacctccaatgagcctagtcatgaaggacagaaaaagcagaggactataccatggagatcaaagtcacctgagattctgtcttctacaaaggcaggctgtacaggagaggaacagtggaggggcaggccatggaaaacagaaccacctggctagaccctaggaagccaggagaggatcaggttccaaaggggaatgctatgaaagggcagtgagacaagacctcatcctacctccctgaccagctctggcttctgctcctgcccctggccattggtgactagtggggccaagagaagctggagcagagagctggcatgagtatagggaaggaggaaggacacattttcaatcctctgcctgtagctcaatccaaatttgtggataaggggccgggtgcagtggctcacacctgtaatcccagcactttgggaggccaaggtgagtggatcacctgaggtcagaagtttgagaccagcctgaccaacatggtgaaatgaaaccccatctcaactaaaaatataaaaattagccaggcgtggtggtgcatgcctgtagtcccagttactcgggaggctgagacaggagaatcgcttgaacccaggagatggagattgcagtaggccaagatgatgccactgcactccagcctgggctacagagcgagacacggtctcaaaaaacaaatgtgtggctaaggagttacctgggggaagtagaatgagaggtctgttgggaataaaggtttttcttagattctg

SEQ ID NO: 286815 - DNA, 2427 bp, Homo sapiens
  misc_feature (1902)..(1902): n is a, c, g, or t
ccctaaatcaacacatattcctaggatgtgggaacatatgcaatacttaaatgcacaggctctgggttcagactccctagggttaaattctccctgtgccggctagctgcatgattagatttgtgatcttgacaaagttacctaacgtctctgggcctcacttttctcatctgcaaaatagggaaaatagcaacacttctccataggggtgtggtgaggataaagagtagatgtaaataaagtgttgaatgtagagcctggcacatatcaagctcttaaaaagcaatggccattttgttatttttaccgcaacgacaactgcagttattatctggcttcagagctctctttttaaaaacagtattccctggttttacacccaggtgctaatactattctatgaagctaatgtatagagaccatatctttttaacaaacgtgtatatatgagtcatttccggcacatttgatacacatcatctcgtttggtccttaaaacaagcctaggccataagcagggtacgtgttaccactttgccattcctgttttacagaggcttagacacattgagaagcttttccatagtcacttaacaagtgatgggtgaagccaaatcaagcctttagatctccaagctctttccattaaaccatataaatcacgggttggcaaactttttctgcaaaggggacagatagtaaatagtttaagccttatgggccacatgctgtgtctgtttcatattctgctccttttttatttttattttttttaagaaaagacaccctttaaacatataaaaaccattctgagcaacaggctggtgctaaaaacaggtcatggtaaccattggctctagggttgtagtttactgttgatatagattgtacactgataagccaaaatacaaacctaatgaaactgacatacttaaggaactttactctttgttagcaatcattgttaatatttattgaatggtgactacgtgggaaatgctgttccaagtgtgatagatatattaacttacttaatcctcacacccactctaatttcctaagtactattgtcagactcattttacagacaggaaaagcaaggcatagagaaggtaagtaacttttccgaggtcacatggctattaagtagcagagctgtgattcaaatataagcggtttggcaccagatcctgtgcacttaaccgcttgcatctcggttgggagcactgactggttcagctattgggagggaagaaaggggatggggaagccacataacccctaggagattctgtaataaatatgcttcagagccattcaccttgaagctgaggaggcatggaagcaggccacctgtgttctgtacagcatcaccaggctggaaatctgccatggctttccttcacgccatcacaagaggatacagatgaggctgcagaggcatcttgatttgagaaaagcatttgactggatctcattaaattttaatcattaactgaattcaaaataaattgaaaactggttgacagagcaccaacaaagggtgatgataaatggtgatgcatctagaggggagctatcttccaggggacaactctaaggcaaggacggatgggatttaatgaaggtgttatgtccccagaagaagacaaatagcacagcaaggaacagaggaaggacaggagtgagcagcctgagtaattaataaaccatattaacagctcctccataatcaggccttggtgatcacaactgcttggattttttcttaagctttctttgagtcaggaataggtttgaagcgtcctagagacacacagcatgaatatttcaggtggacattaaaaagaaatctataaatttacagctgggaggatcctgagatctacttcggatcagaanctttcaattacaagattcccaaggccttacttcattccccagagagtaatctttttaataaatgtccaaaagtcatggatttaaaaaaaaatctttaaactcattaatgtcctttgtttcctgcccaaatgcatgcaaactttcataacactggtttgctgagtggaaggttggttttgagtgaactgtttggctcagattcaaactccaatgaacaaatacttccaagtttacttgctgaatttcccatacagagaagttcttccactgggcttgccagaggatttgaaacagtggtgagccctggaaggaagggaatatttactggcccttggacataaacccagcacagtaagactcacatcaggctgaaggcagtgcagtatgaaccgacctgatttgaggaagtttgctctgggactcctctgagctactaaatgaggaggagaaggactaatgggaacacactgactccatcacattagaagttataataaacatttagagaacaacctcaaaaaagcc

SEQ ID NO: 286816 - DNA, 345 bp, Homo sapiens
tgacaaaggtggtatacctttctagccctgaaggagagggaatctcactcctgagctgggtttcaggagctaagcctagagggacccaacccactcttctgggcacctgagagtcacttgtagcaatttgatgccccatcagcactaatattcctcttattaagatctctgaccgggagccactgcgcccggcctccccaaggagcacttttacagccaaacccacctctctcagctctcactcctgcttatatccctgcaacccaggagactgttttctatttgtaaaattttgccatttcaagacagttgtattaatgaaatcactgtgtgtgtcaaaaaaaa

SEQ ID NO: 286817 - DNA, 585 bp, Homo sapiens
taaactttatttatgtacttattttgagatggggtcttgctgttttgcccaggctggtcttgaattcctgggcttaagccaaccttcctgtctcagcctccagagtagctgggattacaggcatgcagcaccatgcccagcttcaaaactaagattatttctacccaactggactgctttaagagccatgttttcaatgattcaaccttatttttacatccactaatggcaaattctgaaagaataaaaacccaccctccagggcactggtgtgaatggagggccctttgtggaatcccttcctctaaaaaggcagttgaaggaaactgccagagccacagcagctgtatggaagggaaagctatcaggggagttcgtctttgatcattagacgggaaaaactcatcatcaatactacctttcccttccctactacttttctatattagctaaattccattttgaaaacaaagtatttccaaaatatcaatcttggcctaaggtcaaatagaaacataatacatttttttcttctggggtggggaaaaaagtgaaattttactataataaacccaagcataaagc

SEQ ID NO: 286818 - DNA, 567 bp, Homo sapiens
gtgaaagccaccgttgcccggggatgggtccctgacacttggcgaagtaggagccctgtgtgatcgtgcgtctgagtctgggctgagaccagtcctggccagggcagttaccaggacggtctccggaggccgggattcgcggagggtccagcagcaggaagaaaccccaggaggaagaaacctcagacagatcgccggcgaggcagcgcgggatcccagcctcaggcgtgcgcggacggtgtgcggcgcacacaaccaagcttaggagccgactgttaagatgccccagtgacacggacaagtttctcctctgcaacccaatgagagctgctgaccacgagagcatcgcgggaccgccaaaggattctggaaaatgtggtcccgggtggccagtgtgcgctgaccttcacctgaaggtacggcttgaaggaaacttctggagggtggggtggtgttgaagagaaggcacaattgtcaccattttgttcaacatgggcgttttctttgtgcattgatttgcatttttaaaggtattccattaaaaatatgtttatctattttaaaaaa

SEQ ID NO: 286819 - DNA, 601 bp, Homo sapiens
gactcacagactgcagatgcacgctgcggatccagaagccggtcaggtaatgaggtgcagaggtgtggggaagacctgggtgcttccctgggtgccaaccagcctaaccagccggggccaccaaacagaagtgcttctgacattaacgcgacacacagaaggtgtgtagggtgggtagtggaagtgaccgcagaggcctctggggattgtagttttggagctagagaggcgggcaagcagttggcttcgcccacacggtgtgcctctcacatctgcacagcgcacacaaccaagcttaggagccgactgttaagatgccccagtgacacggacaagtttctcctctgcaacccaatgagagctgctgaccacgagagcatcgcgggaccgccaaaggattctggaaaatgtggtcccgggtggccagtgtgcgctgaccttcacctgaaggtacggcttgaaggaaacttctggagggtggggtggtgttgaagagaaggcacaattgtcaccattttgttcaacatgggcgttttctttgtgcattgatttgcatttttaaaggtattccattaaaaatatgtttatctattttaaaaaa

SEQ ID NO: 286820 - DNA, 935 bp, Homo sapiens
cgccgccgccgccgccgcaacctccagcaccgccgccccaggccccgcagccgccgcgtcgccgccattttttaaagggtccgcagcctgactctgcggagtaagggggggtggagcgggggagtcggcctcgccagcgcgcatgcgcgaggcccgagccgccgcttgggccacagtgaaagccaccgttgcccggggatgggtccctgacacttggggaagtaggagccctgtgtgatcgtgcgtctgagtctgggctgagaccagtcctggccagggcagttaccaggacggtctccggaggccgggattcgcggagggtccagcagcaggaagaaaccccaggaggaagaaacctcagacagatcgccggcgaggcagcgcgggatcccagcctcaggcgtgcgcggacggtgtgcgggtgagtctccccaaaagtggagcccttgtgatgacgagcacaggtccgcctgtgtgcccgtgggctgctctctcaccggtggctcgtagtcgcgtaaagcagaagtagcagtttcagcggctgacactaagaacaatgcatactggcaaagtgaggtgtctcacatttttaatcccagcaatttgggaggctgaggcggatggatcacttgaggtcaggggatcacaccagcctaaccaacatgatgaaactccgcgtctactaaaaaaaagtaccagacatttagcgcggtgtggtggcatatgcctgtaaatcccagctatttgggaggctgaggcaggagaatcggttgaaccagtgtggccgaggttgcagtgagtgtagattgcaccactgcactctagcctgggtaacaagcacaaaactctgtctcaaaaaaaaaaaaaaattatcagtgcagagttaggccagattcattttcagagtaggagggaatttcaaattatgggtgaaa

SEQ ID NO: 286821 - DNA, 397 bp, Homo sapiens
gtgaaagccaccgttgcccggggatgggtccctgacacttggcgaagtaggagccctgtgtgatcgtgcgtctgagtctgggctgagaccagtcctggccagggcagttaccaggacggtctccggaggccgggattcgcggagggtccagcagcaggaagaaaccccaggaggaagaaacctcagacagatcgccggcgaggcagcgcgggatcccagcctcaggcgtgcgcggacggtgtgcgggtacggcttgaaggaaacttctggagggtggggtggtgttgaagagaaggcacaattgtcaccattttgttcaacatgggcgttttctttgtgcattgatttgcatttttaaaggtattccattaaaaatatgtttatctattttaaaaaa

SEQ ID NO: 286822 - DNA, 1024 bp, Homo sapiens
tttttttttaaagagatgggatcttgctttgttacccaagctggtcttgaactcctggcctgaagcagtcccgctgccttggccttctaaagcactgggattacatatgttagccattgcacccagccagcttttaaaaaaaacattacagccttaggattttgccttcctattggctttttagatcaatcagaatacttacttcccagccatagttttaaggctgtctcatggtgttaaatccatcatactgttttgttaactttcattcaaatcacccaaaagttattaggccttgggcttaagaaatggacaattggttaatagtttgatttccgcccgcccccccgccccgccctccacaggttttctttaggaatttctcataactatttattgtatccataaggattgcaaggtctcttggatcaggttgtcaccaggctggagtgcattggtacagtcacggttcactgcagcctccacctcctgggctcaagggatcctcctatctcagcctcccaagtagctgggtctacaggtatactctaccaccccagcttaatcatttttaatattgcgttttcttgggggtaagggaaataaggagttaaatgtaaaacagttttacttataaaaggctaagaatatttggtaagaacttggaataatcaaggaagcaaaacaaagtagattttataattttgctggatagttttttttgttttttgtttttttttcttttttggagatggagtctcactctgtcacccaggctggagtacagtggtgtgatcttggcttactgcaggctccacctcctgggttcaagcaattctcctgcctcagcctcccaagtagctgggattacaggtgtgcaccaccacacctggctaattttttatctttttagtagagacggggtttcgccacgttggccaggctggtcttgaactcctgacctcaggtgatccaccctcctcagcctcccaaattgctgggattacaggcatgagccactgcg

SEQ ID NO: 286823 - DNA, 621 bp, Homo sapiens
tttttttttaaagagatgggatcttgctttgttacccaagctggtcttgaactcctggcctgaagcagtcccgctgccttggccttctaaagcactgggattacatatgttagccattgcacccagccagcttttaaaaaaaacattacagccttaggattttgccttcctattggctttttagatcaatcagaatacttacttcccagccatagttttaaggctgtctcatggtgttaaatccatcatactgttttgttaactttcattcaaatcacccaaaagttattaggccttgggcttaagaaatggacaattggttaatagtttgatttccgcccgcccccccgccccgccctccacaggttttctttaggaatttctcataactatttattgtatccataaggattgcaaggtctcttggatcaggtaagacctttagattgcctcttctttaaaggaggctttcttgaatacctttccctgaggttggataggcactgctccccttctctgtgcccctggctcccacatctaatgttctcctggcacttacgacactctcattcaaattttctagccatgcaccttaagccccagccccacacctgggaaaca

SEQ ID NO: 286824 - DNA, 1989 bp, Homo sapiens
  misc_feature (1619)..(1620): n is a, c, g, or t
cacctggagggaaaacaacacacattgcagcactaatgcatgatcagggagaagttatagcactggataaaatcttcaacaaagtagaaaaaatcaaacagaatgccttattgttagggctgaattccatcagggcattttgttttgatggaacaaaggcggttaaacttgatatggtggaggacacagaaggagaacctccatttctaccagaatcctttgaccgaattcttctggatgcaccctgtagtggaatgggacagagaccaaacatggcctgtacttggtctgtgaaggaagtggcatcatatcagccattacagcgaaaactcttcactgcagcggttcagctgctgaagccagagggtgtgctggtttatagcacgtgcactataacactggccgaaaatgaagaacaggttgcctgggccctgacaaaatttccttgccttcagcttcagccccaggaaccgcagattggaggagaaggaatgaggggagctgggctctcatgtgaacagttgaaacagctgcagcgatttgatccatcggctgtgccattaccggacactgacatggactctcttagagaggccagaagagaagacatgttgcgtctggctaataaggactctataggtttttttattgcaaaatttgtaaaatgcaaaagcacataggagagggatggatgctcagaaatgaaaattccaaacatttgctgtctgtggtttttttttttttaaccaaagtgttgtcaggccaactgaatgatgatgtggttgctatggaaacagaaaaggctgccagctgttttaccagggatccagagacatagaggaagtagggggtggtatgagattatattttctgtttttaaaagattttttttttttatgtatttagtagagtataaagaaaagcagatgcctatagatgtctggagcatattttcatttgtgatctaatgttttaatttgtaaagtgtacaagtcatttttaatgttaaaaattagtgaatctaacaaaaggaataaattagcaatatttgatgtggttatgaaaagttgtttttgtttctaggttcctagtttcttaaggattcagggcatgggaagtaaaacattgactatgtgccaataatggaggttgtcaccaggctggagtgcattggtacagtcacggttcactgcagcctccacctcctgggctcaagggatcctcctatctcagcctcccaagtagctgggtctacagaacagaaactttggttataagaagcacttctgggttctgacagacagtgaacctgctggagtcggtggtggggaggaatggttcttcttcagcttgggaagcagaacggataggagcggagcgatcagtcctctgatcaccttgagaaccctggcagcgaaaggagcacaccaggcgttaaccaagactatggaaatgatgtcagacaaaaagcgaatttgagtgactttcttattcgagttcaaaatgggtcgtaaagcagtggagacaacttgcaatatcaacaatgcatttggcccaggaactgctaatgaacgtacagtgcggtggtggttcacgaagctttgcaaaggagacgaggnncttgaagatgaggagcatagtggctgaccattggaagttgacagcgactactcaagaacaataatcaaagctgattctcttacaactacacgagaagttgctgaagaattcaacattgaccattctatggtctttctacatttgaagcaaatcggaaaggtgaaaaaactcaataagtaggtgcctcatgagccaagcaaaaataaattgttgtttggaagcatcttctcttattctgtgcaacaacaatgaaccatttctcagtcggattgtgacgtgggacgaaaattggattttatatgacaaccactgacaaccagctcagctgttggactgagaagctccaaagccaaacttgcaccaaaaaaa

SEQ ID NO: 286825 - DNA, 1738 bp, Homo sapiens
  misc_feature (32)..(32): n is a, c, g, or t
  misc_feature (1368)..(1369): n is a, c, g, or t
cagagaagattagcatggcccctgcgcaaggntgacacgcaaattcgtgaagcgttccatatttttttacagcgaaaactcttcactgcagcggttcagctgctgaagccagagggtgtgctggtttatagcacgtgcactataacactggccgaaaatgaagaacaggttgcctgggccctgacaaaatttccttgccttcagcttcagccccaggaaccgcagattggaggagaaggaatgaggggagctgggctctcatgtgaacagttgaaacagctgcagcgatttgatccatcggctgtgccattaccggacactgacatggactctcttagagaggccagaagagaagacatgttgcgtctggctaataaggactctataggtttttttattgcaaaatttgtaaaatgcaaaagcacataggagagggatggatgctcagaaatgaaaattccaaacatttgctgtctgtggtttttttttttttaaccaaagtgttgtcaggccaactgaatgatgatgtggttgctatggaaacagaaaaggctgccagctgttttaccagggatccagagacatagaggaagtagggggtggtatgagattatattttctgtttttaaaagattttttttttttatgtatttagtagagtataaagaaaagcagatgcctatagatgtctggagcatattttcatttgtgatctaatgttttaatttgtaaagtgtacaagtcatttttaatgttaaaaattagtgaatctaacaaaaggaataaattagcaatatttgatgtggttatgaaaagttgtttttgtttctaggttcctagtttcttaaggattcagggcatgggaagtaaaacattgactatgtgccaataatggaggttgtcaccaggctggagtgcattggtacagtcacggttcactgcagcctccacctcctgggctcaagggatcctcctatctcagcctcccaagtagctgggtctacagaacagaaactttggttataagaagcacttctgggttctgacagacagtgaacctgctggagtcggtggtggggaggaatggttcttcttcagcttgggaagcagaacggataggagcggagcgatcagtcctctgatcaccttgagaaccctggcagcgaaaggagcacaccaggcgttaaccaagactatggaaatgatgtcagacaaaaagcgaatttgagtgactttcttattcgagttcaaaatgggtcgtaaagcagtggagacaacttgcaatatcaacaatgcatttggcccaggaactgctaatgaacgtacagtgcggtggtggttcacgaagctttgcaaaggagacgaggnncttgaagatgaggagcatagtggctgaccattggaagttgacagcgactactcaagaacaataatcaaagctgattctcttacaactacacgagaagttgctgaagaattcaacattgaccattctatggtctttctacatttgaagcaaatcggaaaggtgaaaaaactcaataagtaggtgcctcatgagccaagcaaaaataaattgttgtttggaagcatcttctcttattctgtgcaacaacaatgaaccatttctcagtcggattgtgacgtgggacgaaaattggattttatatgacaaccactgacaaccagctcagctgttggactgagaagctccaaagccaaacttgcaccaaaaaaa

SEQ ID NO: 286826 - DNA, 2094 bp, Homo sapiens
  misc_feature (1724)..(1725): n is a, c, g, or t
cacctggagggaaaacaacacacattgcagcactaatgcatgatcagggagaagttatagcactggataaaatcttcaacaaagtagaaaaaatcaaacagaatgccttattgttagggctgaattccatcagggcattttgttttgatggaacaaaggcggttaaacttgatatggtggaggacacagaaggagaacctccatttctaccagaatcctttgaccgaattcttctggatgcaccctgtagtggaatgggacagagaccaaacatggcctgtacttggtctgtgaaggaagtggcatcatatcagccattacagcgaaaactcttcactgcagtatgtggtggtctgtttttgtgaaacaaagttaacttttgctactttgatgtttaaactactgacagcaatctccatagcagcgttcattacaatagccaaaaggcggttcagctgctgaagccagagggtgtgctggtttatagcacgtgcactataacactggccgaaaatgaagaacaggttgcctgggccctgacaaaatttccttgccttcagcttcagccccaggaaccgcagattggaggagaaggaatgaggggagctgggctctcatgtgaacagttgaaacagctgcagcgatttgatccatcggctgtgccattaccggacactgacatggactctcttagagaggccagaagagaagacatgttgcgtctggctaataaggactctataggtttttttattgcaaaatttgtaaaatgcaaaagcacataggagagggatggatgctcagaaatgaaaattccaaacatttgctgtctgtggtttttttttttttaaccaaagtgttgtcaggccaactgaatgatgatgtggttgctatggaaacagaaaaggctgccagctgttttaccagggatccagagacatagaggaagtagggggtggtatgagattatattttctgtttttaaaagattttttttttttatgtatttagtagagtataaagaaaagcagatgcctatagatgtctggagcatattttcatttgtgatctaatgttttaatttgtaaagtgtacaagtcatttttaatgttaaaaattagtgaatctaacaaaaggaataaattagcaatatttgatgtggttatgaaaagttgtttttgtttctaggttcctagtttcttaaggattcagggcatgggaagtaaaacattgactatgtgccaataatggaggttgtcaccaggctggagtgcattggtacagtcacggttcactgcagcctccacctcctgggctcaagggatcctcctatctcagcctcccaagtagctgggtctacagaacagaaactttggttataagaagcacttctgggttctgacagacagtgaacctgctggagtcggtggtggggaggaatggttcttcttcagcttgggaagcagaacggataggagcggagcgatcagtcctctgatcaccttgagaaccctggcagcgaaaggagcacaccaggcgttaaccaagactatggaaatgatgtcagacaaaaagcgaatttgagtgactttcttattcgagttcaaaatgggtcgtaaagcagtggagacaacttgcaatatcaacaatgcatttggcccaggaactgctaatgaacgtacagtgcggtggtggttcacgaagctttgcaaaggagacgaggnncttgaagatgaggagcatagtggctgaccattggaagttgacagcgactactcaagaacaataatcaaagctgattctcttacaactacacgagaagttgctgaagaattcaacattgaccattctatggtctttctacatttgaagcaaatcggaaaggtgaaaaaactcaataagtaggtgcctcatgagccaagcaaaaataaattgttgtttggaagcatcttctcttattctgtgcaacaacaatgaaccatttctcagtcggattgtgacgtgggacgaaaattggattttatatgacaaccactgacaaccagctcagctgttggactgagaagctccaaagccaaacttgcaccaaaaaaa

SEQ ID NO: 286827 - DNA, 1406 bp, Homo sapiens
cacctggagggaaaacaacacacattgcagcactaatgcatgatcagggagaagttatagcactggataaaatcttcaacaaagtagaaaaaatcaaacagaatgccttattgttagggctgaattccatcagggcattttgttttgatggaacaaaggcggttaaacttgatatggtggaggacacagaaggagaacctccatttctaccagaatcctttgaccgaattcttctggatgcaccctgtagtggaatgggacagagaccaaacatggcctgtacttggtctgtgaaggaagtggcatcatatcagccattacagcgaaaactcttcactgcagcggttcagctgctgaagccagagggtgtgctggtttatagcacgtgcactataacactggccgaaaatgaagaacaggttgcctgggccctgacaaaatttccttgccttcagcttcagccccaggaaccgcagattggaggagaaggaatgaggggagctgggctctcatgtgaacagttgaaacagctgcagcgatttgatccatcggctgtgccattaccggacactgacatggactctcttagagaggccagaagagaagacatgttgcgtctggctaataaggactctataggtttttttattgcaaaatttgtaaaatgcaaaagcacataggagagggatggatgctcagaaatgaaaattccaaacatttgctgtctgtggtttttttttttttaaccaaagtgttgtcaggccaactgaatgatgatgtggttgctatggaaacagaaaaggctgccagctgttttaccagggatccagagacatagaggaagtagggggtggtatgagattatattttctgtttttaaaagattttttttttttatgtatttagtagagtataaagaaaagcagatgcctatagatgtctggagcatattttcatttgtgatctaatgttttaatttgtaaagtgtacaagtcatttttaatgttaaaaattagtgaatctaacaaaaggaataaattagcaatatttgatgtggttatgaaaagttgtttttgtttctaggttcctagtttcttaaggattcagggcatgggaagtaaaacattgactatgtgccaataatggaggtaagtattttacctgactctctgtctgcttatttagtaagtcaaccccctttcaaatgaagtctggacctcctctgaatgatagtgtgaagtgatagtctaaagactatcgtagtctaaatggtagtctatgttcaatgtttttcataattttaaacgaaaaagtaaagttagtattttctttactttgtagatttagaaaatgagattattctacaatttggataacttatcatgtatttgaaacatatcagttat

SEQ ID NO: 286828 - DNA, 284 bp, Homo sapiens
gagaagttatagcactggataaaatcttcaacaaagtagaaaaaatcaaacagaatgccttattgttagggctgaattccatcagggcattttgttttgatggaacaaaggcggttaaacttgatatggtggaggacacagaaggtgagctattttgattttcttatttttaattgacagatcatatatttgtggcatacagtgtgatgttttgacatgtatataattttgtatacaatgtggaatgattaaaacaagctaattaacatatccatcactgtact

SEQ ID NO: 286829 - DNA, 781 bp, Homo sapiens
cggtggcccctcccgcccacgcgccagagtcgcagtgggcgggcctacgtgctccgcccgctgtgagcctgtccggcccccgcccgctccggagcaacccgcgagcttacaccggcttctctctgtcctcagcccgcgcgccgccatcgccgtcatgctgggcgccgctctccgccgctgcgctgtggccgcaaccacccgggccgaccctcgaggcctcctgcactccgcccggacccccggccccgccgtggctatccagtcagttcgctgctattcccatgggtcacaggagacagatgaggagtttgatgctcgctgggtaacatacttcaacaagccagatatagatgcctgggaattgcgtaaagggataaacacacttgttacctatgatatggttccagagcccaaaatcattgatgctgctttgcgggcatgcagacggttaaatgattttgctagtacagttcgtatcctagaggttgttaaggacaaagcaggacctcataaggaaatctacccctatgtcatccaggaacttagaccaactttaaatgaactgggaatctccactccggaggaactgggccttgacaaagtgtaaaccgcatggatgggcttccccaaggatttattgacattgctacttgagtgtgaacagttacctggaaatactgatgataacatattaccttatttgaacaagttttcctttattgagtaccaagccatgtaatggtaacttggactttaataaaagggaaatgagtttgaactg

SEQ ID NO: 286830 - DNA, 947 bp, Homo sapiens
  misc_feature (784)..(784): n is a, c, g, or t
  misc_feature (786)..(786): n is a, c, g, or t
  misc_feature (790)..(790): n is a, c, g, or t
cggtggcccctcccgcccacgcgccagagtcgcagtgggcgggcctacgtgctccgcccgctgtgagcctgtccggcccccgcccgctccggagcaacccgcgagcttacaccggcttctctctgtcctcagcccgcgcgccgccatcgccgtcatgctgggcgccgctctccgccgctgcgctgtggccgcaaccacccgggccgaccctcgaggcctcctgcactccgcccggacccccggccccgccgtggctatccagtcagttcgctgctattcccatgggtcacaggagacagatgaggagtttgatgctcgctgggtaacatacttcaacaagccagatatagatgcctgggaattgcgtaaagggataaacacacttgttacctatgatatggttccagagcccaaaatcattgatgctgctttgcgggcatgcagacggttaaatgattttgctagtacagttcgtatcctagaggttgttaaggacaaagcaggacctcataaggaaatctacccctatgtcatccaggaacttagaccaactttaaatgaactgggaatctccactccggaggaactgggccttgacaaagtgtaaaccgcatggatgggcttccccaaggatttattgacattgctacttgagtgtgaacagttacctggaaatactgatgataacatattaccttatttgaacaagttttcctttattgagtaccaagccatgtaatggtaacttggactttaataaaagggaaatgagtttgaactggcncncacnccccccaccccccaacacacaacacggcggacctaatagaaagacaccataagggggccccaatttacgtctacccgaatattacttacaatctggccccttctgcggaacatatacacccagctagtgcctcccttcaacccttacacggaaaacg

SEQ ID NO: 286831 - DNA, 701 bp, Homo sapiens
ggacgcgtgggtcgacccacgcgtcgcgccgtcatgctgggcgccgctctccgccgctgcgctgtggccgcaaccacccgggccgaccctcgaggcctcctgcactccgcccggacccccggccccgccgtggctatccagtcagttcgctgctattcccatgggtcacaggagacagatgaggagtttgatgctcgctgggtaacatacttcaacaagccagatatagatgcctgggaattgcgtaaagggataaacacacttgttacctatgatatggttccagagcccaaaatcattgatgctgctttgcgggcatgcagacggttaaatgattttgctagtacagttcgtatcctagaggttgttaaggacaaagcaggacctcataaggaaatctacccctatgtcatccaggaacttagaccaactttaaatgaactgggaatctccactccggaggaactgggccttgacaaagtgtaaaccgcatggatgggcttccccaaggatttattgacattgctacttgagtgtgaacagttacctggaaatactgatgataacatattaccttatttgaacaagttttcctttattgagtaccaagccatgtaatggtaacttggactttaataaaagggaaatgagtttgaactgaaaaaaaaaaaaaaacaagcaacccaaaaaaaaaacttcgc

SEQ ID NO: 286832 - DNA, 640 bp, Homo sapiens
  misc_feature (20)..(20): n is a, c, g, or t
gagagagagagagagctcgnccggacccccggccccgccgtggctatccagtcagttcgctgctattcccatgggtcacaggagacagatgaggagtttgatgctcgctgggtaacatacttcaacaagccagatatagatgcctgggaattgcgtaaagggataaacacacttgttacctatgatatggttccagagcccaaaatcattgatgctgctttgcgggcatgcagacggttaaatgattttgctagtacagttcgtatcctagaggttgttaaggacaaagcaggacctcataaggaaatctacccctatgtcatccaggaacttagaccaactttaaatgaactgggaatctccactccggaggaactgggccttgtacgcgtacaaggccccgcagccaccattctgctttctgtctctctggttttgactattctcagtatctcatataagtggaatcatacagtgacttgtctttttgtgactggcttatttcacttagcataatgtcctccaggttcatccatgtcgtgtcaggtgacaggattccttcctgtattatcattttatggatgttccgttctgtgcgtacccactctgtctcctcgtgaacctggttgtcctctgacta

SEQ ID NO: 286833 - DNA, 663 bp, Homo sapiens
cggtggcccctcccgcccacgcgccagagtcgcagtgggcgggcctacgtgctccgcccgctgtgagcctgtccggcccccgcccgctccggagcaacccgcgagcttacaccggcttctctctgtcctcagcccgcgcgccgccatcgccgtcatgctgggcgccgctctccgccgctgcgctgtggccgcaaccacccgggccgaccctcgaggcctcctgcactccgcccggacccccggccccgccgtgggataaacacacttgttacctatgatatggttccagagcccaaaatcattgatgctgctttgcgggcatgcagacggttaaatgattttgctagtacagttcgtatcctagaggttgttaaggacaaagcaggacctcataaggaaatctacccctatgtcatccaggaacttagaccaactttaaatgaactgggaatctccactccggaggaactgggccttgacaaagtgtaaaccgcatggatgggcttccccaaggatttattgacattgctacttgagtgtgaacagttacctggaaatactgatgataacatattaccttatttgaacaagttttcctttattgagtaccaagccatgtaatggtaacttggactttaataaaagggaaatgagtttgaactg

SEQ ID NO: 286834 - DNA, 822 bp, Homo sapiens
cggtggcccctcccgcccacgcgccagagtcgcagtgggcgggcctacgtgctccgcccgctgtgagcctgtccggcccccgcccgctccggagcaacccgcgagcttacaccggcttctctctgtcctcagcccgcgcgccgccatcgccgtcatgctgggcgccgctctccgccgctgcgctgtggccgcaaccacccgggccgaccctcgaggcctcctgcactccgcccggacccccggccccgccgtggctatccagtcagttcgctgctattcccatgggtcacaggagacagatgaggagtttgatgctcgctgggtaacatacttcaacaagccagatatagatgcctgggaattgcgtaaagggataaacacacttgttacctatgatatggttccagagcccaaaatcattgatgctgctttgcgggcatgcagacggttaaatgattttgctagtacagttcgtatcctagaggttgttaaggacaaagcaggacctcataaggaaatctacccctatgtcatccaggaacttagaccaactttaaatgaactgggaatctccactccggaggaactgggccttgacaaagtgtaaaccgcatggatgggcttccccaaggatttattgacattgctacttgagtgtgaacagttacctggaaatactgatgataacatattaccttatttgaacaagttttcctttattgagtaccaagccatgtaatggtaacttggactttaataaaagggaaatgagtttgaactgaaaaaaaaaaaaaaacaagcaacccaaaaaaaaaacttcgc

SEQ ID NO: 286835 - DNA, 570 bp, Homo sapiens
  misc_feature (20)..(20): n is a, c, g, or t
gagagagagagagagctcgnccggacccccggccccgccgtggctatccagtcagttcgctgctattcccatgggtcacaggagacagatgaggagtttgatgctcgctgggtaacatacttcaacaagccagatatagatgcctgggaattgcgtaaagggataaacacacttgttacctatgatatggttccagagcccaaaatcattgatgctgctttgcgggcatgcagacggttaaatgattttgctagtacagttcgtatcctagaggttgttaaggacaaagcaggacctcataaggaaatctacccctatgtcatccaggaacttagaccaactttaaatgaactgggaatctccactccggaggaactgggccttgacaaagtgtaaaccgcatggatgggcttccccaaggatttattgacattgctacttgagtgtgaacagttacctggaaatactgatgataacatattaccttatttgaacaagttttcctttattgagtaccaagccatgtaatggtaacttggactttaataaaagggaaatgagtttgaactg

SEQ ID NO: 286836 - DNA, 678 bp, Homo sapiens
cggtggcccctcccgcccacgcgccagagtcgcagtgggcgggcctacgtgctccgcccgctgtgagcctgtccggcccccgcccgctccggagcaacccgcgagcttacaccggcttctctctgtcctcagcccgcgcgccgccatcgccgtcatgctgggcgccgctctccgccgctgcgctgtggccgcaaccacccgggccgaccctcgaggcctcctgcactccgcccggacccccggccccgccgtggctatccagtcagttcgctgctattcccatgggtcacaggagacagatgaggagtttgatgctcgctgggtaacatacttcaacaagccagatatagatgcctgggaattgcgtaaagggataaacacacttgttacctatgatatggttccagagcccaaaatcattgatgctgctttgcgggcatgcagacggttaaatgattttgctagtacagttcgtatcctagaggttgttaagacaaagtgtaaaccgcatggatgggcttccccaaggatttattgacattgctacttgagtgtgaacagttacctggaaatactgatgataacatattaccttatttgaacaagttttcctttattgagtaccaagccatgtaatggtaacttggactttaataaaagggaaatgagtttgaactg

SEQ ID NO: 286837 - DNA, 508 bp, Homo sapiens
cggtggcccctcccgcccacgcgccagagtcgcagtgggcgggcctacgtgctccgcccgctgtgagcctgtccggcccccgcccgctccggagcaacccgcgagcttacaccggcttctctctgtcctcagcccgcgcgccgccatcgccgtcatgctgggcgccgctctccgccgctgcgctgtggccgcaaccacccgggccgaccctcgaggcctcctgcactccgcccggacccccggccccgccgtggctatccagtcagttcgctgctattcccatgggtcacaggagacagatgaggagtttgatgctcgctgggtaacatacttcaacaagccagatatagatgcctgggaattgcgtaaagggataaacacacttgttacctatgatatggttccagagcccaaaatcattgatgctgctttgcgggcatgcagacggttaaatgattttgctagtcgggggaacggtggggggttccatgacggtcgggggtcccat

SEQ ID NO: 286838 - DNA, 893 bp, Homo sapiens
  misc_feature (730)..(730): n is a, c, g, or t
  misc_feature (732)..(732): n is a, c, g, or t
  misc_feature (736)..(736): n is a, c, g, or t
cggtggcccctcccgcccacgcgccagagtcgcagtgggcgggcctacgtgctccgcccgctgtgagcctgtccggcccccgcccgctccggagcaacccgcgagcttacaccggcttctctctgtcctcagcccgcgcgccgccatcgccgtcatgctgggcgccgctctccgccgctgcgctgtggccgcaaccacccgggccgaccctcgaggcctcctgcactccgcccggacccccggccccgccgtggctatccagtcagttcgctgctattcccatgggtcacaggagacagatgaggagtttgatgctcgctgggtaacatacttcaacaagccagatatagatgcctgggaattgcgtaaagggataaacacacttgttacctatgatatggttccagagcccacagttcgtatcctagaggttgttaaggacaaagcaggacctcataaggaaatctacccctatgtcatccaggaacttagaccaactttaaatgaactgggaatctccactccggaggaactgggccttgacaaagtgtaaaccgcatggatgggcttccccaaggatttattgacattgctacttgagtgtgaacagttacctggaaatactgatgataacatattaccttatttgaacaagttttcctttattgagtaccaagccatgtaatggtaacttggactttaataaaagggaaatgagtttgaactggcncncacnccccccaccccccaacacacaacacggcggacctaatagaaagacaccataagggggccccaatttacgtctacccgaatattacttacaatctggccccttctgcggaacatatacacccagctagtgcctcccttcaacccttacacggaaaacg

SEQ ID NO: 286839 - DNA, 1083 bp, Homo sapiens
acgcgtgggcggacgcgtggggactggattatggacagaacttggaaatattgagaataatttcttaaagccacttcatataggacttaatatgtcaaaagcacattatgaagcagaaattaaaaatagccaagaggcccagaaatctaaagatctttgttctataactgtaagtggagaagagatccctaatatgcctcctgaaatgcagcttaaggtcctgcattcagctcttttcacatttgatttgattgaaagtgttctagctcgagtggaagaactcattgaaataaaaacaaagtctacctctgaagaaaatattgggataaagtgaaagttccatttcctaaataaaaactaataaaatatagtactttccattatgattcatttaatacctttataaaaaatttttctgtaaaaatttactgcttgaaaaataaatgtagcttttctcatttatcaatttctataatgatacactatagaacaggtttttttggttttaaagttatctaatggtaaataatgcccacatatgtcctaaatactacttttgaaaatccaatacaaactaataattttataacttcataaaatgtagctgaattgtctatattcattcctacagttttagtgagcttataaaaatactgatacactttctgctgcagttagatgctatgtaacatttcggaactcctagtgtcaagttggctatcataccagtgtaaagaggccagttgacttttcttagcttctcttttcctggctcaggtggagtctttgggagcagagtcccatcaccacctctccagcagaagttataataggaaaacatctgcaaagattaattttagaaatacttgctacctttatggaaaaaaactaaaaaatatatatgactttaagaaactgattagaaaattctgtatttttatttcctactaaagatttgtccatttaactcactaagaagctacacctgagttttatggtatatgtatgtatcagtcctttgctaaagagcgttaaatcttgcagcgaaactcctaaaataaaatcacttttaattgtaaatgt

SEQ ID NO: 286840 - DNA, 788 bp, Homo sapiens
tttccatcagtaggaaagggaaagcatcctctagaactagatccgtggtgtggatatcaattgaaaggccatacttgggatgaaggcataaataaggtagagtcattgtggagatggctcatagaggaagagacgtctgtgaatttatcctcaaataattttctcataaataaaacttaacaagttaatagatctcaaaacctggagctatccaaatggtgcagtgataagcgtagtgccccaagtacatttttcttttaattggtattcacataactagctatagtaataattattaaatagtgaagtccattgtgaaaagcaagggccatgtttcatttatttttgttttttgagcttttatcgcgtttaatagtaggcaatcaatcattgttgaactaaataactcattctttcattcttaacagactgactggattatggacagaacttggaaatattgagaataatttcttaaagccacttcatataggacttaatatgtcaaaagcacattatgaagcagaaattaaaaatagccaagaggcccagaaatctaaagatctttgttctataactgtaagtggagaagagatccctaatatgcctcctgaaatgcagcttaaggtcctgcattcagctcttttcacatttgatttgattgaaagtgttctagctcgagtggaagaactcattgaaataaaaacaaagtctacctctgaagaaaatattgggataaagtgaaagttccatttcctaaataaaaactaataaaatatagtactttc

SEQ ID NO: 286841 - DNA, 1661 bp, Homo sapiens
atttaaaagaatttccattacaaagtaaaactgaaaggatgaaagaaaaaaattttcaacttagaacttctacaagaggaaagtttttcatggatacaaattctttggttatatttttgcaaatattccagtctgtggcttgtgttttaatagtatttttcaaagaacagaaattttaatatttatggagtccaacttatcaattttattcttttatgattcattatttatgggttctaagaagtctttgttaacccagatcacaaaggtaatttcttgtagaaattgtatagttttaggttttacacttaggtcaatgaccccatttcaagtaaactttttatgatatgagatatgggttgagagatttttttttcttttattttgacctcaacactatttgtagaaaaggttatccttaatttactgaattatcttggcaactttatcaaaaatcattttataagtatgggtctatttttggactctattccatttacctgtatctattcttttaccaataccacactgtcttgattcctttataggaagaaattattctgttttattcctttataggaagtcttgacctcaagtaatactggattatggacagaacttggaaatattgagaataatttcttaaagccacttcatataggacttaatatgtcaaaagcacattatgaagcagaaattaaaaatagccaagaggcccagaaatctaaagatctttgttctataactgtaagtggagaagagatccctaatatgcctcctgaaatgcagcttaaggtcctgcattcagctcttttcacatttgatttgattgaaagtgttctagctcgagtggaagaactcattgaaataaaaacaaagtctacctctgaagaaaatattgggataaagtgaaagttccatttcctaaataaaaactaataaaatatagtactttccattatgattcatttaatacctttataaaaaatttttctgtaaaaatttactgcttgaaaaataaatgtagcttttctcatttatcaatttctataatgatacactatagaacaggtttttttggttttaaagttatctaatggtaaataatgcccacatatgtcctaaatactacttttgaaaatccaatacaaactaataattttataacttcataaaatgtagctgaattgtctatattcattcctacagttttagtgagcttataaaaatactgatacactttctgctgcagttagatgctatgtaacatttcggaactcctagtgtcaagttggctatcataccagtgtaaagaggccagttgacttttcttagcttctcttttcctggctcaggtggagtctttgggagcagagtcccatcaccacctctccagcagaagttataataggaaaacatctgcaaagattaattttagaaatacttgctacctttatggaaaaaaactaaaaaatatatatgactttaagaaactgattagaaaattctgtatttttatttcctactaaagatttgtccatttaactcactaagaagctacacctgagttttatggtatatgtatgtatcagtcctttgctaaagagcgttaaatcttgcagcgaaactcctaaaataaaatcacttttaattgtaaatgt

SEQ ID NO: 286842 - DNA, 1923 bp, Homo sapiens
cagaagagcgggctaagacgccggaggaggtggcggcggctgggagaggcgagggttctggccgattttagcatcgaaactaggagaaataagaatggctgtagaggaacttcagtctataataaagagatgtcaaatcctagaagagcaagactttaaagaagaggattttggcctatttcagttagctgggcaaagatgcatagaagaagggcacacagaccagctattagaaattattcaaaatgaaaagaataaggtcatcatcaagaatatgggctggaatctcgttggtcctgttgttcgatgccttttgtgtaaagataaagaggatagtaaaagaaaagtttattttttgatctttgatttattggtaaagttatgcaatccaaaggaattattgttgggtttgcttgaactgattgaagagccctctggaaaacagatatcccaaagtattcttcttttgcttcagccattacaaacagtgattcagaaacttcataacaaggcatattcaattggattagcattgtctaccctttggaatcagctatctcttcttcctgttccatactcaaaagaacaaatacaaatggatgactatggcctttgtcagtgttgcaaggccttaatagagttcactaagccttttgtggaagaagtcattgataacaaagaaaactcactggaaaatgaaaagttaaaggatgaattactgaaattttgtttcaaaagcttgaaatgccctttgctgacagcacaattctttgaacagtctgaagaaggtggaaatgatcctttcaggtattttgcatcagaaataataggttttttatcagcaattggacaccctttccccaaaatgatttttaatcatggaaggaaaaagagaacttggaattaccttgaatttgaagaagaagaaaataaacagttagcagactcaatggcttctctggcatatctagtatttgtacagggcatccatattgatcagcttccaatggtcttaagcccattgtaccttttgcagtttaatatggggcacattgaagtctttttgcaaagaacagaagagtctgttatctccaaaggattggagctgctggagaatagtttattgagaatagaagacaatagtctactttaccagtacttagaaatcaagagttttcttactgtacctcagggcttagtgaaagtaatgacactttgccccattgagacactgaggaaaaagagtttagctatgcttcagctgtatattaacaagttggattcacaaggcaaatatacattatttaggtgcttattgaatacaagtaatcactcaggtgtggaggcttttattattcaaaatatcaaaaatcaaattgacatgtcattaaagagaacacgtaacaacaaatggtttacaggaccacagttgatttcccttcttgatttggtactttttctcccagagggtgcagaaacagatttactgcaaaactcagataggattatggcttcattaaatttattgaggtatttggttatcaaagataatgaaaatgacaatcaaactggattatggacagaacttggaaatattgagaataatttcttaaagccacttcatataggacttaatatgtcaaaagcacattatgaagcagaaattaaaaatagccaagaggcccagaaatctaaagatctttgttctataactgtaagtggagaagagatccctaatatgcctcctgaaatgcagcttaaggtcctgcattcagctcttttcacatttgatttgattgaaagtgttctagctcgagtggaagaactcattgaaataaaaacaaagtctacctctgaagaaaatattgggataaagtgaaagttccatttcctaaataaaaactaataaaatatagtactttc

SEQ ID NO: 286843 - DNA, 1838 bp, Homo sapiens
cagaagagcgggctaagacgccggaggaggtggcggcggctgggagaggcgagggttctggccgattttagcatcgaaactaggagaaataagaatggctgtagaggaacttcagtctataataaagagatgtcaaatcctagaagagcaagactttaaagaagaggattttggcctatttcagttagctgggcaaagatgcatagaagaagggcacacagaccagctattagaaattattcaaaatgaaaagaataaggtcatcatcaagaatatgggctggaatctcgttggtcctgttgttcgatgccttttgtgtaaagataaagaggatagtaaaagaaaagtttattttttgatctttgatttattggtaaagttatgcaatccaaaggaattattgttgggtttgcttgaactgattgaagagccctctggaaaacagatatcccaaagtattcttcttttgcttcagccattacaaacagtgattcagaaacttcataacaaggcatattcaattggattagcattgtctaccctttggaatcagctatctcttcttcctgttccatactcaaaagaacaaatacaaatggatgactatggcctttgtcagtgttgcaaggccttaatagagttcactaagccttttgtggaagaagtcattgataacaaagaaaactcactggaaaatgaaaagttaaaggatgaattactgaaattttgtttcaaaagcttgaaatgccctttgctgacagcacaattctttgaacagtctgaagaaggtggaaatgatcctttcaggtattttgcatcagaaataataggttttttatcagcaattggacaccctttccccaaaatgatttttaatcatggaaggaaaaagagaacttggaattaccttgaatttgaagaagaagaaaataaacagttagcagactcaatggcttctctggcatatctagtatttgtacagggcatccatattgatcagcttccaatggtcttaagcccattgtaccttttgcagtttaatatggggcacattgaagtctttttgcaaagaacagaagagtctgttatctccaaaggattggagctgctggagaatagtttattgagaatagaagacaatagtctactttaccagtacttagaaatcaagagttttcttactgtacctcagggcttagtgaaagtaatgacactttgccccattgagacactgaggaaaaagagtttagctatgcttcagctgtatattaacaagttggattcacaaggcaaatatacattatttagagaacacgtaacaacaaatggtttacaggaccacagttgatttcccttcttgatttggtactttttctcccagagggtgcagaaacagatttactgcaaaactcagataggattatggcttcattaaatttattgaggtatttggttatcaaagataatgaaaatgacaatcaaactggattatggacagaacttggaaatattgagaataatttcttaaagccacttcatataggacttaatatgtcaaaagcacattatgaagcagaaattaaaaatagccaagaggcccagaaatctaaagatctttgttctataactgtaagtggagaagagatccctaatatgcctcctgaaatgcagcttaaggtcctgcattcagctcttttcacatttgatttgattgaaagtgttctagctcgagtggaagaactcattgaaataaaaacaaagtctacctctgaagaaaatattgggataaagtgaaagttccatttcctaaataaaaactaataaaatatagtactttc

SEQ ID NO: 286844 - DNA, 1493 bp, Homo sapiens
tttccatcagtaggaaagggaaagcatcctctagaactagatccgtggtgtggatatcaattgaaaggccatacttgggatgaaggcataaataaggtagagtcattgtggagatggctcatagaggaagagacgtctgtgaatttatcctcaaataattttctcataaataaaacttaacaagttaatagatctcaaaacctggagctatccaaatggtgcagtgataagcgtagtgccccaagtacatttttcttttaattggtattcacataactagctatagtaataattattaaatagtgaagtccattgtgaaaagcaagggccatgtttcatttatttttgttttttgagcttttatcgcgtttaatagtaggcaatcaatcattgttgaactaaataactcattctttcattcttaacagactgactggattatggacagaacttggaaatattgagaataatttcttaaagccacttcatataggacttaatatgtcaaaagcacattatgaagcagaaattaaaaatagccaagaggcccagaaatctaaagatctttgttctataactgtaagtggagaagagatccctaatatgcctcctgaaatgcagcttaaggtcctgcattcagctcttttcacatttgatttgattgaaagtgttctagctcgagtggaagaactcattgaaataaaaacaaagtctacctctgaagaaaatattgggataaagtgaaagttccatttcctaaataaaaactaataaaatatagtactttccattatgattcatttaatacctttataaaaaatttttctgtaaaaatttactgcttgaaaaataaatgtagcttttctcatttatcaatttctataatgatacactatagaacaggtttttttggttttaaagttatctaatggtaaataatgcccacatatgtcctaaatactacttttgaaaatccaatacaaactaataattttataacttcataaaatgtagctgaattgtctatattcattcctacagttttagtgagcttataaaaatactgatacactttctgctgcagttagatgctatgtaacatttcggaactcctagtgtcaagttggctatcataccagtgtaaagaggccagttgacttttcttagcttctcttttcctggctcaggtggagtctttgggagcagagtcccatcaccacctctccagcagaagttataataggaaaacatctgcaaagattaattttagaaatacttgctacctttatggaaaaaaactaaaaaatatatatgactttaagaaactgattagaaaattctgtatttttatttcctactaaagatttgtccatttaactcactaagaagctacacctgagttttatggtatatgtatgtatcagtcctttgctaaagagcgttaaatcttgcagcgaaactcctaaaataaaatcacttttaattgtaaatgt

SEQ ID NO: 286845 - DNA, 436 bp, Homo sapiens
cagaagagcgggctaagacgccggaggaggtggcggcggctgggagaggcgagggttctggccgattttagcatcgaaactaggagaaataagaatggctgtagaggaacttcagtctataataaagagatgtgtaagtattaatttttgtaaaattaaatacctttcaaaatatgggaagggcacagattgtttttaattatatttgtggtcactcaaattgtttatcttctttaatccttgctttttttgacctgtaaagagcatgagtgggggaggcagattggattatttctccaggtgacatacttatctaaataaccttttacattttaatcctgatccttttcatagatttcactggtacagtagatttcaaggtcacttattaaagtatttattagggtaatcctaattttgatacgtgtgttattta

SEQ ID NO: 286846 - DNA, 1947 bp, Homo sapiens
cagaagagcgggctaagacgccggaggaggtggcggcggctgggagaggcgagggttctggccgattttagcatcgaaactaggagaaataagaatggctgtagaggaacttcagtctataataaagagatgtcaaatcctagaagagcaagactttaaagaagaggattttggcctatttcagttagctgggcaaagatgcatagaagaagggcacacagaccagctattagaaattattcaaaatgaaaagaataaggtcatcatcaagaatatgggctggaatctcgttggtcctgttgttcgatgccttttgtgtaaagataaagaggatagtaaaagaaaagtttattttttgatctttgatttattggtaaaggttcaattgtgaatatttttatagttatgcaatccaaaggaattattgttgggtttgcttgaactgattgaagagccctctggaaaacagatatcccaaagtattcttcttttgcttcagccattacaaacagtgattcagaaacttcataacaaggcatattcaattggattagcattgtctaccctttggaatcagctatctcttcttcctgttccatactcaaaagaacaaatacaaatggatgactatggcctttgtcagtgttgcaaggccttaatagagttcactaagccttttgtggaagaagtcattgataacaaagaaaactcactggaaaatgaaaagttaaaggatgaattactgaaattttgtttcaaaagcttgaaatgccctttgctgacagcacaattctttgaacagtctgaagaaggtggaaatgatcctttcaggtattttgcatcagaaataataggttttttatcagcaattggacaccctttccccaaaatgatttttaatcatggaaggaaaaagagaacttggaattaccttgaatttgaagaagaagaaaataaacagttagcagactcaatggcttctctggcatatctagtatttgtacagggcatccatattgatcagcttccaatggtcttaagcccattgtaccttttgcagtttaatatggggcacattgaagtctttttgcaaagaacagaagagtctgttatctccaaaggattggagctgctggagaatagtttattgagaatagaagacaatagtctactttaccagtacttagaaatcaagagttttcttactgtacctcagggcttagtgaaagtaatgacactttgccccattgagacactgaggaaaaagagtttagctatgcttcagctgtatattaacaagttggattcacaaggcaaatatacattatttaggtgcttattgaatacaagtaatcactcaggtgtggaggcttttattattcaaaatatcaaaaatcaaattgacatgtcattaaagagaacacgtaacaacaaatggtttacaggaccacagttgatttcccttcttgatttggtactttttctcccagagggtgcagaaacagatttactgcaaaactcagataggattatggcttcattaaatttattgaggtatttggttatcaaagataatgaaaatgacaatcaaactggattatggacagaacttggaaatattgagaataatttcttaaagccacttcatataggacttaatatgtcaaaagcacattatgaagcagaaattaaaaatagccaagaggcccagaaatctaaagatctttgttctataactgtaagtggagaagagatccctaatatgcctcctgaaatgcagcttaaggtcctgcattcagctcttttcacatttgatttgattgaaagtgttctagctcgagtggaagaactcattgaaataaaaacaaagtctacctctgaagaaaatattgggataaagtgaaagttccatttcctaaataaaaactaataaaatatagtactttc

SEQ ID NO: 286847 - DNA, 2652 bp, Homo sapiens
cagaagagcgggctaagacgccggaggaggtggcggcggctgggagaggcgagggttctggccgattttagcatcgaaactaggagaaataagaatggctgtagaggaacttcagtctataataaagagatgtcaaatcctagaagagcaagactttaaagaagaggattttggcctatttcagttagctgggcaaagatgcatagaagaagggcacacagaccagctattagaaattattcaaaatgaaaagaataaggtcatcatcaagaatatgggctggaatctcgttggtcctgttgttcgatgccttttgtgtaaagataaagaggatagtaaaagaaaagtttattttttgatctttgatttattggtaaaggttcaattgtgaatatttttatagttatgcaatccaaaggaattattgttgggtttgcttgaactgattgaagagccctctggaaaacagatatcccaaagtattcttcttttgcttcagccattacaaacagtgattcagaaacttcataacaaggcatattcaattggattagcattgtctaccctttggaatcagctatctcttcttcctgttccatactcaaaagaacaaatacaaatggatgactatggcctttgtcagtgttgcaaggccttaatagagttcactaagccttttgtggaagaagtcattgataacaaagaaaactcactggaaaatgaaaagttaaaggatgaattactgaaattttgtttcaaaagcttgaaatgccctttgctgacagcacaattctttgaacagtctgaagaaggtggaaatgatcctttcaggtattttgcatcagaaataataggttttttatcagcaattggacaccctttccccaaaatgatttttaatcatggaaggaaaaagagaacttggaattaccttgaatttgaagaagaagaaaataaacagttagcagactcaatggcttctctggcatatctagtatttgtacagggcatccatattgatcagcttccaatggtcttaagcccattgtaccttttgcagtttaatatggggcacattgaagtctttttgcaaagaacagaagagtctgttatctccaaaggattggagctgctggagaatagtttattgagaatagaagacaatagtctactttaccagtacttagaaatcaagagttttcttactgtacctcagggcttagtgaaagtaatgacactttgccccattgagacactgaggaaaaagagtttagctatgcttcagctgtatattaacaagttggattcacaaggcaaatatacattatttaggtgcttattgaatacaagtaatcactcaggtgtggaggcttttattattcaaaatatcaaaaatcaaattgacatgtcattaaagagaacacgtaacaacaaatggtttacaggaccacagttgatttcccttcttgatttggtactttttctcccagagggtgcagaaacagatttactgcaaaactcagataggattatggcttcattaaatttattgaggtatttggttatcaaagataatgaaaatgacaatcaaactggattatggacagaacttggaaatattgagaataatttcttaaagccacttcatataggacttaatatgtcaaaagcacattatgaagcagaaattaaaaatagccaagaggcccagaaatctaaagatctttgttctataactgtaagtggagaagagatccctaatatgcctcctgaaatgcagcttaaggtcctgcattcagctcttttcacatttgatttgattgaaagtgttctagctcgagtggaagaactcattgaaataaaaacaaagtctacctctgaagaaaatattgggataaagtgaaagttccatttcctaaataaaaactaataaaatatagtactttccattatgattcatttaatacctttataaaaaatttttctgtaaaaatttactgcttgaaaaataaatgtagcttttctcatttatcaatttctataatgatacactatagaacaggtttttttggttttaaagttatctaatggtaaataatgcccacatatgtcctaaatactacttttgaaaatccaatacaaactaataattttataacttcataaaatgtagctgaattgtctatattcattcctacagttttagtgagcttataaaaatactgatacactttctgctgcagttagatgctatgtaacatttcggaactcctagtgtcaagttggctatcataccagtgtaaagaggccagttgacttttcttagcttctcttttcctggctcaggtggagtctttgggagcagagtcccatcaccacctctccagcagaagttataataggaaaacatctgcaaagattaattttagaaatacttgctacctttatggaaaaaaactaaaaaatatatatgactttaagaaactgattagaaaattctgtatttttatttcctactaaagatttgtccatttaactcactaagaagctacacctgagttttatggtatatgtatgtatcagtcctttgctaaagagcgttaaatcttgcagcgaaactcctaaaataaaatcacttttaattgtaaatgt

SEQ ID NO: 286848 - DNA, 1842 bp, Homo sapiens
cagaagagcgggctaagacgccggaggaggtggcggcggctgggagaggcgagggttctggccgattttagcatcgaaactaggagaaataagaatggctgtagaggaacttcagtctataataaagagatgtcaaatcctagaagagcaagactttaaagaagaggattttggcctatttcagttagctgggcaaagatgcatagaagaagggcacacagaccagctattagaaattattcaaaatgaaaagaataaggtcatcatcaagaatatgggctggaatctcgttggtcctgttgttcgatgccttttgtgtaaagataaagaggatagtaaaagaaaagtttattttttgatctttgatttattggtaaaggttcaattgtgaatatttttatagttatgcaatccaaaggaattattgttgggtttgcttgaactgattgaagagccctctggaaaacagatatcccaaagtattcttcttttgcttcagccattacaaacagtgattcagaaacttcataacaaggcatattcaattggattagcattgtctaccctttggaatcagctatctcttcttcctgttccatactcaaaagaacaaatacaaatggatgactatggcctttgtcagtgttgcaaggccttaatagagttcactaagccttttgtggaagaagtcattgataacaaagaaaactcactggaaaatgaaaagttaaaggatgaattactgaaattttgtttcaaaagcttgaaatgccctttgctgacagcacaattctttgaacagtctgaagaaggtggaaatgatcctttcaggtattttgcatcagaaataataggttttttatcagcaattggacaccctttccccaaaatgatttttaatcatggaaggaaaaagagaacttggaattaccttgaatttgaagaagaagaaaataaacagttagcagactcaatggcttctctggcatatctagtatttgtacagggcatccatattgatcagcttccaatggtcttaagcccattgtaccttttgcagtttaatatggggcacattgaagtctttttgcaaagaacagaagagtctgttatctccaaaggattggagctgctggagaatagtttattgagaatagaagacaatagtctactttaccagtacttagaaatcaagagttttcttactgtacctcagggcttagtgaaagtaatgacactttgccccattgagacactggaggtacaagtgtggatgtattacatgcataaaatggatagtgatgaagtctggagaacacgtaacaacaaatggtttacaggaccacagttgatttcccttcttgatttggtactttttctcccagagggtgcagaaacagatttactgcaaaactcagataggattatggcttcattaaatttattgaggtatttggttatcaaagataatgaaaatgacaatcaaactggattatggacagaacttggaaatattgagaataatttcttaaagccacttcatataggacttaatatgtcaaaagcacattatgaagcagaaattaaaaatagccaagaggcccagaaatctaaagatctttgttctataactgtaagtggagaagagatccctaatatgcctcctgaaatgcagcttaaggtcctgcattcagctcttttcacatttgatttgattgaaagtgttctagctcgagtggaagaactcattgaaataaaaacaaagtctacctctgaagaaaatattgggataaagtgaaagttccatttcctaaataaaaactaataaaatatagtactttc

SEQ ID NO: 286849 - DNA, 1797 bp, Homo sapiens
cagaagagcgggctaagacgccggaggaggtggcggcggctgggagaggcgagggttctggccgattttagcatcgaaactaggagaaataagaatggctgtagaggaacttcagtctataataaagagatgtgtcatcatcaagaatatgggctggaatctcgttggtcctgttgttcgatgccttttgtgtaaagataaagaggatagtaaaagaaaagtttattttttgatctttgatttattggtaaagttatgcaatccaaaggaattattgttgggtttgcttgaactgattgaagagccctctggaaaacagatatcccaaagtattcttcttttgcttcagccattacaaacagtgattcagaaacttcataacaaggcatattcaattggattagcattgtctaccctttggaatcagctatctcttcttcctgttccatactcaaaagaacaaatacaaatggatgactatggcctttgtcagtgttgcaaggccttaatagagttcactaagccttttgtggaagaagtcattgataacaaagaaaactcactggaaaatgaaaagttaaaggatgaattactgaaattttgtttcaaaagcttgaaatgccctttgctgacagcacaattctttgaacagtctgaagaaggtggaaatgatcctttcaggtattttgcatcagaaataataggttttttatcagcaattggacaccctttccccaaaatgatttttaatcatggaaggaaaaagagaacttggaattaccttgaatttgaagaagaagaaaataaacagttagcagactcaatggcttctctggcatatctagtatttgtacagggcatccatattgatcagcttccaatggtcttaagcccattgtaccttttgcagtttaatatggggcacattgaagtctttttgcaaagaacagaagagtctgttatctccaaaggattggagctgctggagaatagtttattgagaatagaagacaatagtctactttaccagtacttagaaatcaagagttttcttactgtacctcagggcttagtgaaagtaatgacactttgccccattgagacactgaggaaaaagagtttagctatgcttcagctgtatattaacaagttggattcacaaggcaaatatacattatttaggtgcttattgaatacaagtaatcactcaggtgtggaggcttttattattcaaaatatcaaaaatcaaattgacatgtcattaaagagaacacgtaacaacaaatggtttacaggaccacagttgatttcccttcttgatttggtactttttctcccagagggtgcagaaacagatttactgcaaaactcagataggattatggcttcattaaatttattgaggtatttggttatcaaagataatgaaaatgacaatcaaactggattatggacagaacttggaaatattgagaataatttcttaaagccacttcatataggacttaatatgtcaaaagcacattatgaagcagaaattaaaaatagccaagaggcccagaaatctaaagatctttgttctataactgtaagtggagaagagatccctaatatgcctcctgaaatgcagcttaaggtcctgcattcagctcttttcacatttgatttgattgaaagtgttctagctcgagtggaagaactcattgaaataaaaacaaagtctacctctgaagaaaatattgggataaagtgaaagttccatttcctaaataaaaactaataaaatatagtactttc

SEQ ID NO: 286850 - DNA, 530 bp, Homo sapiens
cagaagagcgggctaagacgccggaggaggtggcggcggctgggagaggcgagggttctggccgattttagcatcgaaactaggagaaataagaatggctgtagaggaacttcagtctataataaagagatgtcaaatcctagaagagcaagactttaaagaagaggattttggcctatttcagttagctgggcaaagatgcatagaagaagggcacacagaccagctattagaaattattcaaaatgaaaagaataaggtgcgtacaatcttggtgtttacttttcagtcttgggaagagaataatcacatgatgctattcatccagtcatttatccatcaaacatttaagaatctacttaaattttcacagtagggaactgaaaacaaaaaaagaattagaaatatttaggccaggcgcagtggctcacgttcgtaatcacagcgttatgggaggccaaggcaggcagatcacttgagcccaggagtttgagaccagcctgggcaacagagtaagaccctgtctcaga

SEQ ID NO: 286851 - DNA, 516 bp, Homo sapiens
gcccaagctggagtgcagtggcatgattgtggctcactgcagcttcaactccctgggctcaagtgatccacccacctcagattcctgattagccaggactgcaggtgcacaccaccatgcctggctaatttttagtagagatagggtctcactatgttgctcaggctggtctccaactcctggcctctagtaatcctctcagctcagcctcccaaagcacaggaattacaggtgcaaaccactgtacctggtcttaaatattcctaagctacctccagctgaaatcttttctgtgttttgctttgttttgctttaaaggcagcattaataacattactttttcttggcattgcaggtcctgcattcagctcttttcacatttgatttgattgaaagtgttctagctcgagtggaagaactcattgaaataaaaacaaagtctacctctgaagaaaatattgggataaagtgaaagttccatttcctaaataaaaactaataaaatatagtactttc

SEQ ID NO: 286852 - DNA, 731 bp, Homo sapiens
ggttgggccagccagggcaggcagggacagcccctctgatgaggaggccactgggctgagaccaatgaatgagatggagccagccacgtggtgagccagaagagggcatcacagggcttgagtctgggggagcctggctgcccagaggtggcagatgacatgaagaaataaccatgtaagggctggctgtgtatgagagcaagcattgggaaggatgaatgccaactatgttccaggaacttccactgttctcacacacccaggtgagtggtgttcaggtgggtggcacccaggtgagtgacatcccagttgagtggcacccaggtgagtagcatccaggtgagtgacacctaggtgagtgacattcaggttagtggcgtctgtgtgagtggcatcatccaggtgagtagcttccaggtgagtggcacccaggtgagtggcattcgggtgagtggcattatccaggtgacacctgggtgagtggcatccaggtgagtgatatcatccaggtaagtggcacctaggtgacatccaggtgagtgacgacatccaggtgagtgacatcatccaggtaaatggcacccaggtgagtagcattcaggtgagtgacacccaggcgagtggcatccacgtgactagcattgtccaggtgcataacacccaggtgagtggcacccagttgagtggtgcccaagtgagtcacatccaggtaagtggggtccaggtggtgg

SEQ ID NO: 286853 - DNA, 869 bp, Homo sapiens
ggttgggccagccagggcaggcagggacagcccctctgatgaggaggccactgggctgagaccaatgaatgagatggagccagccacgtggtgagccagaagagggcatcacagtgttcaggtccatgaaatgggctcccgaagtccaacctcacagaccccataggaaagcagatggaatctccaagggcaccagctatacatggtggtggaaggaccaacgcatgctctgaatgccactgcggaccacagggcttgagtctgggggagcctggctgcccagaggtggcagatgacatgaagaaataaccatgtaagggctggctgtgtatgagagcaagcattgggaaggatgaatgccaactatgttccaggaacttccactgttctcacacacccaggtgagtggtgttcaggtgggtggcacccaggtgagtgacatcccagttgagtggcacccaggtgagtagcatccaggtgagtgacacctaggtgagtgacattcaggttagtggcgtctgtgtgagtggcatcatccaggtgagtagcttccaggtgagtggcacccaggtgagtggcattcgggtgagtggcattatccaggtgacacctgggtgagtggcatccaggtgagtgatatcatccaggtaagtggcacctaggtgacatccaggtgagtgacgacatccaggtgagtgacatcatccaggtaaatggcacccaggtgagtagcattcaggtgagtgacacccaggcgagtggcatccacgtgactagcattgtccaggtgcataacacccaggtgagtggcacccagttgagtggtgcccaagtgagtcacatccaggtaagtggggtccaggtggtgg

SEQ ID NO: 286854 - DNA, 701 bp, Homo sapiens
ggttgggccagccagggcaggcagggacagcccctctgatgaggaggccactgggctgagaccaatgaatgagatggagccagccacgtggtgagccagaagagggcatcacagggcttgagtctgggggagcctggctgcccagaggtggcagatgacatgaagaaataaccatgtaagggctggctgtgtatgagagcaagcattgggaaggatgaatgccaactatgttccaggaacttccactgttctcacacacccaggtgagtggtgttcaggtgggtggcacccaggtgagtgacatcccagttgagtggcacccaggtgagtagcatccaggtgagtgacacctaggtgagtgacattcaggttagtggcgtctgtgtgagtggcatcatccaggtgagtagcttccaggtgagtggcacccaggtgagtggcattcgggtgatggcatccaggtgagtgatatcatccaggtaagtggcacctaggtgacatccaggtgagtgacgacatccaggtgagtgacatcatccaggtaaatggcacccaggtgagtagcattcaggtgagtgacacccaggcgagtggcatccacgtgactagcattgtccaggtgcataacacccaggtgagtggcacccagttgagtggtgcccaagtgagtcacatccaggtaagtggggtccaggtggtgg

SEQ ID NO: 286855 - DNA, 697 bp, Homo sapiens
agggcaggcaggggcggcctctctgacgagaaggaggccactgggctgaggccaatgaatgggaaagagccagccatgtgggcttgagtctgggggagcctggctgcccagaggtggcagatgacatgaagaaataaccatgtaagggctggctgtgtatgagagcaagcattgggaaggatgaatgccaactatgttccaggaacttccactgttctcacacacccaggtgagtggtgttcaggtgggtggcacccaggtgagtgacatcccagttgagtggcacccaggtgagtagcatccaggtgagtgacacctaggtgagtgacattcaggttagtggcgtctgtgtgagtggcatcatccaggtgagtagcttccaggtgagtggcacccaggtgagtggcattcgggtgagtggcattatccaggtgacacctgggtgagtggcatccaggtgagtgatatcatccaggtaagtggcacctaggtgacatccaggtgagtgacgacatccaggtgagtgacatcatccaggtaaatggcacccaggtgagtagcattcaggtgagtgacacccaggcgagtggcatccacgtgactagcattgtccaggtgcataacacccaggtgagtggcacccagttgagtggtgcccaagtgagtcacatccaggtaagtggggtccaggtggtgg

SEQ ID NO: 286856 - DNA, 842 bp, Homo sapiens
cccacgtcatggcgcctgaggagaacgcgggtaccaaactcttgctgcagagtttcgagcgccgcttcctagcggcgcgcacactgcgctccttcccctggcagtaacctgaagctttcaccgtagacgtgctgtattgcccagaagccatcgtgtccctggtcggggtcctgcggaggctggctgcctgctgggagcaccagcgggctcctgaggtctacatggcctttaccgtccgcaacccagagacgtgccagctgttcaccaccgagctaggctgggctgggatcagatgggaagcggaagctcatcatgaccagaaactgtttccctatggagagcacttggagatggcaatgctgaacctcacactgtaggactcatacacgactccaacgggattgttagaatcaaatcactctcgtgggaagaatttttatatgggaaagcggataaaactttcattggactggaatgtttggagaatgttaaattccaaatcaggaaccacaatctgccctctaataagacatcggctatctaagcatgtgggtgccccctttctgccagcagttctggttcttaagaaaatcaccataaatcagacatgaaaattctggctccaaaaatagcattttctttgtgcaaataaaaacgtgtgtatcaagtatgacgttcccccaacgtggacacactcggttcctcacaaagccaagcccgctgcagctgccacatccctggacacactcggttcctcacaaagccaagctcgctgcagctgccacatccctggacacattcggttcctcacaaagccaagcccgcggcagctgccacatccc

SEQ ID NO: 286857 - DNA, 820 bp, Homo sapiens
gtgacagtggcccagctggactgggacgtagcgacggtccatcagctctctgccttccagccagatgttgtcattacagcagtaacctgaagctttcaccgtagacgtgctgtattgcccagaagccatcgtgtccctggtcggggtcctgcggaggctggctgcctgctgggagcaccagcgggctcctgaggtctacatggcctttaccgtccgcaacccagagacgtgccagctgttcaccaccgagctaggctgggctgggatcagatgggaagcggaagctcatcatgaccagaaactgtttccctatggagagcacttggagatggcaatgctgaacctcacactgtaggactcatacacgactccaacgggattgttagaatcaaatcactctcgtgggaagaatttttatatgggaaagcggataaaactttcattggactggaatgtttggagaatgttaaattccaaatcaggaaccacaatctgccctctaataagacatcggctatctaagcatgtgggtgccccctttctgccagcagttctggttcttaagaaaatcaccataaatcagacatgaaaattctggctccaaaaatagcattttctttgtgcaaataaaaacgtgtgtatcaagtatgacgttcccccaacgtggacacactcggttcctcacaaagccaagcccgctgcagctgccacatccctggacacactcggttcctcacaaagccaagctcgctgcagctgccacatccctggacacattcggttcctcacaaagccaagcccgcggcagctgccacatccc

SEQ ID NO: 286858 - DNA, 486 bp, Homo sapiens
ctcagaaacacaaaatgatcctctgacaagtgatgaagaagaatgggaagatgtgaaaatccaagcaagaagaacttaggggaagcaactcaacatctaagaagaaatgaatagggatcagttccaagaagagataaaggggaaatacccaagaactgggatgcttcgtctttggtttcttctggatcctccctaaattttggctaagaaatctgagtctccatttaagagtgttcccagaaatgatgacatccacatccaggaacctcctccttccttcacttgaactctcttgcttctggggagccaggacctatggagtaaaaatcaagttcatttggtgacacattccctccgggcccagatgctgtctctgctgctgtaaactctcctgcagtcaaggccaagcaatatatctaagcatccctttgtcaggtgtccccaagtctttacatcccagggcaataaaacaacactctgaaaaaa

SEQ ID NO: 286859 - DNA, 1069 bp, Homo sapiens
tcagcgttctcctgcggaacctttgaacggggtactcgagcccacaggggaagagcagcggaaggggcctttcggaacgatttggaacgaaaggaagtggaagaaacgcggaaccatggccgctgtggttgctgtttgcggtggtctagggaggaagaagttgacacacttggtaacggctgctgtcagccttacacatcccgggactcacacggtgctttggagaagaggttgttcacaacaggtatccagcaatgaggacctgcccatttcaatggaaaatccttataaagaacctcttaagaaatgtatcttgtgtggaaagcatgtagattataagaatgtacagcttttgtcccagtttgtttctccatttactggatgcatttatggaaggcacattacaggtctttgtgggaagaaacagaaagaaatcacaaaagcaattaagagagctcaaataatggggtttatgccagttacatacaaggatcctgcatatctcaaggaccctaaagtttgtaacatcagatatcgggaataaattctatcacgttaccactaataaacttattttacagtaagtggttgtatgatgccaatactgactcaaaccaacctttggatagaaaagtgtttgaggagtgaggtaaagaatgacacttccccttcataccaatgtccattaagcagattgcttatttaaaatgttaacactcatcacattttatctatgttgaataaaagtggttctgtgtgattgtcatttatatctgatccccaaatagctcatacaataatccattcaatagaatggaattaaaactgttcagaatgattttccaactagcaaatataagtatgcctggttaagatatcttccctttgtagaaatgttacattgggatggatagtggtgctgtcacagaaggacaaaatattcctagacgagtctatcctcaaaccagtagtgtcttttacatgaagagatgatttacacctaatagacattgaatatgatagacatacatgtatatatgtatcagttctgagttccactggcctatcc

SEQ ID NO: 286860 - DNA, 764 bp, Homo sapiens
tcagcgttctcctgcggaacctttgaacggggtactcgagcccacaggggaagagcagcggaaggggcctttcggaacgatttggaacgaaaggaagtggaagaaacgcggaaccatggccgctgtggttgctgtttgcggtggtctagggaggaagaagttgacacacttggtaacggctgctgtcagccttacacatcccgggactcacacggtgctttggagaagaggttgttcacaacaggtatccagcaatgaggacctgcccatttcaatggaaaatccttataaagaacctcttaagaaatgtatcttgtgtggaaagcatgtagattataagaatgtacagcttttgtcccagtttgtttctccatttactggatgcatttatggaaggcacattacaggtctttgtgggaagaaacagaaagaaatcacaaaagcaattaagagagctcaaataatggggtttatgccagttacatacaaggatcctgcatatctcaaggaccctaaagtttgtaacatcagatatcgggaataaattctatcacgttaccactaataaacttattttacagtaagtggttgtatgatgccaatactgactcaaaccaacctttggatagaaaagtgtttgaggagtgaggtaaagaatgacacttccccttcataccaatgtccattaagcagattgcttatttaaaatgttaacactcatcacattttatctatgttgaataaaagtggttctgtgtgattgt

SEQ ID NO: 286861 - DNA, 2455 bp, Homo sapiens
tcagcgttctcctgcggaacctttgaacggggtactcgagcccacaggggaagagcagcggaaggggcctttcggaacgatttggaacgaaaggaagtggaagaaacgcggaaccatggccgctgtggttgctgtttgcggtggtctagggaggaagaagttgacacacttggtaacggctgctgtcagccttacacatcccgggactcacacggtgctttggagaagaggttgttcacaacaggtatccagcaatgaggacctgcggtaagaatttttttttctattagtaaggcctttgcaaatatgaccaaaatgtttttctttttaaaacgagatctggtattagactctaacatcttttattttagctacttgaatagagttctgccgtaggacaaaacaatttgataattactctgagttcagaaatgatgatgaattgattgtagtcatgtagtcagttgagttttgaagtaggggaattcctagattagaagcaaagctgctataataccatatttttcttcctagatcttaaatttaaggatatgtgatttgggaattgttttttttttttttacatagccctttgtaagcaaatgatatgggaattttaaaaggtagtttgggtgagcagaattttagataactgaaaagagactgtacaaagcttagctataggttggctatagtattaacatggactttctgaaagcacaggttcttgctacatgcaaaggtattttgacactaattagaccatacaaagcacttggcacagagctgaagagtagttacgtgagctgaatgtaaattggaaagtttgaggaattggaaaaaacaaaagaacttgtctagtttctctgagcatctgtcttggtaatctaatccatgcaccatactttaagaaagtaaagggacattatttcttttttagttcataaatcccactttgtctctaatcaaagttatggaccctctccacagaaaaaggcacacagtcccattcatttgaagttttgcatacgattacagggagtcatgggcttcaaagccatttctagattaagaacctctatcctggagacagccatactgactgtaggaaggaggcactgtgacaaaagcattagaggcagtggtggtaacagaaaagccaaaaagactgatacaaacttatatagtagcctggggtgataaagtcaaagaaccttttattacagtaagtcatgggccattatctgtgtataaaaatagtgataaaatacttgatagagacatggggatggataaattagggattgtactcatttaagaatggcatatgttatctattgtgttgtaagtttccttaaatctaaaaattttttcattatctacaatctgagcaaagcattggaacactttcttatcagacatcatttttgttctgccataaaattttattctatgaagattgtactttattccagaatcttcccatgcgttaatccgtaggctaaactaaaacaaaataaagtgcttatacaaaatatgtacacagtaagaaaggtataactaatcctttgaatggatttgaatgtagaatagtaaccttttaaaattcagaattaacacatcctattatcagacttttcgtttttttccctagcccatttcaatggaaaatccttataaagaacctcttaagaaatgtatcttgtgtggaaagcatgtagattataagaatgtacagctgagatctggttttacttcactatattttagggttttgcttctgatagatctgcttaaagagaatcaagtcagtttatagcaggcttttgtagaggtaactgttttagcaacttcataatttcaaatttggttataattctatgtataagcttatctctgctttattcaagtaaaagcaccttggctttcccccacttactgttatttccactctgtttttttcactaccccaaacatcttaatagctccctgtggcagtaattctcaattggtgagggtcagaactttggaaaaagctcatctggtgaagctgatctctttatctcaccacccatatcactgattcacatattacttatctcttgtctaactctcagcaagttagaagttgcaaatttggggcaagtgaatagcgctagaattctgtatgttggctgggtgtggtggctcacgcctgtaatcccagcactttgggaggccaaggcgggcggatcacctgaggtcaggagtttgagaccagcctggccaatgtggtgaaaccccgtctctattaaaaatacaaaaattagctgagtgtggtggtgcatgcctgtaatcccagccacttgggaggctgaggcaggagatttgcttgaacccaggaggcggaagttgcagtgagctgagatcgtgccattgcactccagcctgggtgacaagagtaaaactctgtcca

SEQ ID NO: 286862 - DNA, 756 bp, Homo sapiens
  misc_feature (662)..(662): n is a, c, g, or t
tcagcgttctcctgcggaacctttgaacggggtactcgagcccacaggggaagagcagcggaaggggcctttcggaacgatttggaacgaaaggaagtggaagaaacgcggaaccatggccgctgtggttgctgtttgcggtggtctagggaggaagaagttgacacacttggtaacggctgctgtcagccttacacatcccgggactcacacggtgctttggagaagaggttgttcacaacaggtatccagcaatgaggacctgcccatttcaatggaaaatccttataaagaacctcttaagaaatgtatcttgtgtggaaagcatgtagattataagaatgtacagcttttgtcccagtttgtttctccatttactggatgcatttatggaaggcacattacaggtctttgtgggaagaaacagaaagaaatcacaaaagcaattaagagagctcaaataatggggtttatgccagttacatacaaggatcctgcatatctcaaggaccctaaagtttgtaacatcagatatcgggaataaattctatcacgttaccactaataaacttattttacaggtcttgctctgtcacccaggtcatgcagtggcatgacctcggctcacttcggcctctttcttctgagctcaagtgatcctnctgcctcagcctccccagtggctgagactacagaagcatgccatcacctctgggctaatttttgatttttagtggagacagtgtttaccatgtc

SEQ ID NO: 286863 - DNA, 985 bp, Homo sapiens
tcagcgttctcctgcggaacctttgaacggggtactcgagcccacaggggaagagcagcggaaggggcctttcggaacgatttggaacgaaaggaagtggaagaaacgcggaaccatggccgctgtggttgctgtttgcggtggtctagggaggaagaagttgacacacttggtaacggctgctgtcagccttacacatcccgggactcacacggtgctttggagaagaggttgttcacaacaggtatccagcaatgaggacctgcttttgtcccagtttgtttctccatttactggatgcatttatggaaggcacattacaggtctttgtgggaagaaacagaaagaaatcacaaaagcaattaagagagctcaaataatggggtttatgccagttacatacaaggatcctgcatatctcaaggaccctaaagtttgtaacatcagatatcgggaataaattctatcacgttaccactaataaacttattttacagtaagtggttgtatgatgccaatactgactcaaaccaacctttggatagaaaagtgtttgaggagtgaggtaaagaatgacacttccccttcataccaatgtccattaagcagattgcttatttaaaatgttaacactcatcacattttatctatgttgaataaaagtggttctgtgtgattgtcatttatatctgatccccaaatagctcatacaataatccattcaatagaatggaattaaaactgttcagaatgattttccaactagcaaatataagtatgcctggttaagatatcttccctttgtagaaatgttacattgggatggatagtggtgctgtcacagaaggacaaaatattcctagacgagtctatcctcaaaccagtagtgtcttttacatgaagagatgatttacacctaatagacattgaatatgatagacatacatgtatatatgtatcagttctgagttccactggcctatcc

SEQ ID NO: 286864 - DNA, 975 bp, Homo sapiens
tcagcgttctcctgcggaacctttgaacggggtactcgagcccacaggggaagagcagcggaaggggcctttcggaacgatttggaacgaaaggaagtggaagaaacgcggaaccatggccgctgtggttgctgtttgcggtggtctagggaggaagaagttgacacacttggtaacggctgctgtcagccttacacatcccgggactcacacggtgctttggagaagaggttgttcacaacaggtatccagcaatgaggacctgcttttgtcccagtttgtttctccatttactggatgcatttatggaaggcacattacaggtctttgtgggaagaaacagaaagaaatcacaaaagcaattaagagagctcaaataatggggtttatgccagttacatacaaggatcctgcatatctcaaggaccctaaagtttgtaacatcagatatcgggaataaattctatcacgttaccactaataaacttattttacagtgaagaaatacaactcagtcaatgaagctaaaggaataatgacatctcgttcaacaagggacagcatctatgatggggtctcacaagattatattggagcacatatagaaagctgatatatagcacttgatattggcattacagatcaaataggggaaatgactgatattcaataataatttggggacatttggttttccctatgaaaactaaaaagtaaaaatacatataggtttgtgtaagtatatgtttgcacaatgataaaactgcctaatgacacatttctcagaaggtacatagccttcattaagcaactcataactgtataaatctaatcaagatgtcaggttatcctaaaaaatgtcagtcattaacttgatatgaactctatctagaagtggttgacgtgtttgatatgttaacttacctttaattcctcttgtaatgaagcatacatttcatttatcttatgtacctc

SEQ ID NO: 286865 - DNA, 734 bp, Homo sapiens
  misc_feature (2)..(2): n is a, c, g, or t
  misc_feature (734)..(734): n is a, c, g, or t
cncgcgaacgcggccgcgcgacacggctgcgagagacgacagaaggggacacatcccgggactcacacggtgctttggagaagaggttgttcacaacaggtatccagcaatgaggacctgcccatttcaatggaaaatccttataaagaacctcttaagaaatgtatcttgtgtggaaagcatgtagattataagaatgtacagcttttgtcccagtttgtttctccatttactggatgcatttatggaaggcacattacaggtctttgtgggaagaaacagaaagaaatcacaaaagcaattaagagagctcaaataatggggtttatgccagttacatacaaggatcctgcatatctcaaggaccctaaagtttgtaacatcagatatcgggaataaattctatcacgttaccactaataaacttattttacagcaaaaaaaaaaaaaaaaaaaaaaaaaaaaatgtttgggggggtgggcgaaaaaattttaaaaaccattcgtggtggggcggccgggcccaaggatagggacaggcggaccaggggccacagaaggggtccaaaggaagaacttgggccaaggaacagggtggtgggttcctcaccaaaaaaaaaacgccggggggaagcccaggcggttgttgcccaactccaaaggggatgcggagggctcaggggctccacacaagggcctcaacgagaggcgagaaaaataccgccggggggggn

SEQ ID NO: 286866 - DNA, 443 bp, Homo sapiens
tcagcgttctcctgcggaacctttgaacggggtactcgagcccacaggggaagagcagcggaaggggcctttcggaacgatttggaacgaaaggaagtggaagaaacgcggaaccatggccgctgtggttgctgtttgcggtggtctagggaggaagaagttgacacacttggtaacggctgctgtcagccttacacatcccgggactcacacggtgctttggagaagaggttgttcacaacaggtatccagcaatgaggacctgcccatttcaatggaaaatccttataaagaacctcttaagaaatgtatcttgtgtggaaagcatgtagattataagaatgtacagcttttgtccagtttgttctcatttctgatgcattatggaggacattcaggcttttgtggaggacagagatccaagcattagagctaatatgggt

SEQ ID NO: 286867 - DNA, 1015 bp, Homo sapiens
tcagcgttctcctgcggaacctttgaacggggtactcgagcccacaggggaagagcagcggaaggggcctttcggaacgatttggaacgaaaggaagtggaagaaacgcggaaccatggccgctgtggttgctgtttgcggtggtctagggaggaagaagttgacacacttggtaacggctgctgtcagccttacacatcccgggactcacacggtgctttggagaagaggttgttcacaacaggtatccagcaatgaggacctgcccatttcaatggaaaatccttataaagaacctcttaagaaatgtatcttgtgtggaaagcatgtagattataagaatgtacagcttttgtcccagtttgtttctccatttactggatgcatttatggaaggcacattacaggtctttgtgggaagaaacagaaagaaatcacaaaagcaattaagagagctcaaataatggggtttatgccagttacatacaaggatcctgcatatctcaaggaccctaaagtttgtaacatcagatatcgggaataaattctatcacgttaccactaataaacttattttacagtaagtggttgtatgatgccaatactgactcaaaccaacctttggatagaaaagtgtttgaggagtgaggtaaagaatgacacttccccttcataccaatgtccattaagcagattgcttatttaaaatgttaacactcatcacattttatctatgttgaataaaagtggttctgtgtgattgtcatttatatctgatccccaaatagctcatacaataatccattcaatagaatggaatttatcttccctttgtagaaatgttacattgggatggatagtggtgctgtcacagaaggacaaaatattcctagacgagtctatcctcaaaccagtagtgtcttttacatgaagagatgatttacacctaatagacattgaatatgatagacatacatgtatatatgtatcagttctgagttccactggcctatcc

SEQ ID NO: 286868 - DNA, 1018 bp, Homo sapiens
tcagcgttctcctgcggaacctttgaacggggtactcgagcccacaggggaagagcagcggaaggggcctttcggaacgatttggaacgaaaggaagtggaagaaacgcggaaccatggccgctgtggttgctgtttgcggtggtctagggaggaagaagttgacacacttggtaacggctgctgtcagccttacacatcccgggactcacacggtgctttggagaagaggttgttcacaacaggtatccagcaatgaggacctgcccatttcaatggaaaatccttataaagaacctcttaagaaatgtatcttgtgtggaaagcatgtagattataagaatgtacagcttttgtcccagtttgtttctccatttactggatgcatttatggaaggcacattacaggtctttgtgggaagaaacagaaagaaatcacaaaagcaattaagagagctcaaataatggggtttatgccagttacatacaaggatcctgcatatctcaaggaccctaaagtttgtaacatcagatatcgggaataaattctatcacgttaccactaataaacttattttacagacagggtctcactcagtctcccaggctgcagtgcagtggtgcgatcatggctcaataatgcagcttcaacctcccgtgctcaagcaatcctcttgcctcagcctcccaagtagctgggactacaggcacccatcaccacacccgactaatttttaagttttttgtagagatgaggtctcctaatgttgctcagtgatcctcctgccttggcctcccaaagtgctgggattacaggtatgagtcaccacactgggcccagatgacatgtaaagctgtgaaatgtgcttagtataatagtgtggaaaaacagtttaatggctcttttgattagtacatgtataaataaggcagtattgagatttaccctatcttccatgaacaataaaattattcttagttggtaaaaaaaaaaacacaaaagaagaacaaaaaaaacc

SEQ ID NO: 286869 - DNA, 879 bp, Homo sapiens
  misc_feature (879)..(879): n is a, c, g, or t
tcagcgttctcctgcggaacctttgaacggggtactcgagcccacaggggaagagcagcggaaggggcctttcggaacgatttggaacgaaaggaagtggaagaaacgcggaaccatggccgctgtggttgctgtttgcggtggtctagggaggaagaagttgacacacttggtaacggctgctgtcagccttacacatcccgggactcacacggtgctttggagaagaggttgttcacaacaggtatccagcaatgaggacctgcccatttcaatggaaaatccttataaagaacctcttaagaaatgtatcttgtgtggaaagcatgtagattataagaatgtacagcttttgtcccagtttgtttctccatttactggatgcatttatggaaggcacattacaggtctttgtgggaagaaacagaaagaaatcacaaaagcaattaagagagctcaaataatggggtttatgccagttacatacaaggatcctgcatatctcaaggaccctaaagtttgtaacatcagatatcgggaataaattctatcacgttaccactaataaacttattttacagcaaaaaaaaaaaaaaaaaaaaaaaaaaaaatgtttgggggggtgggcgaaaaaattttaaaaaccattcgtggtggggcggccgggcccaaggatagggacaggcggaccaggggccacagaaggggtccaaaggaagaacttgggccaaggaacagggtggtgggttcctcaccaaaaaaaaaacgccggggggaagcccaggcggttgttgcccaactccaaaggggatgcggagggctcaggggctccacacaagggcctcaacgagaggcgagaaaaataccgccggggggggn

SEQ ID NO: 286870 - DNA, 1017 bp, Homo sapiens
tcagcgttctcctgcggaacctttgaacggggtactcgagcccacaggggaagagcagcggaaggggcctttcggaacgatttggaacgaaaggaagtggaagaaacgcggaaccatggccgctgtggttgctgtttgcggtggtctagggaggaagaagttgacacacttggtaacggctgctgtcagccttacacatcccgggactcacacggtgctttggagaagaggttgttcacaacaggtatccagcaatgaggacctgcccatttcaatggaaaatccttataaagaacctcttaagaaatgtatcttgtgtggaaagcatgtagattataagaatgtacagctacaggtctttgtgggaagaaacagaaagaaatcacaaaagcaattaagagagctcaaataatggggtttatgccagttacatacaaggatcctgcatatctcaaggaccctaaagtttgtaacatcagatatcgggaataaattctatcacgttaccactaataaacttattttacagtaagtggttgtatgatgccaatactgactcaaaccaacctttggatagaaaagtgtttgaggagtgaggtaaagaatgacacttccccttcataccaatgtccattaagcagattgcttatttaaaatgttaacactcatcacattttatctatgttgaataaaagtggttctgtgtgattgtcatttatatctgatccccaaatagctcatacaataatccattcaatagaatggaattaaaactgttcagaatgattttccaactagcaaatataagtatgcctggttaagatatcttccctttgtagaaatgttacattgggatggatagtggtgctgtcacagaaggacaaaatattcctagacgagtctatcctcaaaccagtagtgtcttttacatgaagagatgatttacacctaatagacattgaatatgatagacatacatgtatatatgtatcagttctgagttccactggcctatcc

SEQ ID NO: 286871 - DNA, 749 bp, Homo sapiens
ccataaatctgctggctttcaggagaacacgtcttgaagcacagctgaacttgaatcttttctgtggaaaaataattgaaaatatgaattaataattcttctcttgttgaagctgacagaaccaaggacacacaccttgttaacgacgccctcaaggctgtgaggagaaagacaaccgggtgaagcaacgctgggaattcaacgcatcaattaccttcccaggtaacagcagctacttgagctcctaagagttgaccttcagctgctgtcatggaaaatagtgggggtcaactagacatcaaagatgaaaggccaggcctccagcacaactttctctgtaagctcgatagtggctttctcaaagaaatccttttctcaaaaaaatttcttgtaaagacagggtcttgttctgtcacccaggctggactgcagtgcatggctcactgcagcctcaacctcccgggctagagtgatcctccccttttctgaggagctcagaccacaagcgtgcaccactgtgcccagctgatttataaactttttttttagagacagggtttcaccatgttggccaggctgttttcttttcttctctttttttgagatggagtttcactcttgttgcccaggctggagggcagtggcgcgatcttggctcactgcaacctccgcctcccaggttcaagtgattctcctgcctcccaagcagctgggattacagcgtagctgggattacaggcatgcgtcac

SEQ ID NO: 286872 - DNA, 880 bp, Homo sapiens
ctgacaccttgagtgcagcctgtgagaccctgagcagaggttcagcagtcccctccccggactcctgccacacagaagccatgaggcatccccatcacacactaggcttggtgactgcacttgagggactcacaggacttagcctaccatcatactagtggctgggatttactacggtgaaaagatgcgacgcagaattagtaacaggaagatgcatttggggtgagggccggaggaaaccagctgacagaaccaaggacacacaccttgttaacgacgccctcaaggctgtgaggagaaagacaaccgggtgaagcaacgctgggaattcaacgcatcaattaccttcccaggtaacagcagctacttgagctcctaagagttgaccttcagctgctgtcatggaaaatagtgggggtcaactagacatcaaagatgaaaggccaggcctccagcacaactttctctgtaagctcgatagtggctttctcaaagaaatccttttctcaaaaaaatttcttgtaaagacagggtcttgttctgtcacccaggctggactgcagtgcatggctcactgcagcctcaacctcccgggctagagtgatcctccccttttctgaggagctcagaccacaagcgtgcaccactgtgcccagctgatttataaactttttttttagagacagggtttcaccatgttggccaggctgttttcttttcttctctttttttgagatggagtttcactcttgttgcccaggctggagggcagtggcgcgatcttggctcactgcaacctccgcctcccaggttcaagtgattctcctgcctcccaagcagctgggattacagcgtagctgggattacaggcatgcgtcac

SEQ ID NO: 286873 - DNA, 1217 bp, Homo sapiens
taggttccaagaccaaagattaaattaataaaaggtgaagctggacaaaatctgctggaaatgatggcctgtgaccgactgagccaatcagggcatatgttgctaaacttaagtcgtggcaagcaagattttttaaaagaggttgttgaaacttttgccaacaaaagcgggcagtctgtgttatataatgctctgttttctagtcagtcatctaaggatacatcttttcttggtagcgatgatattggaaacattgatgtacaagaaccagagcttgaagatttggctagatacgatgttggtgctattcaagcacataatggtagtcttcagcaccttacttggcttggcttacagtggaattcattgcctgctttacctggaatccgaaaatggctaaaacagcttttccatcatttgccccaggaaacctcaaggcttgaaacaaatgcacctgaatcaatatgtattttagatcttgaagtatttctccttggagtagtatataccagccacttacaattaaaggagaaatgtaattctcaccacagctcctatcagccgttatgcctgccccttcctgtgtgtaaacggctttgtacagagagacaaaaatcttggtgggatgcggtttgtactctgattcacagaaaagcagtgtaagtagtaaaacaaaaatattgctttcacttagtgcgtaggttttaccggggatttaatcctcatgtgaagatttaatttgtcatgtgacccattaacatatatgtatgtaagcgctgaactgtgtatttagaaaacaattttagtaaattgaagtattttttagacctggaaactcagcagaattgagacttgtagttcagcatgaaataaacactctaagagcccaggaaaaacatggccttcaacctgctctgcttgtacattgggcaaaatgccttcagaaaatggtgagttttaaagtataagcatttttaaagaacattaccttaattttttaaaatcatgcactttttattgaaagtttttttgttcagaaaacagcagcttggtcatattatgacagatgtgttttttattgctgcaaaatagttaatgtagttaaatataagcacttagaggagcaatgcctggcacacagtgaatgttacatattagctgagctgttactgttattccttaataattaagttctgataattattcagcctgaaaat

SEQ ID NO: 286874 - DNA, 875 bp, Homo sapiens
ggcggcggaagtgcgcagccgcgcggcattctggggccggaagtggggggggtgcacgcttcgggttggtgtcatggcagctgcggggagccgcaagaggcgcctggcggagctgacggtggacgagttcctagcttcgggctttgactccgagtccgaatccgagtccgaaaattctccacaagcggagacacgggaagcacgcgaggctgcccggagtccggataagccgggcgggagcccctcggccagccggcgtaaaggccgtgcctctgagcacaaagaccagctctctcggctgaaggacagagaccccgagttctacaagttcctgcaggagaatgaccagagcctgctaaacttcagcgactcggacagctctgaggaggaagaggggccgttccactccctgccagatgtgctggaggaagccagtgaggaggaggatggagcggaggaaggagaagatggggacagagtccccagagggctgaaggggaagaagaattctgttcctgtgaccgtcgccatggttgagagatggaagcaggcagcaaagcaacgcctcactccaaagctgttccatgaagtggtacaggcgttccgagcagctgtggccaccacccgaggggaccaggaaagtgctgaggccaacaaattccaggtcacggacagtgctgcattcaatgctctggttaccttctgcatcaagagacctcattggctgtctccagaagctgctgtttggaaaggtggcaaaggatagcagcagcaaatgtgggccaaaggaaaccagtctgcggcagttggtggtgcctgggcgacccagaggtgctgagtaccagctgctgggcttagggacctcgtgtggtctc

SEQ ID NO: 286875 - DNA, 385 bp, Homo sapiens
  misc_feature (380)..(380): n is a, c, g, or t
ttcttccttaaccgcaggcgcctggcggagctgacggtggacgagttcctagcttcgggctttgactccgagtccgaatccgagtccgaaaattctccacaagcggagacacgggaagcacgcgaggctgcccggagtgtttatcgatgccactcccttgtgttacctttcattgaagtttctcccgagtgataggcactgtgcatattaataaacttgattgtttttctcttgtttgtcttttgctactgaagtctgtttgaactatgaatttatgagcgtcgaggagaaattacacttcctaccccactattccattaagagaatgaaaagacaagcccagattggaagaatatcttttctatctgtgcattcgatanacacc

SEQ ID NO: 286876 - DNA, 307 bp, Homo sapiens
tgttctagaggatccgcgaagcacagaggaggacgacaccgagggattctcggagaagagggggctcaccagtctctggcccagctggggccaacctcagtgttgccaggcttctggtgccagcgccttccctccttgaagtgaaggcctactgggattggtaactctgtccccaggcctgtgacctcccagttcctccccagggctcctctccacctgctggaagtcagcggagggaagggtgttgggagcctggccaccctcctgcccccactgtgactttgctggtggaccctgtgggtgggag

SEQ ID NO: 286877 - DNA, 2799 bp, Homo sapiens
taagggctaggtgcgaggcctgggggttaccggggtgcacgcttcgggttggtgtcatggcagctgcggggagccgcaagaggcgcctggcggagctgacggtggacgagttcctagcttcgggctttgactccgagtccgaatccgagtccgaaaattctccacaagcggagacacgggaagcacgcgaggctgcccggagtccggataagccgggcgggagcccctcggccagccggcgtaaaggccgtgcctctgagcacaaagaccagctctctcggctgaaggacagagaccccgagttctacaagttcctgcaggagaatgaccagagcctgctaaacttcagcgactcggacagctctgaggaggaagaggggccgttccactccctgccagatgtgctggaggaagccagtgaggaggaggatggagcggaggaaggagaagatggggacagagtccccagagggctgaaggggaagaagaattctgttcctgtgaccgtcgccatggttgagagatggaagcaggcagcaaagcaacgcctcactccaaagctgttccatgaagtggtacaggcgttccgagcagctgtggccaccacccgaggggaccaggaaagtgctgaggccaacaaattccaggtcacggacagtgctgcattcaatgctctggttaccttctgcatcaagagacctcattggctgtctccagaagctgctgtttggaaaggtggcaaaggatagcagcaggatgctgcagccgtccagcagcccgctctgggggaagcttcgtgtggacatcaaggcttacctgggctcggccatacagctggtgtcctgtctgtcggagacgacggtgttggcggccgtgctgcggcacatcagcgtgctggtgccctgcttcctgaccttccccaagcagtgccgcatgctgctcaagagaatggtggtcgtatggagcactggggaggagtctctgcgggtgctggctttcctggtcctcagcagagtctgccggcacaagaaggacactttccttggccccgtcctcaagcaaatgtacatcacgtatgtgaggaactgcaagttcacctcgcctggtgccctccccttcatcagtttcatgcagtggaccttgacggagctgctggccctggagccgggtgtggcctaccagcacgccttcctctacatccgccagctcgccatacacctgcgcaacgccatgaccacccgcaagaaggaaacataccagtctgtgtacaactggcagtatgtgcactgcctcttcctgtggtgccgggtcctgagcactgcgggccccagcgaagccctccagcccttggtctacccccttgcccaagtcatcattggctgtatcaagctcatccccactgcccgcttctacccgctgcgaatgcactgcatccgtgccctgacgctgctctcggggagctcgggggccttcatcccggtgctgcctttcatcctggagatgttccagcaggtcgacttcaacaggaagccagggcgcatgagctccaagcccatcaacttctccgtgatcctgaagctgtccaatgtcaacctgcaggagaaggcgtaccgggacggcctggtggagcagctgtacgacctcaccctggagtacctgcacagccaggcacactgcatcggcttcccggagctggtgctgcctgtggtcctgcagctgaagtcgttcctccgggagtgcaaggtggccaactactgccggcaggtgcagcagctgcttgggaaggttcaggagaactcggcatacatctgcagccgccgccagagggtttccttcggcgtctctgagcagcaggcagtggaagcctgggagaagctgacccgggaagaggggacacccttgaccttgtactacagccactggcgcaagctgcgtgaccgggagatccagctggagatcagtggcaaagagcggctggaagacctgaacttccctgagatcaaacgaaggaagatggctgacaggaaggatgaggacaggaagcaatttaaagacctctttgacctgaacagctctgaagaggacgacaccgagggattctcggagagagggatactgaggcccctgagcactcggcatggggtggaagacgatgaagaggacgaggaggagggcgaggaggacagcagcaactcggagggatggagacccagacgcagaggcggggctggcccctggggagctgcagcagctggcccaggggccggaggacgagctggaggatctgcagctctcagaggacgactgaggcagcccatctggggggcctgtaggggctgccgggctggtggccagtgtttccacctccctggcagtcaggcctagaggctggcgtctgtgcagttgggggaggcagtagacacgggacaggctttattatttatttttcagcatgaaagaccaaacgtatcgagagctgggctgggctgggctggtgtggctgctgaagccccacagctgtgggctgctgaagtcagctccgcgggggagctgaccctgacgtcagcagaccgagaccagtcccagttccagggggaggcctgcaggcccctggccccttccaccacctctgccctccgtctgcagacctcgtccatctgcaccaggctctgccttcactcccccaagtctttggaaatttgttcttttcctttgaagtcacattttcttttaaaattttttgttttgcatccgaaaccgaaagaaataaagcggtgggaggcagggccattgtgttga

SEQ ID NO: 286878 - DNA, 2816 bp, Homo sapiens
ggcggcggaagtgcgcagccgcgcggcattctggggccggaagtggggggggtgcacgcttcgggttggtgtcatggcagctgcggggagccgcaagaggcgcctggcggagctgacggtggacgagttcctagcttcgggctttgactccgagtccgaatccgagtccgaaaattctccacaagcggagacacgggaagcacgcgaggctgcccggagtccggataagccgggcgggagcccctcggccagccggcgtaaaggccgtgcctctgagcacaaagaccagctctctcggctgaaggacagagaccccgagttctacaagttcctgcaggagaatgaccagagcctgctaaacttcagcgactcggacagctctgaggaggaagaggggccgttccactccctgccagatgtgctggaggaagccagtgaggaggaggatggagcggaggaaggagaagatggggacagagtccccagagggctgaaggggaagaagaattctgttcctgtgaccgtcgccatggttgagagatggaagcaggcagcaaagcaacgcctcactccaaagctgttccatgaagtggtacaggcgttccgagcagctgtggccaccacccgaggggaccaggaaagtgctgaggccaacaaattccaggtcacggacagtgctgcattcaatgctctggttaccttctgcatcaagagacctcattggctgtctccagaagctgctgtttggaaaggtggcaaaggatagcagcaggatgctgcagccgtccagcagcccgctctgggggaagcttcgtgtggacatcaaggcttacctgggctcggccatacagctggtgtcctgtctgtcggagacgacggtgttggcggccgtgctgcggcacatcagcgtgctggtgccctgcttcctgaccttccccaagcagtgccgcatgctgctcaagagaatggtggtcgtatggagcactggggaggagtctctgcgggtgctggctttcctggtcctcagcagagtctgccggcacaagaaggacactttccttggccccgtcctcaagcaaatgtacatcacgtatgtgaggaactgcaagttcacctcgcctggtgccctccccttcatcagtttcatgcagtggaccttgacggagctgctggccctggagccgggtgtggcctaccagcacgccttcctctacatccgccagctcgccatacacctgcgcaacgccatgaccacccgcaagaaggaaacataccagtctgtgtacaactggcagtatgtgcactgcctcttcctgtggtgccgggtcctgagcactgcgggccccagcgaagccctccagcccttggtctacccccttgcccaagtcatcattggctgtatcaagctcatccccactgcccgcttctacccgctgcgaatgcactgcatccgtgccctgacgctgctctcggggagctcgggggccttcatcccggtgctgcctttcatcctggagatgttccagcaggtcgacttcaacaggaagccagggcgcatgagctccaagcccatcaacttctccgtgatcctgaagctgtccaatgtcaacctgcaggagaaggcgtaccgggacggcctggtggagcagctgtacgacctcaccctggagtacctgcacagccaggcacactgcatcggcttcccggagctggtgctgcctgtggtcctgcagctgaagtcgttcctccgggagtgcaaggtggccaactactgccggcaggtgcagcagctgcttgggaaggttcaggagaactcggcatacatctgcagccgccgccagagggtttccttcggcgtctctgagcagcaggcagtggaagcctgggagaagctgacccgggaagaggggacacccttgaccttgtactacagccactggcgcaagctgcgtgaccgggagatccagctggagatcagtggcaaagagcggctggaagacctgaacttccctgagatcaaacgaaggaagatggctgacaggaaggatgaggacaggaagcaatttaaagacctctttgacctgaacagctctgaagaggacgacaccgagggattctcggagagagggatactgaggcccctgagcactcggcatggggtggaagacgatgaagaggacgaggaggagggcgaggaggacagcagcaactcggagggatggagacccagacgcagaggcggggctggcccctggggagctgcagcagctggcccaggggccggaggacgagctggaggatctgcagctctcagaggacgactgaggcagcccatctggggggcctgtaggggctgccgggctggtggccagtgtttccacctccctggcagtcaggcctagaggctggcgtctgtgcagttgggggaggcagtagacacgggacaggctttattatttatttttcagcatgaaagaccaaacgtatcgagagctgggctgggctgggctggtgtggctgctgaagccccacagctgtgggctgctgaagtcagctccgcgggggagctgaccctgacgtcagcagaccgagaccagtcccagttccagggggaggcctgcaggcccctggccccttccaccacctctgccctccgtctgcagacctcgtccatctgcaccaggctctgccttcactcccccaagtctttggaaatttgttcttttcctttgaagtcacattttcttttaaaattttttgttttgcatccgaaaccgaaagaaataaagcggtgggaggcagggccattgtgttga

SEQ ID NO: 286879 - DNA, 2790 bp, Homo sapiens
aacgatccgtttcatccccttgggggtgcacgcttcgggttggtgtcatggcagctgcggggagccgcaagaggcgcctggcggagctgacggtggacgagttcctagcttcgggctttgactccgagtccgaatccgagtccgaaaattctccacaagcggagacacgggaagcacgcgaggctgcccggagtccggataagccgggcgggagcccctcggccagccggcgtaaaggccgtgcctctgagcacaaagaccagctctctcggctgaaggacagagaccccgagttctacaagttcctgcaggagaatgaccagagcctgctaaacttcagcgactcggacagctctgaggaggaagaggggccgttccactccctgccagatgtgctggaggaagccagtgaggaggaggatggagcggaggaaggagaagatggggacagagtccccagagggctgaaggggaagaagaattctgttcctgtgaccgtcgccatggttgagagatggaagcaggcagcaaagcaacgcctcactccaaagctgttccatgaagtggtacaggcgttccgagcagctgtggccaccacccgaggggaccaggaaagtgctgaggccaacaaattccaggtcacggacagtgctgcattcaatgctctggttaccttctgcatcaagagacctcattggctgtctccagaagctgctgtttggaaaggtggcaaaggatagcagcaggatgctgcagccgtccagcagcccgctctgggggaagcttcgtgtggacatcaaggcttacctgggctcggccatacagctggtgtcctgtctgtcggagacgacggtgttggcggccgtgctgcggcacatcagcgtgctggtgccctgcttcctgaccttccccaagcagtgccgcatgctgctcaagagaatggtggtcgtatggagcactggggaggagtctctgcgggtgctggctttcctggtcctcagcagagtctgccggcacaagaaggacactttccttggccccgtcctcaagcaaatgtacatcacgtatgtgaggaactgcaagttcacctcgcctggtgccctccccttcatcagtttcatgcagtggaccttgacggagctgctggccctggagccgggtgtggcctaccagcacgccttcctctacatccgccagctcgccatacacctgcgcaacgccatgaccacccgcaagaaggaaacataccagtctgtgtacaactggcagtatgtgcactgcctcttcctgtggtgccgggtcctgagcactgcgggccccagcgaagccctccagcccttggtctacccccttgcccaagtcatcattggctgtatcaagctcatccccactgcccgcttctacccgctgcgaatgcactgcatccgtgccctgacgctgctctcggggagctcgggggccttcatcccggtgctgcctttcatcctggagatgttccagcaggtcgacttcaacaggaagccagggcgcatgagctccaagcccatcaacttctccgtgatcctgaagctgtccaatgtcaacctgcaggagaaggcgtaccgggacggcctggtggagcagctgtacgacctcaccctggagtacctgcacagccaggcacactgcatcggcttcccggagctggtgctgcctgtggtcctgcagctgaagtcgttcctccgggagtgcaaggtggccaactactgccggcaggtgcagcagctgcttgggaaggttcaggagaactcggcatacatctgcagccgccgccagagggtttccttcggcgtctctgagcagcaggcagtggaagcctgggagaagctgacccgggaagaggggacacccttgaccttgtactacagccactggcgcaagctgcgtgaccgggagatccagctggagatcagtggcaaagagcggctggaagacctgaacttccctgagatcaaacgaaggaagatggctgacaggaaggatgaggacaggaagcaatttaaagacctctttgacctgaacagctctgaagaggacgacaccgagggattctcggagagagggatactgaggcccctgagcactcggcatggggtggaagacgatgaagaggacgaggaggagggcgaggaggacagcagcaactcggagggatggagacccagacgcagaggcggggctggcccctggggagctgcagcagctggcccaggggccggaggacgagctggaggatctgcagctctcagaggacgactgaggcagcccatctggggggcctgtaggggctgccgggctggtggccagtgtttccacctccctggcagtcaggcctagaggctggcgtctgtgcagttgggggaggcagtagacacgggacaggctttattatttatttttcagcatgaaagaccaaacgtatcgagagctgggctgggctgggctggtgtggctgctgaagccccacagctgtgggctgctgaagtcagctccgcgggggagctgaccctgacgtcagcagaccgagaccagtcccagttccagggggaggcctgcaggcccctggccccttccaccacctctgccctccgtctgcagacctcgtccatctgcaccaggctctgccttcactcccccaagtctttggaaatttgttcttttcctttgaagtcacattttcttttaaaattttttgttttgcatccgaaaccgaaagaaataaagcggtgggaggcagggccattgtgttga

SEQ ID NO: 286880 - DNA, 3392 bp, Homo sapiens
taagggctaggtgcgaggcctgggggttaccggggtgcacgcttcgggttggtgtcatggcagctgcggggagccgcaagaggcgcctggcggagctgacggtggacgagttcctagcttcgggctttgactccgagtccgaatccgagtccgaaaattctccacaagcggagacacgggaagcacgcgaggctgcccggagtccggataagccgggcgggagcccctcggccagccggcgtaaaggccgtgcctctgagcacaaagaccagctctctcggctgaaggacagagaccccgagttctacaagttcctgcaggagaatgaccagagcctgctaaacttcagcgactcggacagctctgaggaggaagaggggccgttccactccctgccagatgtgctggaggaagccagtgaggaggaggatggagcggaggaaggagaagatggggacagagtccccagagggctgaaggggaagaagaattctgttcctgtgaccgtcgccatggttgagagatggaagcaggcagcaaagcaacgcctcactccaaagctgttccatgaagtggtacaggcgttccgagcagctgtggccaccacccgaggggaccaggaaagtgctgaggccaacaaattccaggtcacggacagtgctgcattcaatgctctggttaccttctgcatcaagagacctcattggctgtctccagaagctgctgtttggaaaggtggcaaaggatagcagcaggatgctgcagccgtccagcagcccgctctgggggaagcttcgtgtggacatcaaggcttacctgggctcggccatacagctggtgtcctgtctgtcggagacgacggtgttggcggccgtgctgcggcacatcagcgtgctggtgccctgcttcctgaccttccccaagcagtgccgcatgctgctcaagagaatggtggtcgtatggagcactggggaggagtctctgcgggtgctggctttcctggtcctcagcagagtctgccggcacaagaaggacactttccttggccccgtcctcaagcaaatgtacatcacgtatgtgaggaactgcaagttcacctcgcctggtgccctccccttcatcagtttcatgcagtggaccttgacggagctgctggccctggagccgggtgtggcctaccagcacgccttcctctacatccgccagctcgccatacacctgcgcaacgccatgaccacccgcaagaaggaaacataccagtctgtgtacaactggcagtatgtgcactgcctcttcctgtggtgccgggtcctgagcactgcgggccccagcgaagccctccagcccttggtctacccccttgcccaagtcatcattggctgtatcaagctcatccccactgcccgcttctacccgctgcgaatgcactgcatccgtgccctgacgctgctctcggggagctcgggggccttcatcccggtgctgcctttcatcctggagatgttccagcaggtcgacttcaacaggaagccagggcgcatgagctccaagcccatcaacttctccgtgatcctgaagctgtccaatgtcaacctgcaggagaaggcgtaccgggacggcctggtggagcagctgtacgacctcaccctggagtacctgcacagccaggcacactgcatcggcttcccggagctggtgctgcctgtggtcctgcagctgaagtcgttcctccgggagtgcaaggtggccaactactgccggcaggtgcagcagctgcttgggaaggttcaggagaactcggcatacatctgcagccgccgccagagggtttccttcggcgtctctgagcagcaggcagtggaagcctgggagaagctgacccgggaagaggggacacccttgaccttgtactacagccactggcgcaagctgcgtgaccgggagatccagctggagatcagtggcaaagagcggctggaagacctgaacttccctgagatcaaacgaaggaagatggctgacaggaaggatgaggacaggaagcaatttaaagacctctttgacctgaacagctctgaagaggacgacaccgagggattctcggagagagggatactgaggcccctgagcactcggcatggggtggaagacgatgaagaggacgaggaggagggcgaggaggacagcagcaactcggagggatggagacccagacgcagaggcggggctggcccctggggagctgcagcagctggcccaggggccggaggacgagctggaggatctgcagctctcagaggacgactgaggcagcccatctggggggcctgtaggggctgccgggctggtggccagtgtttccacctccctggcagtcaggcctagaggctggcgtctgtgcagttgggggaggcagtagacacgggacaggctttattatttatttttcagcatgaaagaccaaacgtatcgagagctgggctgggctgggctggtgtggctgctgaagccccacagctgtgggctgctgaagtcagctccgcgggggagctgaccctgacgtcagcagaccgagaccagtcccagttccagggggaggcctgcaggcccctggccccttccaccacctctgccctccgtctgcagacctcgtccatctgcaccaggctctgccttcactcccccaagtctttggaaatttgttcttttcctttgaagtcacattttcttttaaaattttttgttttgcatccgaaaccgaaagaaataaagcggtgggaggcagggccattgtgttgagtggtgggaaggttgccgtcctggctgcaggacgcctctcggaaagagatgttcacgtcccagtgggtgtggactcttctcttcatgatacggatgtgcggaccatcctcctgcttcaagcctgccgccgccacaggtggggccactcccgtcgctgtcaccatcgctggcagagaagctgggagttcgctccttcttcaggttccgggcggcaggcagggcgactgtcctcttgtctgccagccgcaccggttcaccggggaggatattcggcagcccgggcagtcgcagatcggaggatgcacctgcaggatccccttggacataagcgtcttcagacttttcccttccgagcggagggagcggcccgcgagccgcaagcgctgtggcccaagctggggggaggtgcagcggggggcgatctgtccgtgttcaccgaggcctccgcgcgcggcgggggtgtccccgcgcagccctggagctgcagcgccccctcggccgagccggaggctcccgggtgtccgagtcgggtagggggtggggtcggggcccgcgggtcccggcagcgaagggaggggcggcggcacctttgt

SEQ ID NO: 286881 - DNA, 3358 bp, Homo sapiens
taagggctaggtgcgaggcctgggggttaccggggtgcacgcttcgggttggtgtcatggcagctgcggggagccgcaagaggcgcctggcggagctgacggtggacgagttcctagcttcgggctttgactccgagtccgaatccgagtccgaaaattctccacaagcggagacacgggaagcacgcgaggctgcccggagtccggataagccgggcgggagcccctcggccagccggcgtaaaggccgtgcctctgagcacaaagaccagctctctcggctgaaggacagagaccccgagttctacaagttcctgcaggagaatgaccagagcctgctaaacttcagcgactcggacagctctgaggaggaagaggggccgttccactccctgccagatgtgctggaggaagccagtgaggaggaggatggagcggaggaaggagaagatggggacagagtccccagagggctgaaggggaagaagaattctgttcctgtgaccgtcgccatggttgagagatggaagcaggcagcaaagcaacgcctcactccaaagctgttccatgaagtggtacaggcgttccgagcagctgtggccaccacccgaggggaccaggaaagtgctgaggccaacaaattccaggtcacggacagtgctgcattcaatgctctggttaccttctgcatcaagagacctcattggctgtctccagaagctgctgtttggaaaggtggcaaaggatagcagcaggatgctgcagccgtccagcagcccgctctgggggaagcttcgtgtggacatcaaggcttacctgggctcggccatacagctggtgtcctgtctgtcggagacgacggtgttggcggccgtgctgcggcacatcagcgtgctggtgccctgcttcctgaccttccccaagcagtgccgcatgctgctcaagagaatggtggtcgtatggagcactggggaggagtctctgcgggtgctggctttcctggtcctcagcagagtctgccggcacaagaaggacactttccttggccccgtcctcaagcaaatgtacatcacgtatgtgaggaactgcaagttcacctcgcctggtgccctccccttcatcagtttcatgcagtggaccttgacggagctgctggccctggagccgggtgtggcctaccagcacgccttcctctacatccgccagctcgccatacacctgcgcaacgccatgaccacccgcaagaaggaaacataccagtctgtgtacaactggcagtatgtgcactgcctcttcctgtggtgccgggtcctgagcactgcgggccccagcgaagccctccagcccttggtctacccccttgcccaagtcatcattggctgtatcaagctcatccccactgcccgcttctacccgctgcgaatgcactgcatccgtgccctgacgctgctctcggggagctcgggggccttcatcccggtgctgcctttcatcctggagatgttccagcaggtcgacttcaacaggaagccagggcgcatgagctccaagcccatcaacttctccgtgatcctgaagctgtccaatgtcaacctgcaggagaaggcgtaccgggacggcctggtggagcagctgtacgacctcaccctggagtacctgcacagccaggcacactgcatcggcttcccggagctggtgctgcctgtggtcctgcagctgaagtcgttcctccgggagtgcaaggtggccaactactgccggcaggtgcagcagctgcttgggaaggttcaggagaactcggcatacatctgcagccgccgccagagggtttccttcggcgtctctgagcagcaggcagtggaagcctgggagaagctgacccgggaagaggggacacccttgaccttgtactacagccactggcgcaagctgcgtgaccgggagatccagctggagatcagtggcaaagagcggctggaagacctgaacttccctgagatcaaacgaaggaagatggctgacaggaaggatgaggacaggaagcaatttaaagacctctttgacctgaacagctctgaagaggacgacaccgagggattctcggagagagggatactgaggcccctgagcactcggcatggggtggaagacgatgaagaggacgaggaggagggcgaggaggacagcagcaactcggagggatggagacccagacgcagaggcggggctggcccctggggagctgcagcagctggcccaggggccggaggacgagctggaggatctgcagctctcagaggacgactgaggcagcccatctggggggcctgtaggggctgccgggctggtggccagtgtttccacctccctggcagtcaggcctagaggctggcgtctgtgcagttgggggaggcagtagacacgggacaggctttattatttatttttcagcatgaaagaccaaacgtatcgagagctgggctgggctgggctggtgtggctgctgaagccccacagctgtgggctgctgaagtcagctccgcgggggagctgaccctgacgtcagcagaccgagaccagtcccagttccagggggaggcctgcaggcccctggccccttccaccacctctgccctccgtctgcagacctcgtccatctgcaccaggctctgccttcactcccccaagtctttggaaatttgttcttttcctttgaagtcacattttcttttaaaattttttgttttgcatccgaaaccgaaagaaataaagcggtgggaggcagggccattgtgttgagtggtggctcctggagatttgtgtggccccacccctacccccggcaacctcaacacagaggctgggaagggtcgggggcccctggaagtagagccaaggtcccattctcctgcttgggtgaagtttgaccggcaagggcgtggccccccctccatagggggacgtggccgtcgtgggggacaagggctgctctcctgtgccgagttctcgctccggggcccgcagggttggtggctgcagtggcagagccacggggaagctggccacgtagaaaactcggcccaggcgcctggccacctgggcccggatcttgagggcgggccccagcttcagccccatgttggtcagcaggtgctcctccgtcagcagtggcagggtctccccgtcgatcccctgctccctgaagacctggaagggggagggagggagggtcaggacccgggtgctgctccatcctccagcccagcagagccaagaggagctgtttgtgcagctcacggaaattttttaaaaacagtgatctgttgggtttgagtgtcaggcagaaaacacctggcaa

SEQ ID NO: 286882 - DNA, 3457 bp, Homo sapiens
taagggctaggtgcgaggcctgggggttaccggggtgcacgcttcgggttggtgtcatggcagctgcggggagccgcaagaggcgcctggcggagctgacggtggacgagttcctagcttcgggctttgactccgagtccgaatccgagtccgaaaattctccacaagcggagacacgggaagcacgcgaggctgcccggagtccggataagccgggcgggagcccctcggccagccggcgtaaaggccgtgcctctgagcacaaagaccagctctctcggctgaaggacagagaccccgagttctacaagttcctgcaggagaatgaccagagcctgctaaacttcagcgactcggacagctctgaggaggaagaggggccgttccactccctgccagatgtgctggaggaagccagtgaggaggaggatggagcggaggaaggagaagatggggacagagtccccagagggctgaaggggaagaagaattctgttcctgtgaccgtcgccatggttgagagatggaagcaggcagcaaagcaacgcctcactccaaagctgttccatgaagtggtacaggcgttccgagcagctgtggccaccacccgaggggaccaggaaagtgctgaggccaacaaattccaggtcacggacagtgctgcattcaatgctctggttaccttctgcatcaagagacctcattggctgtctccagaagctgctgtttggaaaggtggcaaaggatagcagcaggatgctgcagccgtccagcagcccgctctgggggaagcttcgtgtggacatcaaggcttacctgggctcggccatacagctggtgtcctgtctgtcggagacgacggtgttggcggccgtgctgcggcacatcagcgtgctggtgccctgcttcctgaccttccccaagcagtgccgcatgctgctcaagagaatggtggtcgtatggagcactggggaggagtctctgcgggtgctggctttcctggtcctcagcagagtctgccggcacaagaaggacactttccttggccccgtcctcaagcaaatgtacatcacgtatgtgaggaactgcaagttcacctcgcctggtgccctccccttcatcagtttcatgcagtggaccttgacggagctgctggccctggagccgggtgtggcctaccagcacgccttcctctacatccgccagctcgccatacacctgcgcaacgccatgaccacccgcaagaaggaaacataccagtctgtgtacaactggcagtatgtgcactgcctcttcctgtggtgccgggtcctgagcactgcgggccccagcgaagccctccagcccttggtctacccccttgcccaagtcatcattggctgtatcaagctcatccccactgcccgcttctacccgctgcgaatgcactgcatccgtgccctgacgctgctctcggggagctcgggggccttcatcccggtgctgcctttcatcctggagatgttccagcaggtcgacttcaacaggaagccagggcgcatgagctccaagcccatcaacttctccgtgatcctgaagctgtccaatgtcaacctgcaggagaaggcgtaccgggacggcctggtggagcagctgtacgacctcaccctggagtacctgcacagccaggcacactgcatcggcttcccggagctggtgctgcctgtggtcctgcagctgaagtcgttcctccgggagtgcaaggtggccaactactgccggcaggtgcagcagctgcttgggaaggttcaggagaactcggcatacatctgcagccgccgccagagggtttccttcggcgtctctgagcagcaggcagtggaagcctgggagaagctgacccgggaagaggggacacccttgaccttgtactacagccactggcgcaagctgcgtgaccgggagatccagctggagatcagtggcaaagagcggctggaagacctgaacttccctgagatcaaacgaaggaagatggctgacaggaaggatgaggacaggaagcaatttaaagacctctttgacctgaacagctctgaagaggacgacaccgagggattctcggagagagggatactgaggcccctgagcactcggcatggggtggaagacgatgaagaggacgaggaggagggcgaggaggacagcagcaactcggagggatggagacccagacgcagaggcggggctggcccctggggagctgcagcagctggcccaggggccggaggacgagctggaggatctgcagctctcagaggacgactgaggcagcccatctggggggcctgtaggggctgccgggctggtggccagtgtttccacctccctggcagtcaggcctagaggctggcgtctgtgcagttgggggaggcagtagacacgggacaggctttattatttatttttcagcatgaaagaccaaacgtatcgagagctgggctgggctgggctggtgtggctgctgaagccccacagctgtgggctgctgaagtcagctccgcgggggagctgaccctgacgtcagcagaccgagaccagtcccagttccagggggaggcctgcaggcccctggccccttccaccacctctgccctccgtctgcagacctcgtccatctgcaccaggctctgccttcactcccccaagtctttggaaatttgttcttttcctttgaagtcacattttcttttaaaattttttgttttgcatccgaaaccgaaagaaataaagcggtgggaggcagggccattgtgttgagtggtggctcctggagatttgtgtggccccacccctacccccggcaacctcaacacagaggctgggaagggtcgggggcccctggaagtagagccaaggtcccattctcctgcttgggtgaagtttgaccggcaagggcgtggccccccctccatagggggacgtggccgtcgtgggggacaagggctgctctcctgtgccgagttctcgctccggggcccgcagggttggtggctgcagtggcagagccacggggaagctggccacgtagaaaactcggcccaggcgcctggccacctgcagagagatggcctggtgggggctgtcgcacacccacccagagctttctgcccagctgtggtctggagaccctgacctcactccccagcgtctcacctgggcccggatcttgagggcgggccccagcttcagccccatgttggtcagcaggtgctcctccgtcagcagtggcagggtctccccgtcgatcccctgctccctgaagacctggaagggggagggagggagggtcaggacccgggtgctgctccatcctccagcccagcagagccaagaggagctgtttgtgcagctcacggaaattttttaaaaacagtgatctgttgggtttgagtgtcaggcagaaaacacctggcaa

SEQ ID NO: 286883 - DNA, 3237 bp, Homo sapiens
taagggctaggtgcgaggcctgggggttaccggggtgcacgcttcgggttggtgtcatggcagctgcggggagccgcaagaggcgcctggcggagctgacggtggacgagttcctagcttcgggctttgactccgagtccgaatccgagtccgaaaattctccacaagcggagacacgggaagcacgcgaggctgcccggagtccggataagccgggcgggagcccctcggccagccggcgtaaaggccgtgcctctgagcacaaagaccagctctctcggctgaaggacagagaccccgagttctacaagttcctgcaggagaatgaccagagcctgctaaacttcagcgactcggacagctctgaggaggaagaggggccgttccactccctgccagatgtgctggaggaagccagtgaggaggaggatggagcggaggaaggagaagatggggacagagtccccagagggctgaaggggaagaagaattctgttcctgtgaccgtcgccatggttgagagatggaagcaggcagcaaagcaacgcctcactccaaagctgttccatgaagtggtacaggcgttccgagcagctgtggccaccacccgaggggaccaggaaagtgctgaggccaacaaattccaggtcacggacagtgctgcattcaatgctctggttaccttctgcatcaagagacctcattggctgtctccagaagctgctgtttggaaaggtggcaaaggatagcagcaggatgctgcagccgtccagcagcccgctctgggggaagcttcgtgtggacatcaaggcttacctgggctcggccatacagctggtgtcctgtctgtcggagacgacggtgttggcggccgtgctgcggcacatcagcgtgctggtgccctgcttcctgaccttccccaagcagtgccgcatgctgctcaagagaatggtggtcgtatggagcactggggaggagtctctgcgggtgctggctttcctggtcctcagcagagtctgccggcacaagaaggacactttccttggccccgtcctcaagcaaatgtacatcacgtatgtgaggaactgcaagttcacctcgcctggtgccctccccttcatcagtttcatgcagtggaccttgacggagctgctggccctggagccgggtgtggcctaccagcacgccttcctctacatccgccagctcgccatacacctgcgcaacgccatgaccacccgcaagaaggaaacataccagtctgtgtacaactggcagtatgtgcactgcctcttcctgtggtgccgggtcctgagcactgcgggccccagcgaagccctccagcccttggtctacccccttgcccaagtcatcattggctgtatcaagctcatccccactgcccgcttctacccgctgcgaatgcactgcatccgtgccctgacgctgctctcggggagctcgggggccttcatcccggtgctgcctttcatcctggagatgttccagcaggtcgacttcaacaggaagccagggcgcatgagctccaagcccatcaacttctccgtgatcctgaagctgtccaatgtcaacctgcaggagaaggcgtaccgggacggcctggtggagcagctgtacgacctcaccctggagtacctgcacagccaggcacactgcatcggcttcccggagctggtgctgcctgtggtcctgcagctgaagtcgttcctccgggagtgcaaggtggccaactactgccggcaggtgcagcagctgcttgggaaggttcaggagaactcggcatacatctgcagccgccgccagagggtttccttcggcgtctctgagcagcaggcagtggaagcctgggagaagctgacccgggaagaggggacacccttgaccttgtactacagccactggcgcaagctgcgtgaccgggagatccagctggagatcagtggcaaagagcggctggaagacctgaacttccctgagatcaaacgaaggaagatggctgacaggaaggatgaggacaggaagcaatttaaagacctctttgacctgaacagctctgaagaggacgacaccgagggattctcggagagagggatactgaggcccctgagcactcggcatggggtggaagacgatgaagaggacgaggaggagggcgaggaggacagcagcaactcggagggatggagacccagacgcagaggcggggctggcccctggggagctgcagcagctggcccaggggccggaggacgagctggaggatctgcagctctcagaggacgactgaggcagcccatctggggggcctgtaggggctgccgggctggtggccagtgtttccacctccctggcagtcaggcctagaggctggcgtctgtgcagttgggggaggcagtagacacgggacaggctttattatttatttttcagcatgaaagaccaaacgtatcgagagctgggctgggctgggctggtgtggctgctgaagccccacagctgtgggctgctgaagtcagctccgcgggggagctgaccctgacgtcagcagaccgagaccagtcccagttccagggggaggcctgcaggcccctggccccttccaccacctctgccctccgtctgcagacctcgtccatctgcaccaggctctgccttcactcccccaagtctttggaaatttgttcttttcctttgaagtcacattttcttttaaaattttttgttttgcatccgaaaccgaaagaaataaagcggtgggaggcagggccattgtgttgagtggtggctcctggagatttgtgtggccccacccctacccccggcaacctcaacacagaggctgggaagggtcgggggcccctggaagtagagccaaggtcccattctcctgcttgggtgaagtttgaccggcaagggcgtggccccgtaaacttccttcgggccttaaggcccaggagcctcgcagagaccttccgagcggagggagcggcccgcgagccgcaagcgctgtggcccaagctggggggaggtgcagcggggggcgatctgtccgtgttcaccgaggcctccgcgcgcggcgggggtgtccccgcgcagccctggagctgcagcgccccctcggccgagccggaggctcccgggtgtccgagtcgggtagggggtggggtcggggcccgcgggtcccggcagcgaagggaggggcggcggcacctttgt

SEQ ID NO: 286884 - DNA, 2756 bp, Homo sapiens
aacgatccgtttcatccccttgggggtgcacgcttcgggttggtgtcatggcagctgcggggagccgcaagaggcgcctggcggagctgacggtggacgagttcctagcttcgggctttgactccgagtccgaatccgagtccgaaaattctccacaagcggagacacgggaagcacgcgaggctgcccggaccggcgtaaaggccgtgcctctgagcacaaagaccagctctctcggctgaaggacagagaccccgagttctacaagttcctgcaggagaatgaccagagcctgctaaacttcagcgactcggacagctctgaggaggaagaggggccgttccactccctgccagatgtgctggaggaagccagtgaggaggaggatggagcggaggaaggagaagatggggacagagtccccagagggctgaaggggaagaagaattctgttcctgtgaccgtcgccatggttgagagatggaagcaggcagcaaagcaacgcctcactccaaagctgttccatgaagtggtacaggcgttccgagcagctgtggccaccacccgaggggaccaggaaagtgctgaggccaacaaattccaggtcacggacagtgctgcattcaatgctctggttaccttctgcatcaagagacctcattggctgtctccagaagctgctgtttggaaaggtggcaaaggatagcagcaggatgctgcagccgtccagcagcccgctctgggggaagcttcgtgtggacatcaaggcttacctgggctcggccatacagctggtgtcctgtctgtcggagacgacggtgttggcggccgtgctgcggcacatcagcgtgctggtgccctgcttcctgaccttccccaagcagtgccgcatgctgctcaagagaatggtggtcgtatggagcactggggaggagtctctgcgggtgctggctttcctggtcctcagcagagtctgccggcacaagaaggacactttccttggccccgtcctcaagcaaatgtacatcacgtatgtgaggaactgcaagttcacctcgcctggtgccctccccttcatcagtttcatgcagtggaccttgacggagctgctggccctggagccgggtgtggcctaccagcacgccttcctctacatccgccagctcgccatacacctgcgcaacgccatgaccacccgcaagaaggaaacataccagtctgtgtacaactggcagtatgtgcactgcctcttcctgtggtgccgggtcctgagcactgcgggccccagcgaagccctccagcccttggtctacccccttgcccaagtcatcattggctgtatcaagctcatccccactgcccgcttctacccgctgcgaatgcactgcatccgtgccctgacgctgctctcggggagctcgggggccttcatcccggtgctgcctttcatcctggagatgttccagcaggtcgacttcaacaggaagccagggcgcatgagctccaagcccatcaacttctccgtgatcctgaagctgtccaatgtcaacctgcaggagaaggcgtaccgggacggcctggtggagcagctgtacgacctcaccctggagtacctgcacagccaggcacactgcatcggcttcccggagctggtgctgcctgtggtcctgcagctgaagtcgttcctccgggagtgcaaggtggccaactactgccggcaggtgcagcagctgcttgggaaggttcaggagaactcggcatacatctgcagccgccgccagagggtttccttcggcgtctctgagcagcaggcagtggaagcctgggagaagctgacccgggaagaggggacacccttgaccttgtactacagccactggcgcaagctgcgtgaccgggagatccagctggagatcagtggcaaagagcggctggaagacctgaacttccctgagatcaaacgaaggaagatggctgacaggaaggatgaggacaggaagcaatttaaagacctctttgacctgaacagctctgaagaggacgacaccgagggattctcggagagagggatactgaggcccctgagcactcggcatggggtggaagacgatgaagaggacgaggaggagggcgaggaggacagcagcaactcggagggatggagacccagacgcagaggcggggctggcccctggggagctgcagcagctggcccaggggccggaggacgagctggaggatctgcagctctcagaggacgactgaggcagcccatctggggggcctgtaggggctgccgggctggtggccagtgtttccacctccctggcagtcaggcctagaggctggcgtctgtgcagttgggggaggcagtagacacgggacaggctttattatttatttttcagcatgaaagaccaaacgtatcgagagctgggctgggctgggctggtgtggctgctgaagccccacagctgtgggctgctgaagtcagctccgcgggggagctgaccctgacgtcagcagaccgagaccagtcccagttccagggggaggcctgcaggcccctggccccttccaccacctctgccctccgtctgcagacctcgtccatctgcaccaggctctgccttcactcccccaagtctttggaaatttgttcttttcctttgaagtcacattttcttttaaaattttttgttttgcatccgaaaccgaaagaaataaagcggtgggaggcagggccattgtgttga

SEQ ID NO: 286885 - DNA, 2730 bp, Homo sapiens
gtagaggttgttgggtaggagacgtgagtctgccaaaaacgtacctcctggcaatcctgtcttgctagttggtaatccttgtgaagggagtagactgaccctgtaggccactccccgccccctctacttccacttcccactggggtcgctgacttctgcctcctcaccggcgtaaaggccgtgcctctgagcacaaagaccagctctctcggctgaaggacagagaccccgagttctacaagttcctgcaggagaatgaccagagcctgctaaacttcagcgactcggacagctctgaggaggaagaggggccgttccactccctgccagatgtgctggaggaagccagtgaggaggaggatggagcggaggaaggagaagatggggacagagtccccagagggctgaaggggaagaagaattctgttcctgtgaccgtcgccatggttgagagatggaagcaggcagcaaagcaacgcctcactccaaagctgttccatgaagtggtacaggcgttccgagcagctgtggccaccacccgaggggaccaggaaagtgctgaggccaacaaattccaggtcacggacagtgctgcattcaatgctctggttaccttctgcatcaagagacctcattggctgtctccagaagctgctgtttggaaaggtggcaaaggatagcagcaggatgctgcagccgtccagcagcccgctctgggggaagcttcgtgtggacatcaaggcttacctgggctcggccatacagctggtgtcctgtctgtcggagacgacggtgttggcggccgtgctgcggcacatcagcgtgctggtgccctgcttcctgaccttccccaagcagtgccgcatgctgctcaagagaatggtggtcgtatggagcactggggaggagtctctgcgggtgctggctttcctggtcctcagcagagtctgccggcacaagaaggacactttccttggccccgtcctcaagcaaatgtacatcacgtatgtgaggaactgcaagttcacctcgcctggtgccctccccttcatcagtttcatgcagtggaccttgacggagctgctggccctggagccgggtgtggcctaccagcacgccttcctctacatccgccagctcgccatacacctgcgcaacgccatgaccacccgcaagaaggaaacataccagtctgtgtacaactggcagtatgtgcactgcctcttcctgtggtgccgggtcctgagcactgcgggccccagcgaagccctccagcccttggtctacccccttgcccaagtcatcattggctgtatcaagctcatccccactgcccgcttctacccgctgcgaatgcactgcatccgtgccctgacgctgctctcggggagctcgggggccttcatcccggtgctgcctttcatcctggagatgttccagcaggtcgacttcaacaggaagccagggcgcatgagctccaagcccatcaacttctccgtgatcctgaagctgtccaatgtcaacctgcaggagaaggcgtaccgggacggcctggtggagcagctgtacgacctcaccctggagtacctgcacagccaggcacactgcatcggcttcccggagctggtgctgcctgtggtcctgcagctgaagtcgttcctccgggagtgcaaggtggccaactactgccggcaggtgcagcagctgcttgggaaggttcaggagaactcggcatacatctgcagccgccgccagagggtttccttcggcgtctctgagcagcaggcagtggaagcctgggagaagctgacccgggaagaggggacacccttgaccttgtactacagccactggcgcaagctgcgtgaccgggagatccagctggagatcagtggcaaagagcggctggaagacctgaacttccctgagatcaaacgaaggaagatggctgacaggaaggatgaggacaggaagcaatttaaagacctctttgacctgaacagctctgaagaggacgacaccgagggattctcggagagagggatactgaggcccctgagcactcggcatggggtggaagacgatgaagaggacgaggaggagggcgaggaggacagcagcaactcggagggatggagacccagacgcagaggcggggctggcccctggggagctgcagcagctggcccaggggccggaggacgagctggaggatctgcagctctcagaggacgactgaggcagcccatctggggggcctgtaggggctgccgggctggtggccagtgtttccacctccctggcagtcaggcctagaggctggcgtctgtgcagttgggggaggcagtagacacgggacaggctttattatttatttttcagcatgaaagaccaaacgtatcgagagctgggctgggctgggctggtgtggctgctgaagccccacagctgtgggctgctgaagtcagctccgcgggggagctgaccctgacgtcagcagaccgagaccagtcccagttccagggggaggcctgcaggcccctggccccttccaccacctctgccctccgtctgcagacctcgtccatctgcaccaggctctgccttcactcccccaagtctttggaaatttgttcttttcctttgaagtcacattttcttttaaaattttttgttttgcatccgaaaccgaaagaaataaagcggtgggaggcagggccattgtgttga

SEQ ID NO: 286886 - DNA, 3408 bp, Homo sapiens
taagggctaggtgcgaggcctgggggttaccggggtgcacgcttcgggttggtgtcatggcagctgcggggagccgcaagaggcgcctggcggagctgacggtggacgagttcctagcttcgggctttgactccgagtccgaatccgagtccgaaaattctccacaagcggagacacgggaagcacgcgaggctgcccggagtccggataagccgggcgggagcccctcggccagccggcgtaaaggccgtgcctctgagcacaaagaccagctctctcggctgaaggacagagaccccgagttctacaagttcctgcaggagaatgaccagagcctgctaaacttcagcgactcggacagctctgaggaggaagaggggccgttccactccctgccagatgtgctggaggaagccagtgaggaggaggatggagcggaggaaggagaagatggggacagagtccccagagggctgaaggggaagaagaattctgttcctgtgaccgtcgccatggttgagagatggaagcaggcagcaaagcaacgcctcactccaaagctgttccatgaagtggtacaggcgttccgagcagctgtggccaccacccgaggggaccaggaaagtgctgaggccaacaaattccaggtcacggacagtgctgcattcaatgctctggttaccttctgcatcaagagacctcattggctgtctccagaagctgctgtttggaaaggtggcaaaggatagcagcaggatgctgcagccgtccagcagcccgctctgggggaagcttcgtgtggacatcaaggcttacctgggctcggccatacagctggtgtcctgtctgtcggagacgacggtgttggcggccgtgctgcggcacatcagcgtgctggtgccctgcttcctgaccttccccaagcagtgccgcatgctgctcaagagaatggtggtcgtatggagcactggggaggagtctctgcgggtgctggctttcctggtcctcagcagagtctgccggcacaagaaggacactttccttggccccgtcctcaagcaaatgtacatcacgtatgtgaggaactgcaagttcacctcgcctggtgccctccccttcatcagtttcatgcagtggaccttgacggagctgctggccctggagccgggtgtggcctaccagcacgccttcctctacatccgccagctcgccatacacctgcgcaacgccatgaccacccgcaagaaggaaacataccagtctgtgtacaactggcagtatgtgcactgcctcttcctgtggtgccgggtcctgagcactgcgggccccagcgaagccctccagcccttggtctacccccttgcccaagtcatcattggctgtatcaagctcatccccactgcccgcttctacccgctgcgaatgcactgcatccgtgccctgacgctgctctcggggagctcgggggccttcatcccggtgctgcctttcatcctggagatgttccagcaggtcgacttcaacaggaagccagggcgcatgagctccaagcccatcaacttctccgtgatcctgaagctgtccaatgtcaacctgcaggagaaggcgtaccgggacggcctggtggagcagctgtacgacctcaccctggagtacctgcacagccaggcacactgcatcggcttcccggagctggtgctgcctgtggtcctgcagctgaagtcgttcctccgggagtgcaaggtggccaactactgccggcaggtgcagcagctgcttgggaaggttcaggagaactcggcatacatctgcagccgccgccagagggtttccttcggcgtctctgagcagcaggcagtggaagcctgggagaagctgacccgggaagaggggacacccttgaccttgtactacagccactggcgcaagctgcgtgaccgggagatccagctggagatcagtggcaaagagcggctggaagacctgaacttccctgagatcaaacgaaggaagatggctgacaggaaggatgaggacaggaagcaatttaaagacctctttgacctgaacagctctgaagaggacgacaccgagggattctcggagagagggatactgaggcccctgagcactcggcatggggtggaagacgatgaagaggacgaggaggagggcgaggaggacagcagcaactcggagggatggagacccagacgcagaggcggggctggcccctggggagctgcagcagctggcccaggggccggaggacgagctggaggatctgcagctctcagaggacgactgaggcagcccatctggggggcctgtaggggctgccgggctggtggccagtgtttccacctccctggcagtcaggcctagaggctggcgtctgtgcagttgggggaggcagtagacacgggacaggctttattatttatttttcagcatgaaagaccaaacgtatcgagagctgggctgggctgggctggtgtggctgctgaagccccacagctgtgggctgctgaagtcagttccagggggaggcctgcaggcccctggccccttccaccacctctgccctccgtctgcagacctcgtccatctgcaccaggctctgccttcactcccccaagtctttggaaatttgttcttttcctttgaagtcacattttcttttaaaattttttgttttgcatccgaaaccgaaagaaataaagcggtgggaggcagggccattgtgttgagtggtggctcctggagatttgtgtggccccacccctacccccggcaacctcaacacagaggctgggaagggtcgggggcccctggaagtagagccaaggtcccattctcctgcttgggtgaagtttgaccggcaagggcgtggccccccctccatagggggacgtggccgtcgtgggggacaagggctgctctcctgtgccgagttctcgctccggggcccgcagggttggtggctgcagtggcagagccacggggaagctggccacgtagaaaactcggcccaggcgcctggccacctgcagagagatggcctggtgggggctgtcgcacacccacccagagctttctgcccagctgtggtctggagaccctgacctcactccccagcgtctcacctgggcccggatcttgagggcgggccccagcttcagccccatgttggtcagcaggtgctcctccgtcagcagtggcagggtctccccgtcgatcccctgctccctgaagacctggaagggggagggagggagggtcaggacccgggtgctgctccatcctccagcccagcagagccaagaggagctgtttgtgcagctcacggaaattttttaaaaacagtgatctgttgggtttgagtgtcaggcagaaaacacctggcaa

SEQ ID NO: 286887 - DNA, 2456 bp, Homo sapiens
aacttaggctaggtacgaggctgggtgttgaatcggccgaggccactccctgccagatgtgctggaggaagccagtgaggaggaggatggagcggaggaaggagaagatggggacagagtccccagagggctgaaggggaagaagaattctgttcctgtgaccgtcgccatggttgagagatggaagcaggcagcaaagcaacgcctcactccaaagctgttccatgaagtggtacaggcgttccgagcagctgtggccaccacccgaggggaccaggaaagtgctgaggccaacaaattccaggtcacggacagtgctgcattcaatgctctggttaccttctgcatcaagagacctcattggctgtctccagaagctgctgtttggaaaggtggcaaaggatagcagcaggatgctgcagccgtccagcagcccgctctgggggaagcttcgtgtggacatcaaggcttacctgggctcggccatacagctggtgtcctgtctgtcggagacgacggtgttggcggccgtgctgcggcacatcagcgtgctggtgccctgcttcctgaccttccccaagcagtgccgcatgctgctcaagagaatggtggtcgtatggagcactggggaggagtctctgcgggtgctggctttcctggtcctcagcagagtctgccggcacaagaaggacactttccttggccccgtcctcaagcaaatgtacatcacgtatgtgaggaactgcaagttcacctcgcctggtgccctccccttcatcagtttcatgcagtggaccttgacggagctgctggccctggagccgggtgtggcctaccagcacgccttcctctacatccgccagctcgccatacacctgcgcaacgccatgaccacccgcaagaaggaaacataccagtctgtgtacaactggcagtatgtgcactgcctcttcctgtggtgccgggtcctgagcactgcgggccccagcgaagccctccagcccttggtctacccccttgcccaagtcatcattggctgtatcaagctcatccccactgcccgcttctacccgctgcgaatgcactgcatccgtgccctgacgctgctctcggggagctcgggggccttcatcccggtgctgcctttcatcctggagatgttccagcaggtcgacttcaacaggaagccagggcgcatgagctccaagcccatcaacttctccgtgatcctgaagctgtccaatgtcaacctgcaggagaaggcgtaccgggacggcctggtggagcagctgtacgacctcaccctggagtacctgcacagccaggcacactgcatcggcttcccggagctggtgctgcctgtggtcctgcagctgaagtcgttcctccgggagtgcaaggtggccaactactgccggcaggtgcagcagctgcttgggaaggttcaggagaactcggcatacatctgcagccgccgccagagggtttccttcggcgtctctgagcagcaggcagtggaagcctgggagaagctgacccgggaagaggggacacccttgaccttgtactacagccactggcgcaagctgcgtgaccgggagatccagctggagatcagtggcaaagagcggctggaagacctgaacttccctgagatcaaacgaaggaagatggctgacaggaaggatgaggacaggaagcaatttaaagacctctttgacctgaacagctctgaagaggacgacaccgagggattctcggagagagggatactgaggcccctgagcactcggcatggggtggaagacgatgaagaggacgaggaggagggcgaggaggacagcagcaactcggagggatggagacccagacgcagaggcggggctggcccctggggagctgcagcagctggcccaggggccggaggacgagctggaggatctgcagctctcagaggacgactgaggcagcccatctggggggcctgtaggggctgccgggctggtggccagtgtttccacctccctggcagtcaggcctagaggctggcgtctgtgcagttgggggaggcagtagacacgggacaggctttattatttatttttcagcatgaaagaccaaacgtatcgagagctgggctgggctgggctggtgtggctgctgaagccccacagctgtgggctgctgaagtcagctccgcgggggagctgaccctgacgtcagcagaccgagaccagtcccagttccagggggaggcctgcaggcccctggccccttccaccacctctgccctccgtctgcagacctcgtccatctgcaccaggctctgccttcactcccccaagtctttggaaatttgttcttttcctttgaagtcacattttcttttaaaattttttgttttgcatccgaaaccgaaagaaataaagcggtgggaggcagggccattgtgttga

SEQ ID NO: 286888 - DNA, 2697 bp, Homo sapiens
taagggctaggtgcgaggcctgggggttaccggggtgcacgcttcgggttggtgtcatggcagctgcggggagccgcaagaggcgcctggcggagctgacggtggacgagttcctagcttcgggctttgactccgagtccgaatccgagtccgaaaattctccacaagcggagacacgggaagcacgcgaggctgcccggagtccggataagccgggcgggagcccctcggccagccggcgtaaaggccgtgcctctgagcacaaagaccagctctctcggctgaaggacagagaccccgagttctacaagttcctgcaggagaatgaccagagcctgctaaacttcagcgactcggacagctctgaggaggaagaggggccgttccactccctgccagatgtgctggaggaagccagtgaggaggaggatggagcggaggaaggagaagatggggacagagtccccagagggctgaaggggaagaagaattctgttcctgtgaccgtcgccatggttgagagatggaagcaggcagcaaagcaacgcctcactccaaagctgttccatgaagtggtacaggcgttccgagcagctgtggccaccacccgaggggaccaggaaagtgctgaggccaacaaattccaggtcacggacagtgctgcattcaatgctctggttaccttctgcatcaagagacctcattggctgtctccagaagctgctgtttggaaaggtggcaaaggatagcagcaggatgctgcagccgtccagcagcccgctctgggggaagcttcgtgtggacatcaaggcttacctgggctcggccatacagctggtgtcctgtctgtcggagacgacggtgttggcggccgtgctgcggcacatcagcgtgctggtgccctgcttcctgaccttccccaagcagtgccgcatgctgctcaagagaatggtggtcgtatggagcactggggaggagtctctgcgggtgctggctttcctggtcctcagcagagtctgccggcacaagaaggacactttccttggccccgtcctcaagcaaatgtacatcacgtatgtgaggaactgcaagttcacctcgcctggtgccctccccttcatcagtttcatgcagtggaccttgacggagctgctggccctggagccgggtgtggcctaccagcacgccttcctctacatccgccagctcgccatacacctgcgcaacgccatgaccacccgcaagaaggaaacataccagtctgtgtacaactggcagtatgtgcactgcctcttcctgtggtgccgggtcctgagcactgcgggccccagcgaagccctccagcccttggtctacccccttgcccaagtcatcattggctgtatcaagctcatccccactgcccgcttctacccgctgcgaatgcactgcatccgtgccctgacgctgctctcggggagctcgggggccttcatcccggtgctgcctttcatcctggagatgttccagcaggtcgacttcaacaggaagccagggcgcatgagctccaagcccatcaacttctccgtgatcctgaagctgtccaatgtcaacctgcaggagaaggcgtaccggctgaagtcgttcctccgggagtgcaaggtggccaactactgccggcaggtgcagcagctgcttgggaaggttcaggagaactcggcatacatctgcagccgccgccagagggtttccttcggcgtctctgagcagcaggcagtggaagcctgggagaagctgacccgggaagaggggacacccttgaccttgtactacagccactggcgcaagctgcgtgaccgggagatccagctggagatcagtggcaaagagcggctggaagacctgaacttccctgagatcaaacgaaggaagatggctgacaggaaggatgaggacaggaagcaatttaaagacctctttgacctgaacagctctgaagaggacgacaccgagggattctcggagagagggatactgaggcccctgagcactcggcatggggtggaagacgatgaagaggacgaggaggagggcgaggaggacagcagcaactcggagggatggagacccagacgcagaggcggggctggcccctggggagctgcagcagctggcccaggggccggaggacgagctggaggatctgcagctctcagaggacgactgaggcagcccatctggggggcctgtaggggctgccgggctggtggccagtgtttccacctccctggcagtcaggcctagaggctggcgtctgtgcagttgggggaggcagtagacacgggacaggctttattatttatttttcagcatgaaagaccaaacgtatcgagagctgggctgggctgggctggtgtggctgctgaagccccacagctgtgggctgctgaagtcagctccgcgggggagctgaccctgacgtcagcagaccgagaccagtcccagttccagggggaggcctgcaggcccctggccccttccaccacctctgccctccgtctgcagacctcgtccatctgcaccaggctctgccttcactcccccaagtctttggaaatttgttcttttcctttgaagtcacattttcttttaaaattttttgttttgcatccgaaaccgaaagaaataaagcggtgggaggcagggccattgtgttga

SEQ ID NO: 286889 - DNA, 2708 bp, Homo sapiens
taagggctaggtgcgaggcctgggggttaccggggtgcacgcttcgggttggtgtcatggcagctgcggggagccgcaagaggcgcctggcggagctgacggtggacgagttcctagcttcgggctttgactccgagtccgaatccgagtccgaaaattctccacaagcggagacacgggaagcacgcgaggctgcccggagtccggataagccgggcgggagcccctcggccagccggcgtaaaggccgtgcctctgagcacaaagaccagctctctcggctgaaggacagagaccccgagttctacaagttcctgcaggagaatgaccagagcctgctaaacttcagcgactcggacagctctgaggaggaagaggggccgttccactccctgccagatgtgctggaggaagccagtgaggaggaggatggagcggaggaaggagaagatggggacagagtccccagagggctgaaggggaagaagaattctgttcctgtgaccgtcgccatggttgagagatggaagcaggcagcaaagcaacgcctcactccaaagctgttccatgaagtggtacaggcgttccgagcagctgtggccaccacccgaggggaccaggaaagtgctgaggccaacaaattccaggtcacggacagtgctgcattcaatgctctggttaccttctgcatcaagagacctcattggctgtctccagaagctgctgtttggaaaggtggcaaaggatagcagcaggatgctgcagccgtccagcagcccgctctgggggaagcttcgtgtggacatcaaggcttacctgggctcggccatacagctggtgtcctgtctgtcggagacgacggtgttggcggccgtgctgcggcacatcagcgtgctggtgccctgcttcctgaccttccccaagcagtgccgcatgctgctcaagagaatggtggtcgtatggagcactggggaggagtctctgcgggtgctggctttcctggtcctcagcagagtctgccggcacaagaaggacactttccttggccccgtcctcaagcaaatgtacatcacgtatgtgaggaactgcaagttcacctcgcctggtgccctccccttcatcagtttcatgcagtggaccttgacggagctgctggccctggagccgggtgtggcctaccagcacgccttcctctacatccgccagctcgccatacacctgcgcaacgccatgaccacccgcaagaaggaaacataccagtctgtgtacaactggcagtatgtgcactgcctcttcctgtggtgccgggtcctgagcactgcgggccccagcgaagccctccagcccttggtctacccccttgcccaagtcatcattggctgtatcaagctcatccccactgcccgcttctacccgctgcgaatgcactgcatccgtgccctgacgctgctctcggggagctcgggggccttcatcccggtgctgcctttcatcctggagatgttccagcaggtcgacttcaacaggaagccagggcgcatgagctccaagcccatcaacttctccgtgatcctgaagctgtccaatgtcaacctgcaggagaaggcgtaccgggacggcctggtggagcagctgtacgacctcaccctggagtacctgcacagccaggcacactgcatcggcttcccggagctggtgctgcctgtggtcctgcagctgaagtcgttcctccgggagtgcaaggtggccaactactgccggcaggtgcagcagctgcttgggaaggttcaggagaactcggcatacatctgcagccgccgccagagggtttccttcggcgtctctgagcagcaggcagtggaagcctgggagaagctgacccgggaagaggggacacccttgaccttgtactacagccactggcgcaagctgcgtgaccgggagatccagctggagatcagtggcaaagagcggctggaagacctgaacttccctgagatcaaacgaaggaagatggctgacaggaaggatgaggacaggaagcaatttaaagacctctttgacctgaacagctctgaagaggacgacaccgagggattctcggagagagatggagacccagacgcagaggcggggctggcccctggggagctgcagcagctggcccaggggccggaggacgagctggaggatctgcagctctcagaggacgactgaggcagcccatctggggggcctgtaggggctgccgggctggtggccagtgtttccacctccctggcagtcaggcctagaggctggcgtctgtgcagttgggggaggcagtagacacgggacaggctttattatttatttttcagcatgaaagaccaaacgtatcgagagctgggctgggctgggctggtgtggctgctgaagccccacagctgtgggctgctgaagtcagctccgcgggggagctgaccctgacgtcagcagaccgagaccagtcccagttccagggggaggcctgcaggcccctggccccttccaccacctctgccctccgtctgcagacctcgtccatctgcaccaggctctgccttcactcccccaagtctttggaaatttgttcttttcctttgaagtcacattttcttttaaaattttttgttttgcatccgaaaccgaaagaaataaagcggtgggaggcagggccattgtgttga

SEQ ID NO: 286890 - DNA, 2280 bp, Homo sapiens
taagggctaggtgcgaggcctgggggttaccggggtgcacgcttcgggttggtgtcatggcagctgcggggagccgcaagaggcgcctggcggagctgacggtggacgagttcctagcttcgggctttgactccgagtccgaatccgagtccgaaaattctccacaagcggagacacgggaagcacgcgaggctgcccggagtccggataagccgggcgggagcccctcggccagccggcgtaaaggccgtgcctctgagcacaaagaccagctctctcggctgaaggacagagaccccgagttctacaagttcctgcaggagaatgaccagagcctgctaaacttcagcgactcggacagctctgaggaggaagaggggccgttccactccctgccagatgtgctggaggaagccagtgaggaggaggatggagcggaggaaggagaagatggggacagagtccccagagggctgaaggggaagaagaattctgttcctgtgaccgtcgccatggttgagagatggaagcaggcagcaaagcaacgcctcactccaaagctgttccatgaagtggtacaggcgttccgagcagctgtggccaccacccgaggggaccaggaaagtgctgaggccaacaaattccaggtcacggacagtgctgcattcaatgctctggttaccttctgcatcaagagacctcattggctgtctccagaagctgctgtttggaaaggtggcaaaggatagcagcaggatgctgcagccgtccagcagcccgctctgggggaagcttcgtgtggacatcaaggcttacctgggctcggccatacagctggtgtcctgtctgtcggagacgacggtgttggcggccgtgctgcggcacatcagcgtgctggtgccctgcttcctgaccttccccaagcagtgccgcatgctgctcaagagaatggtggtcgtatggagcactggggaggagtctctgcgggtgctggctttcctggtcctcagcagagtctgccggcacaagaaggacactttccttggccccgtcctcaagcaaatgtacatcacgtatgtgaggaactgcaagttcacctcgcctggtgccctccccttcatcagtttcatgcagtggaccttgacggagctgctggccctggagccgggtgtggcctaccagcacgccttcctctacatccgccagctcgccatacacctgcgcaacgccatgaccacccgcaagaaggaaacataccagtctgtgtacaactggcagtatgtgcactgcctcttcctgtggtgccgggtcctgagcactgcgggccccagcgaagccctccagcccttggtctacccccttgcccaagtcatcattggctgtatcaagctcatccccactgcccgcttctacccgctgcgaatgcactgcatccgtgccctgacgctgctctcggggagctcgggggccttcatcccggtgctgcctttcatcctggagatgttccagcaggtcgacttcaacaggaagccagggcgcatgagctccaagcccatcaacttctccgtgatcctgaagctgtccaatgtcaacctgcaggagaaggcgtaccgggacggcctggtggagcagctgtacgacctcaccctggagtacctgcacagccaggcacactgcatcggcttcccggagctggtgctgcctgtggtcctgcagctgaagtcgttcctccgggagtgcaaggtggccaactactgccggcaggtgcagcagctgcttgggaaggttcaggagaactcggcatacatctgcagccgccgccagagggtttccttcggcgtctctgagcagcaggcagtggaagcctgggagaagctgacccgggaagaggggacacccttgaccttgtactacagccactggcgcaagctgcgtgaccgggagatccagctggagatcagtggcaaagagcggctggaagacctgaacttccctgagatcaaacgaaggaagatggctgacaggaaggatgaggacaggaagcaatttaaagacctctttgacctgaacagctctgaagaggacgacaccgagggattctcggagagagggatactgaggcccctgagcactcggcatggggtggaagacgatgaagaggacgaggaggagggcgaggaggacagcagcaactcggagggtccactttggaggatgggaacccctaactccaaagcgccggttgccccctgggaagcttgaaccacttggccccagggg

SEQ ID NO: 286891 - DNA, 2074 bp, Homo sapiens
cccagccaagggtgggtggtctctctgcaggatgctgcagccgtccagcagcccgctctgggggaagcttcgtgtggacatcaaggcttacctgggctcggccatacagctggtgtcctgtctgtcggagacgacggtgttggcggccgtgctgcggcacatcagcgtgctggtgccctgcttcctgaccttccccaagcagtgccgcatgctgctcaagagaatggtggtcgtatggagcactggggaggagtctctgcgggtgctggctttcctggtcctcagcagagtctgccggcacaagaaggacactttccttggccccgtcctcaagcaaatgtacatcacgtatgtgaggaactgcaagttcacctcgcctggtgccctccccttcatcagtttcatgcagtggaccttgacggagctgctggccctggagccgggtgtggcctaccagcacgccttcctctacatccgccagctcgccatacacctgcgcaacgccatgaccacccgcaagaaggaaacataccagtctgtgtacaactggcagtatgtgcactgcctcttcctgtggtgccgggtcctgagcactgcgggccccagcgaagccctccagcccttggtctacccccttgcccaagtcatcattggctgtatcaagctcatccccactgcccgcttctacccgctgcgaatgcactgcatccgtgccctgacgctgctctcggggagctcgggggccttcatcccggtgctgcctttcatcctggagatgttccagcaggtcgacttcaacaggaagccagggcgcatgagctccaagcccatcaacttctccgtgatcctgaagctgtccaatgtcaacctgcaggagaaggcgtaccgggacggcctggtggagcagctgtacgacctcaccctggagtacctgcacagccaggcacactgcatcggcttcccggagctggtgctgcctgtggtcctgcagctgaagtcgttcctccgggagtgcaaggtggccaactactgccggcaggtgcagcagctgcttgggaaggttcaggagaactcggcatacatctgcagccgccgccagagggtttccttcggcgtctctgagcagcaggcagtggaagcctgggagaagctgacccgggaagaggggacacccttgaccttgtactacagccactggcgcaagctgcgtgaccgggagatccagctggagatcagtggcaaagagcggctggaagacctgaacttccctgagatcaaacgaaggaagatggctgacaggaaggatgaggacaggaagcaatttaaagacctctttgacctgaacagctctgaagaggacgacaccgagggattctcggagagagggatactgaggcccctgagcactcggcatggggtggaagacgatgaagaggacgaggaggagggcgaggaggacagcagcaactcggagggatggagacccagacgcagaggcggggctggcccctggggagctgcagcagctggcccaggggccggaggacgagctggaggatctgcagctctcagaggacgactgaggcagcccatctggggggcctgtaggggctgccgggctggtggccagtgtttccacctccctggcagtcaggcctagaggctggcgtctgtgcagttgggggaggcagtagacacgggacaggctttattatttatttttcagcatgaaagaccaaacgtatcgagagctgggctgggctgggctggtgtggctgctgaagccccacagctgtgggctgctgaagtcagctccgcgggggagctgaccctgacgtcagcagaccgagaccagtcccagttccagggggaggcctgcaggcccctggccccttccaccacctctgccctccgtctgcagacctcgtccatctgcaccaggctctgccttcactcccccaagtctttggaaatttgttcttttcctttgaagtcacattttcttttaaaattttttgttttgcatccgaaaccgaaagaaataaagcggtgggaggcagggccattgtgttga

SEQ ID NO: 286892 - DNA, 2127 bp, Homo sapiens
taagggctaggtgcgaggcctgggggttaccggggtgcacgcttcgggttggtgtcatggcagctgcggggagccgcaagaggcgcctggcggagctgacggtggacgagttcctagcttcgggctttgactccgagtccgaatccgagtccgaaaattctccacaagcggagacacgggaagcacgcgaggctgcccggagtccggataagccgggcgggagcccctcggccagccggcgtaaaggccgtgcctctgagcacaaagaccagctctctcggctgaaggacagagaccccgagttctacaagttcctgcaggagaatgaccagagcctgctaaacttcagcgactcggacagctctgaggaggaagaggggccgttccactccctgccagatgtgctggaggaagccagtgaggaggaggatggagcggaggaaggagaagatggggacagagtccccagagggctgaaggggaagaagaattctgttcctgtgaccgtcgccatggttgagagatggaagcaggcagcaaagcaacgcctcactccaaagctgttccatgaagtggtacaggcgttccgagcagctgtggccaccacccgaggggaccaggaaagtgctgaggccaacaaattccaggtcacggacagtgctgcattcaatgctctggttaccttctgcatcaagagacctcattggctgtctccagaagctgctgtttggaaaggtggcaaaggatagcagcaggatgctgcagccgtccagcagcccgctctgggggaagcttcgtgtggacatcaaggcttacctgggctcggccatacagctggtgtcctgtctgtcggagacgacggtgttggcggccgtgctgcggcacatcagcgtgctggtgccctgcttcctgaccttccccaagcagtgccgcatgctgctcaagagaatggtggtcgtatggagcactggggaggagtctctgcgggtgctggctttcctggtcctcagcagagtctgccggcacaagaaggacactttccttggccccgtcctcaagcaaatgtacatcacgtatgtgaggaactgcaagttcacctcgcctggtgccctccccttcatcagtttcatgcagtggaccttgacggagctgctggccctggagccgggtgtggcctaccagcacgccttcctctacatccgccagctcgccatacacctgcgcaacgccatgaccacccgcaagaagtggcgcaagctgcgtgaccgggagatccagctggagatcagtggcaaagagcggctggaagacctgaacttccctgagatcaaacgaaggaagatggctgacaggaaggatgaggacaggaagcaatttaaagacctctttgacctgaacagctctgaagaggacgacaccgagggattctcggagagagggatactgaggcccctgagcactcggcatggggtggaagacgatgaagaggacgaggaggagggcgaggaggacagcagcaactcggagggatggagacccagacgcagaggcggggctggcccctggggagctgcagcagctggcccaggggccggaggacgagctggaggatctgcagctctcagaggacgactgaggcagcccatctggggggcctgtaggggctgccgggctggtggccagtgtttccacctccctggcagtcaggcctagaggctggcgtctgtgcagttgggggaggcagtagacacgggacaggctttattatttatttttcagcatgaaagaccaaacgtatcgagagctgggctgggctgggctggtgtggctgctgaagccccacagctgtgggctgctgaagtcagctccgcgggggagctgaccctgacgtcagcagaccgagaccagtcccagttccagggggaggcctgcaggcccctggccccttccaccacctctgccctccgtctgcagacctcgtccatctgcaccaggctctgccttcactcccccaagtctttggaaatttgttcttttcctttgaagtcacattttcttttaaaattttttgttttgcatccgaaaccgaaagaaataaagcggtgggaggcagggccattgtgttga

SEQ ID NO: 286893 - DNA, 2213 bp, Homo sapiens
aacgatccgtttcatccccttgggggtgcacgcttcgggttggtgtcatggcagctgcggggagccgcaagaggcgcctggcggagctgacggtggacgagttcctagcttcgggctttgactccgagtccgaatccgagtccgaaaattctccacaagcggagacacgggaagcacgcgaggctgcccggagtccggataagccgggcgggagcccctcggccagccggcgtaaaggccgtgcctctgagcacaaagaccagctctctcggctgaaggacagagaccccgagttctacaagttcctgcaggagaatgaccagagcctgctaaacttcagcgactcggacagctctgaggaggaagaggggccgttccactccctgccagatgtgctggaggtgctggctttcctggtcctcagcagagtctgccggcacaagaaggacactttccttggccccgtcctcaagcaaatgtacatcacgtatgtgaggaactgcaagttcacctcgcctggtgccctccccttcatcagtttcatgcagtggaccttgacggagctgctggccctggagccgggtgtggcctaccagcacgccttcctctacatccgccagctcgccatacacctgcgcaacgccatgaccacccgcaagaaggaaacataccagtctgtgtacaactggcagtatgtgcactgcctcttcctgtggtgccgggtcctgagcactgcgggccccagcgaagccctccagcccttggtctacccccttgcccaagtcatcattggctgtatcaagctcatccccactgcccgcttctacccgctgcgaatgcactgcatccgtgccctgacgctgctctcggggagctcgggggccttcatcccggtgctgcctttcatcctggagatgttccagcaggtcgacttcaacaggaagccagggcgcatgagctccaagcccatcaacttctccgtgatcctgaagctgtccaatgtcaacctgcaggagaaggcgtaccgggacggcctggtggagcagctgtacgacctcaccctggagtacctgcacagccaggcacactgcatcggcttcccggagctggtgctgcctgtggtcctgcagctgaagtcgttcctccgggagtgcaaggtggccaactactgccggcaggtgcagcagctgcttgggaaggttcaggagaactcggcatacatctgcagccgccgccagagggtttccttcggcgtctctgagcagcaggcagtggaagcctgggagaagctgacccgggaagaggggacacccttgaccttgtactacagccactggcgcaagctgcgtgaccgggagatccagctggagatcagtggcaaagagcggctggaagacctgaacttccctgagatcaaacgaaggaagatggctgacaggaaggatgaggacaggaagcaatttaaagacctctttgacctgaacagctctgaagaggacgacaccgagggattctcggagagagggatactgaggcccctgagcactcggcatggggtggaagacgatgaagaggacgaggaggagggcgaggaggacagcagcaactcggagggatggagacccagacgcagaggcggggctggcccctggggagctgcagcagctggcccaggggccggaggacgagctggaggatctgcagctctcagaggacgactgaggcagcccatctggggggcctgtaggggctgccgggctggtggccagtgtttccacctccctggcagtcaggcctagaggctggcgtctgtgcagttgggggaggcagtagacacgggacaggctttattatttatttttcagcatgaaagaccaaacgtatcgagagctgggctgggctgggctggtgtggctgctgaagccccacagctgtgggctgctgaagtcagctccgcgggggagctgaccctgacgtcagcagaccgagaccagtcccagttccagggggaggcctgcaggcccctggccccttccaccacctctgccctccgtctgcagacctcgtccatctgcaccaggctctgccttcactcccccaagtctttggaaatttgttcttttcctttgaagtcacattttcttttaaaattttttgttttgcatccgaaaccgaaagaaataaagcggtgggaggcagggccattgtgttga

SEQ ID NO: 286894 - DNA, 2106 bp, Homo sapiens
aacgatccgtttcatccccttgggggtgcacgcttcgggttggtgtcatggcagctgcggggagccgcaagaggcgcctggcggagctgacggtggacgagttcctagcttcgggctttgactccgagtccgaatccgagtccgaaaattctccacaagcggagacacgggaagcacgcgaggctgcccggagtccggataagccgggcgggagcccctcggccagccggcgtaaaggccgtgcctctgagcacaaagaccagctctctcggctgaaggacagagaccccgagttctacaagttcctgcaggagaatgaccagagcctgctaaacttcagcgactcggacagctctgaggaggaagaggggccgttccactccctgccagatgtgctggagcacctcgcctggtgccctccccttcatcagtttcatgcagtggaccttgacggagctgctggccctggagccgggtgtggcctaccagcacgccttcctctacatccgccagctcgccatacacctgcgcaacgccatgaccacccgcaagaaggaaacataccagtctgtgtacaactggcagtatgtgcactgcctcttcctgtggtgccgggtcctgagcactgcgggccccagcgaagccctccagcccttggtctacccccttgcccaagtcatcattggctgtatcaagctcatccccactgcccgcttctacccgctgcgaatgcactgcatccgtgccctgacgctgctctcggggagctcgggggccttcatcccggtgctgcctttcatcctggagatgttccagcaggtcgacttcaacaggaagccagggcgcatgagctccaagcccatcaacttctccgtgatcctgaagctgtccaatgtcaacctgcaggagaaggcgtaccgggacggcctggtggagcagctgtacgacctcaccctggagtacctgcacagccaggcacactgcatcggcttcccggagctggtgctgcctgtggtcctgcagctgaagtcgttcctccgggagtgcaaggtggccaactactgccggcaggtgcagcagctgcttgggaaggttcaggagaactcggcatacatctgcagccgccgccagagggtttccttcggcgtctctgagcagcaggcagtggaagcctgggagaagctgacccgggaagaggggacacccttgaccttgtactacagccactggcgcaagctgcgtgaccgggagatccagctggagatcagtggcaaagagcggctggaagacctgaacttccctgagatcaaacgaaggaagatggctgacaggaaggatgaggacaggaagcaatttaaagacctctttgacctgaacagctctgaagaggacgacaccgagggattctcggagagagggatactgaggcccctgagcactcggcatggggtggaagacgatgaagaggacgaggaggagggcgaggaggacagcagcaactcggagggatggagacccagacgcagaggcggggctggcccctggggagctgcagcagctggcccaggggccggaggacgagctggaggatctgcagctctcagaggacgactgaggcagcccatctggggggcctgtaggggctgccgggctggtggccagtgtttccacctccctggcagtcaggcctagaggctggcgtctgtgcagttgggggaggcagtagacacgggacaggctttattatttatttttcagcatgaaagaccaaacgtatcgagagctgggctgggctgggctggtgtggctgctgaagccccacagctgtgggctgctgaagtcagctccgcgggggagctgaccctgacgtcagcagaccgagaccagtcccagttccagggggaggcctgcaggcccctggccccttccaccacctctgccctccgtctgcagacctcgtccatctgcaccaggctctgccttcactcccccaagtctttggaaatttgttcttttcctttgaagtcacattttcttttaaaattttttgttttgcatccgaaaccgaaagaaataaagcggtgggaggcagggccattgtgttga

SEQ ID NO: 286895 - DNA, 1747 bp, Homo sapiens
agaatataaggctaggtacgaactggtgtgaatcggcgaggccacctcgcctggtgccctccccttcatcagtttcatgcagtggaccttgacggagctgctggccctggagccgggtgtggcctaccagcacgccttcctctacatccgccagctcgccatacacctgcgcaacgccatgaccacccgcaagaaggaaacataccagtctgtgtacaactggcagtatgtgcactgcctcttcctgtggtgccgggtcctgagcactgcgggccccagcgaagccctccagcccttggtctacccccttgcccaagtcatcattggctgtatcaagctcatccccactgcccgcttctacccgctgcgaatgcactgcatccgtgccctgacgctgctctcggggagctcgggggccttcatcccggtgctgcctttcatcctggagatgttccagcaggtcgacttcaacaggaagccagggcgcatgagctccaagcccatcaacttctccgtgatcctgaagctgtccaatgtcaacctgcaggagaaggcgtaccgggacggcctggtggagcagctgtacgacctcaccctggagtacctgcacagccaggcacactgcatcggcttcccggagctggtgctgcctgtggtcctgcagctgaagtcgttcctccgggagtgcaaggtggccaactactgccggcaggtgcagcagctgcttgggaaggttcaggagaactcggcatacatctgcagccgccgccagagggtttccttcggcgtctctgagcagcaggcagtggaagcctgggagaagctgacccgggaagaggggacacccttgaccttgtactacagccactggcgcaagctgcgtgaccgggagatccagctggagatcagtggcaaagagcggctggaagacctgaacttccctgagatcaaacgaaggaagatggctgacaggaaggatgaggacaggaagcaatttaaagacctctttgacctgaacagctctgaagaggacgacaccgagggattctcggagagagggatactgaggcccctgagcactcggcatggggtggaagacgatgaagaggacgaggaggagggcgaggaggacagcagcaactcggagggatggagacccagacgcagaggcggggctggcccctggggagctgcagcagctggcccaggggccggaggacgagctggaggatctgcagctctcagaggacgactgaggcagcccatctggggggcctgtaggggctgccgggctggtggccagtgtttccacctccctggcagtcaggcctagaggctggcgtctgtgcagttgggggaggcagtagacacgggacaggctttattatttatttttcagcatgaaagaccaaacgtatcgagagctgggctgggctgggctggtgtggctgctgaagccccacagctgtgggctgctgaagtcagctccgcgggggagctgaccctgacgtcagcagaccgagaccagtcccagttccagggggaggcctgcaggcccctggccccttccaccacctctgccctccgtctgcagacctcgtccatctgcaccaggctctgccttcactcccccaagtctttggaaatttgttcttttcctttgaagtcacattttcttttaaaattttttgttttgcatccgaaaccgaaagaaataaagcggtgggaggcagggccattgtgttga

SEQ ID NO: 286896 - DNA, 1693 bp, Homo sapiens
  misc_feature (15)..(15): n is a, c, g, or t
tacgccaagcttggnacgtagggtgcagtggaccttgacggagctgctggccctggagccgggtgtggcctaccagcacgccttcctctacatccgccagctcgccatacacctgcgcaacgccatgaccacccgcaagaaggaaacataccagtctgtgtacaactggcagtatgtgcactgcctcttcctgtggtgccgggtcctgagcactgcgggccccagcgaagccctccagcccttggtctacccccttgcccaagtcatcattggctgtatcaagctcatccccactgcccgcttctacccgctgcgaatgcactgcatccgtgccctgacgctgctctcggggagctcgggggccttcatcccggtgctgcctttcatcctggagatgttccagcaggtcgacttcaacaggaagccagggcgcatgagctccaagcccatcaacttctccgtgatcctgaagctgtccaatgtcaacctgcaggagaaggcgtaccgggacggcctggtggagcagctgtacgacctcaccctggagtacctgcacagccaggcacactgcatcggcttcccggagctggtgctgcctgtggtcctgcagctgaagtcgttcctccgggagtgcaaggtggccaactactgccggcaggtgcagcagctgcttgggaaggttcaggagaactcggcatacatctgcagccgccgccagagggtttccttcggcgtctctgagcagcaggcagtggaagcctgggagaagctgacccgggaagaggggacacccttgaccttgtactacagccactggcgcaagctgcgtgaccgggagatccagctggagatcagtggcaaagagcggctggaagacctgaacttccctgagatcaaacgaaggaagatggctgacaggaaggatgaggacaggaagcaatttaaagacctctttgacctgaacagctctgaagaggacgacaccgagggattctcggagagagggatactgaggcccctgagcactcggcatggggtggaagacgatgaagaggacgaggaggagggcgaggaggacagcagcaactcggagggatggagacccagacgcagaggcggggctggcccctggggagctgcagcagctggcccaggggccggaggacgagctggaggatctgcagctctcagaggacgactgaggcagcccatctggggggcctgtaggggctgccgggctggtggccagtgtttccacctccctggcagtcaggcctagaggctggcgtctgtgcagttgggggaggcagtagacacgggacaggctttattatttatttttcagcatgaaagaccaaacgtatcgagagctgggctgggctgggctggtgtggctgctgaagccccacagctgtgggctgctgaagtcagctccgcgggggagctgaccctgacgtcagcagaccgagaccagtcccagttccagggggaggcctgcaggcccctggccccttccaccacctctgccctccgtctgcagacctcgtccatctgcaccaggctctgccttcactcccccaagtctttggaaatttgttcttttcctttgaagtcacattttcttttaaaattttttgttttgcatccgaaaccgaaagaaataaagcggtgggaggcagggccattgtgttga

SEQ ID NO: 286897 - DNA, 1841 bp, Homo sapiens
ggcggcggaagtgcgcagccgcgcggcattctggggccggaagtggggggggtgcacgcttcgggttggtgtcatggcagctgcggggagccgcaagaggcgcctggcggagctgacggtggacgagttcctagcttcgggctttgactccgagtccgaatccgagtccgaaaattctccacaagcggagacacgggaagcacgcgaggctgcccggagtccggataagccgggcgggagcccctcggccagccggcgtaaaggccgtgcctctgagcacaaagaccagctctctcggctgaaggacagagaccccgagttctacaagttcctgcaggagaatgaccagagcctgctaaacttcagcgactcggacagctctgaggaggaagaggggccgttccactccctgccagatgtgctggaggaagccagtgaggaggaggatggagcggaggaaggagaagatggggacagagtccccagagggctgaaggggaagaagaattctgttcctgtgaccgtcgccatggttgagagatggaagcaggcagcaaagcaacgcctcactccaaagctgttccatgaagtggtacaggcgttccgagcagctgtggccaccacccgaggggaccaggaaagtgctgaggccaacaaattccaggtcacggacagtgctgcattcaatgctctggttaccttctgcatcaagagacctcattggctgtctccagaagctgctgtttggaaaggtggcaaaggatagcagcaggatgctgcagccgtccagcagcccgctctgggggaagcttcgtgtggacatcaaggttcaggagaactcggcatacatctgcagccgccgccagagggtttccttcggcgtctctgagcagcaggcagtggaagcctgggagaagctgacccgggaagaggggacacccttgaccttgtactacagccactggcgcaagctgcgtgaccgggagatccagctggagatcagtggcaaagagcggctggaagacctgaacttccctgagatcaaacgaaggaagatggctgacaggaaggatgaggacaggaagcaatttaaagacctctttgacctgaacagctctgaagaggacgacaccgagggattctcggagagagggatactgaggcccctgagcactcggcatggggtggaagacgatgaagaggacgaggaggagggcgaggaggacagcagcaactcggagggatggagacccagacgcagaggcggggctggcccctggggagctgcagcagctggcccaggggccggaggacgagctggaggatctgcagctctcagaggacgactgaggcagcccatctggggggcctgtaggggctgccgggctggtggccagtgtttccacctccctggcagtcaggcctagaggctggcgtctgtgcagttgggggaggcagtagacacgggacaggctttattatttatttttcagcatgaaagaccaaacgtatcgagagctgggctgggctgggctggtgtggctgctgaagccccacagctgtgggctgctgaagtcagctccgcgggggagctgaccctgacgtcagcagaccgagaccagtcccagttccagggggaggcctgcaggcccctggccccttccaccacctctgccctccgtctgcagacctcgtccatctgcaccaggctctgccttcactcccccaagtctttggaaatttgttcttttcctttgaagtcacattttcttttaaaattttttgttttgcatccgaaaccgaaagaaataaagcggtgggaggcagggccattgtgttga

SEQ ID NO: 286898 - DNA, 1462 bp, Homo sapiens
gcgggcggttaatcggacgaggcctgcccaagtcatcattggctgtatcaagctcatccccactgcccgcttctacccgctgcgaatgcactgcatccgtgccctgacgctgctctcggggagctcgggggccttcatcccggtgctgcctttcatcctggagatgttccagcaggtcgacttcaacaggaagccagggcgcatgagctccaagcccatcaacttctccgtgatcctgaagctgtccaatgtcaacctgcaggagaaggcgtaccgggacggcctggtggagcagctgtacgacctcaccctggagtacctgcacagccaggcacactgcatcggcttcccggagctggtgctgcctgtggtcctgcagctgaagtcgttcctccgggagtgcaaggtggccaactactgccggcaggtgcagcagctgcttgggaaggttcaggagaactcggcatacatctgcagccgccgccagagggtttccttcggcgtctctgagcagcaggcagtggaagcctgggagaagctgacccgggaagaggggacacccttgaccttgtactacagccactggcgcaagctgcgtgaccgggagatccagctggagatcagtggcaaagagcggctggaagacctgaacttccctgagatcaaacgaaggaagatggctgacaggaaggatgaggacaggaagcaatttaaagacctctttgacctgaacagctctgaagaggacgacaccgagggattctcggagagagggatactgaggcccctgagcactcggcatggggtggaagacgatgaagaggacgaggaggagggcgaggaggacagcagcaactcggagggatggagacccagacgcagaggcggggctggcccctggggagctgcagcagctggcccaggggccggaggacgagctggaggatctgcagctctcagaggacgactgaggcagcccatctggggggcctgtaggggctgccgggctggtggccagtgtttccacctccctggcagtcaggcctagaggctggcgtctgtgcagttgggggaggcagtagacacgggacaggctttattatttatttttcagcatgaaagaccaaacgtatcgagagctgggctgggctgggctggtgtggctgctgaagccccacagctgtgggctgctgaagtcagctccgcgggggagctgaccctgacgtcagcagaccgagaccagtcccagttccagggggaggcctgcaggcccctggccccttccaccacctctgccctccgtctgcagacctcgtccatctgcaccaggctctgccttcactcccccaagtctttggaaatttgttcttttcctttgaagtcacattttcttttaaaattttttgttttgcatccgaaaccgaaagaaataaagcggtgggaggcagggccattgtgttga

SEQ ID NO: 286899 - DNA, 1695 bp, Homo sapiens
aacgatccgtttcatccccttgggggtgcacgcttcgggttggtgtcatggcagctgcggggagccgcaagagtgcagtggaccttgacggagctgctggccctggagccgggtgtggcctaccagcacgccttcctctacatccgccagctcgccatacacctgcgcaacgccatgaccacccgcaagaaggaaacataccagtctgtgtacaactggcagtatgtgcactgcctcttcctgtggtgccgggtcctgagcactgcgggccccagcgaagccctccagcccttggtctacccccttgcccaagtcatcattggctgtatcaagctcatccccactgcccgcttctacccgctgcgaatgcactgcatccgtgccctgacgctgctctcggggagctcgggggccttcatcccggtgctgcctttcatcctggagatgttccagcaggtcgacttcaacaggaagccagggcgcatgagctccaagcccatcaacttctccgtgatcctgaagctgtccaatgtcaacctgcaggagaaggcgtaccgggacggcctggtggagcagctgtacgacctcaccctggagtacctgcacagccaggcacactgcatcggcttcccggagctggtgctgcctgtggtcctgcaggtgcagcagctgcttgggaaggttcaggagaactcggcatacatctgcagccgccgccagagggtttccttcggcgtctctgagcagcaggcagtggaagcctgggagaagctgacccgggaagaggggacacccttgaccttgtactacagccactggcgcaagctgcgtgaccgggagatccagctggagatcagtggcaaagagcggctggaagacctgaacttccctgagatcaaacgaaggaagatggctgacaggaaggatgaggacaggaagcaatttaaagacctctttgacctgaacagctctgaagaggacgacaccgagggattctcggagagagggatactgaggcccctgagcactcggcatggggtggaagacgatgaagaggacgaggaggagggcgaggaggacagcagcaactcggagggatggagacccagacgcagaggcggggctggcccctggggagctgcagcagctggcccaggggccggaggacgagctggaggatctgcagctctcagaggacgactgaggcagcccatctggggggcctgtaggggctgccgggctggtggccagtgtttccacctccctggcagtcaggcctagaggctggcgtctgtgcagttgggggaggcagtagacacgggacaggctttattatttatttttcagcatgaaagaccaaacgtatcgagagctgggctgggctgggctggtgtggctgctgaagccccacagctgtgggctgctgaagtcagctccgcgggggagctgaccctgacgtcagcagaccgagaccagtcccagttccagggggaggcctgcaggcccctggccccttccaccacctctgccctccgtctgcagacctcgtccatctgcaccaggctctgccttcactcccccaagtctttggaaatttgttcttttcctttgaagtcacattttcttttaaaattttttgttttgcatccgaaaccgaaagaaataaagcggtgggaggcagggccattgtgttga

SEQ ID NO: 286900 - DNA, 770 bp, Homo sapiens
aacgatccgtttcatccccttgggggtgcacgcttcgggttggtgtcatggcagctgcggggagccgcaagaggcgcctggcggagctgacggtggacgagttcctagcttcgggctttgactccgagtccgaatccgagtccgaaaattctccacaagcggagacacgggaagcacgcgaggctgcccggagtccggataagccgggcgggagcccctcggccagccggcgtaaaggccgtgcctctgagcacaaagaccagctctctcggctgaaggacagagaccccgagttctacaagttcctgcaggagaatgaccagagcctgctaaacttcagcgactcggacagctctgaggaggaagaggggccgttccactccctgccagatgtgctggaggaagccagtgaggaggaggatggagcggaggaaggagaagatggggacagagtccccagagggctgaaggggaagaagaattctgttcctgtgaccgtcgccatggttgagagatggaagcaggcagcaaagcaacgcctcactccaaagctgttccatgaagtggtacaggcgttccgagcagctgtggccaccacctctgccctccgtctgcagacctcgtccatctgcaccaggctctgccttcactcccccaagtctttggaaatttgttcttttcctttgaagtcacattttcttttaaaattttttgttttgcatccgaaaccgaaagaaataaagcggtgggaggcagggccattgtgttga

SEQ ID NO: 286901 - DNA, 831 bp, Homo sapiens
aacgatccgtttcatccccttgggggtgcacgcttcgggttggtgtcatggcagctgcggggagccgcaagaggcgcctggcggagctgacggtggacgagttcctagcttcgggctttgactccgagtccgaatccgagtccggataagccgggcgggagcccctcggccaggttagtggggacatgcgtgagcagaacctcttgctcgtcctgtcccaccccggttgggttgctgacctcgcctggggtctcagggccaaggcctaaggatcgccgacctctgccccccagtcctttcagcttaacttactctttcatccgatgtttactgagctcctgttccgtgccaaactctgtcctaggcagggagcgtatgttggtgagttgtgcaaaaatctcttcccgatctaggagaactctcacgttcttgggtgaaatcaccgcctgcagttcggtagaagagagataagtgctggggagggaaaggaaggacagaggggctgaagagagagttgcaggggagccgagttgctctgttagaaggagcggaggctgtgctcggtggctcacgcctgtaatgccagcactttgggaggccgaggcgggcagattacctgaggtcaggaattcgagaccagcctgaccaacacggaaaaatcatgtctctactaaaaatataaaaattagccgggcgtggtgggcacctgtaatcccaactactcgggaggctgaggcaggagaatcgcttgaacttgggaggtggaggttgcagtgagccgagatggcaccattgcattccagcctgggtgagagagtgagactccatctc

SEQ ID NO: 286902 - DNA, 561 bp, Homo sapiens
gtctcactgtgttgttcaggctggtctcaaactcctgggcttggagtttgatcctcctgccttggcctcccaaagtgcagtgagtactggcatgagtctccacacctgccctctgattttcttttctttgtgcagcaaatgtgggccaaaggaaaccagtctgcggcagttggtggtgcctgggcgacccagaggtgctgagtaccagctgctgggcttagggacctcgtgtggtctcacggtggggatgtgatcaaggggacctagaaaaggtttatgtctgagagggagttggaggctgggacttccggggactcttagggcggtggccaaccctgggcagggcagacaggagttcaaggccactgaaggaggagctaatgcacttgagagggtcctcctaagcccctgtgtctgtccagctgtaaggggccctgagcttttttgagtggagagacggggggtctctgcagagtcgtagaggctatgctggccagggcacgcgccaacatgctgagcagcctcgcgtccgagccgtggggcctcccagccaagggtggg

SEQ ID NO: 286903 - DNA, 843 bp, Homo sapiens
tcgacttggagagggggtaggtgttggagaactggccagaaccaggcgtttccagggaggggaagccccaggctgcactaggttggggaggccatgccccctcaggcctgatgggctggaggctccgggcaggtggagtggctggactgacctcgtcacccaggccagtatgtgggcaccaggggcccgtgaggagaagcaggaagggctctgcctttgaccttggacatgggatggacaacttggaggatggctttgtgatttgggaacagaggggactagaaattggccacatggggccctggtggtgggtctggcgatgcctggccctgctgtggccgccagcccctgccctctctcacctgagcccctggttctttggccttccagctggaagacctgaacttccctgagatcaaacgaaggaagatggctgacaggaaggatgaggacaggaagcaatttaaagacctctttgacctgaacagctctgaagaggacgacaccgagggattctcggagagaggaggtggggcctgcgtggtgctcccaggggaagggtgggcctggagggctctgctggacttcccagagccacgagggccacctgtacccatcctgcagggggctcaccagtctctggcccagctggggccaacctcagtgttgccaggcttctggtgccagcgccttccctccttgaagtgaaggcctactgggattggtaactctgtccccaggcctgtgacctcccagttcctccccagggctcctctccacctgctggaagtcagcggagggaagggtgttgggagcctggccaccctcctgcccccactgtga

SEQ ID NO: 286904 - DNA, 587 bp, Homo sapiens
agaactcggcatacatctgcagccgccgccagagggtttccttcggcgtctctgagcagcaggcagtggttagtgggccctgggggtagtgccacctgagggcacctgccagggtatagccccagctacatgtgggggtttgcccagggtgaggcatgaccctgaactcccccaaccccccaggaagcctgggagaagctgacccgggaagaggggacacccttgaccttgtactacagccactggcgcaagctgcgtgaccgggagatccagctggagatcagtggcaaagagcgggtgcggctcggcgaggggacctgggggtgtgttgtgacttcctgggtttcagatctagcgcactatgacttgagaccagggcgagggtttggaaacagtgccaggcggccagggccgtgcccggatgattcgacttggagagggggtaggtgttggagaactggccagaaccaggcgtttccagggaggggaagccccaggctgcactaggttggggaggccatgccccctcaggcctgatgggctggaggctccgggcaggtggagtggctggactgacctcgtcaccc

SEQ ID NO: 286905 - DNA, 2455 bp, Homo sapiens
taagggctaggtgcgaggcctgggggttaccggggtgcacgcttcgggttggtgtcatggcagctgcggggagccgcaagaggcgcctggcggagctgacggtggacgagttcctagcttcgggctttgactccgagtccgaatccgagtccgaaaattctccacaagcggagacacgggaagcacgcgaggctgcccggagtccggataagccgggcgggagcccctcggccagccggcgtaaaggccgtgcctctgagcacaaagaccagctctctcggctgaaggacagagaccccgagttctacaagttcctgcaggagaatgaccagagcctgctaaacttcagcgactcggacagctctgaggaggaagaggggccgttccactccctgccagatgtgctggaggaagccagtgaggaggaggatggagcggaggaaggagaagatggggacagagtccccagagggctgaaggggaagaagaattctgttcctgtgaccgtcgccatggttgagagatggaagcaggcagcaaagcaacgcctcactccaaagctgttccatgaagtggtacaggcgttccgagcagctgtggccaccacccgaggggaccaggaaagtgctgaggccaacaaattccaggtcacggacagtgctgcattcaatgctctggttaccttctgcatcaagagacctcattggctgtctccagaagctgctgtttggaaaggtggcaaaggatagcagcaggatgctgcagccgtccagcagcccgctctgggggaagcttcgtgtggacatcaaggcttacctgggctcggccatacagctggtgtcctgtctgtcggagacgacggtgttggcggccgtgctgcggcacatcagcgtgctggtgccctgcttcctgaccttccccaagcagtgccgcatgctgctcaagagaatggtggtcgtatggagcactggggaggagtctctgcgggtgctggctttcctggtcctcagcagagtctgccggcacaagaaggacactttccttggccccgtcctcaagcaaatgtacatcacgtatgtgaggaactgcaagttcacctcgcctggtgccctccccttcatcagtttcatgcagtggaccttgacggagctgctggccctggagccgggtgtggcctaccagcacgccttcctctacatccgccagctcgccatacacctgcgcaacgccatgaccacccgcaagaaggaaacataccagtctgtgtacaactggcagtatgtgcactgcctcttcctgtggtgccgggtcctgagcactgcgggccccagcgaagccctccagcccttggtctacccccttgcccaagtcatcattggctgtatcaagctcatccccactgcccgcttctacccgctgcgaatgcactgcatccgtgccctgacgctgctctcggggagctcgggggccttcatcccggtgctgcctttcatcctggagatgttccagcaggtcgacttcaacaggaagccagggcgcatgagctccaagcccatcaacttctccgtgatcctgaagctgtccaatgtcaacctgcaggagaaggcgtaccgggacggcctggtggagcagctgtacgacctcaccctggagtacctgcacagccaggcacactgcatcggcttcccggagctggtgctgcctgtggtcctgcagctgaagtcgttcctccgggagtgcaaggtggccaactactgccggcaggtgcagcagctgcttgggaaggttcaggagaactcggcatacatctgcagccgccgccagagggtttccttcggcgtctctgagcagcaggcagtggaagcctgggagaagctgacccgggaagaggggacacccttgaccttgtactacagccactggcgcaagctgcgtgaccgggagatccagctggagatcagtggcaaagagcggctggaagacctgaacttccctgagatcaaacgaaggaagatggctgacaggaaggatgaggacaggaagcaatttaaagacctctttgacctgaacagctctgaagaggacgacaccgagggattctcggagagaggaggtggggcctgcgtggtgctcccaggggaagggtgggcctggagggctctgctggacttcccagagccacgagggccacctgtacccatcctgcagggggctcaccagtctctggcccagctggggccaacctcagtgttgccaggcttctggtgccagcgccttccctccttgaagtgaaggcctactgggattggtaactctgtccccaggcctgtgacctcccagttcctccccagggctcctctccacctgctggaagtcagcggagggaagggtgttgggagcctggccaccctcctgcccccactgtgactttgctggtggaccctgtgggtgggag

SEQ ID NO: 286906 - DNA, 1956 bp, Homo sapiens
cagcgcgttggtacctgccctccgggatgtttttacggggactatcaggtcgaagcaccaacgacgtcgaccttccccaagcagtgccgcatgctgctcaagagaatggtggtcgtatggagcactggggaggagtctctgcgggtgctggctttcctggtcctcagcagagtctgccggcacaagaaggacactttccttggccccgtcctcaagcaaatgtacatcacgtatgtgaggaactgcaagttcacctcgcctggtgccctccccttcatcagtttcatgcagtggaccttgacggagctgctggccctggagccgggtgtggcctaccagcacgccttcctctacatccgccagctcgccatacacctgcgcaacgccatgaccacccgcaagaaggaaacataccagtctgtgtacaactggcagtatgtgcactgcctcttcctgtggtgccgggtcctgagcactgcgggccccagcgaagccctccagcccttggtctacccccttgcccaagtcatcattggctgtatcaagctcatccccactgcccgcttctacccgctgcgaatgcactgcatccgtgccctgacgctgctctcggggagctcgggggccttcatcccggtgctgcctttcatcctggagatgttccagcaggtcgacttcaacaggaagccagggcgcatgagctccaagcccatcaacttctccgtgatcctgaagctgtccaatgtcaacctgcaggagaaggcgtaccgggacggcctggtggagcagctgtacgacctcaccctggagtacctgcacagccaggcacactgcatcggcttcccggagctggtgctgcctgtggtcctgcagctgaagtcgttcctccgggagtgcaaggtggccaactactgccggcaggtgcagcagctgcttgggaaggttcaggagaactcggcatacatctgcagccgccgccagagggtttccttcggcgtctctgagcagcaggcagtggaagcctgggagaagctgacccgggaagaggggacacccttgaccttgtactacagccactggcgcaagctgcgtgaccgggagatccagctggagatcagtggcaaagagcggctggaagacctgaacttccctgagatcaaacgaaggaagatggctgacaggaaggatgaggacaggaagcaatttaaagacctctttgacctgaacagctctgaagaggacgacaccgagggattctcggagagagggatactgaggcccctgagcactcggcatggggtggaagacgatgaagaggacgaggaggagggcgaggaggacagcagcaactcggagggatggagacccagacgcagaggcggggctggcccctggggagctgcagcagctggcccaggggccggaggacgagctggaggatctgcagctctcagaggacgactgaggcagcccatctggggggcctgtaggggctgccgggctggtggccagtgtttccacctccctggcagtcaggcctagaggctggcgtctgtgcagttgggggaggcagtagacacgggacaggctttattatttatttttcagcatgaaagaccaaacgtatcgagagctgggctgggctgggctggtgtggctgctgaagccccacagctgtgggctgctgaagtcagctccgcgggggagctgaccctgacgtcagcagaccgagaccagtcccagttccagggggaggcctgcaggcccctggccccttccaccacctctgccctccgtctgcagacctcgtccatctgcaccaggctctgccttcactcccccaagtctttggaaatttgttcttttcctttgaagtcacattttcttttaaaattttttgttttgcatccgaaaccgaaagaaataaagcggtgggaggcagggccattgtgttga

SEQ ID NO: 286907 - DNA, 1334 bp, Homo sapiens
taagggctaggtgcgaggcctgggggttaccggggtgcacgcttcgggttggtgtcatggcagctgcggggagccgcaagaggcgcctggcggagctgacggtggacgagttcctagcttcgggctttgactccgagtccgaatccgagtccgaaaattctccacaagcggagacacgggaagcacgcgaggctgcccggagtccggataagccgggcgggagcccctcggccagccggcgtaaaggccgtgcctctgagcacaaagaccagctctctcggctgaaggacagagaccccgagttctacaagttcctgcaggagaatgaccagagcctgctaaacttcagcgactcggacagctctgaggaggaagaggggccgttccactccctgccagatgtgctggaggaagccagtgaggaggaggatggagcggaggaaggagaagatggggacagagtccccagagggctgaaggggaagaagaattctgttcctgtgaccgtcgccatggttgagagatggaagcaggcagcaaagcaacgcctcactccaaagctgttccatgaagtggtacaggcgttccgagcagctgtggccaccacccgaggggaccaggaaagtgctgaggccaacaaattccaggtcacggacagtgctgcattcaatgctctggttaccttctgcatcaagagacctcattggctgtctccagaagctgctgtttggaaaggtggcaaaggatagcagcaggatgctgcagccgtccagcagcccgctctgggggaagcttcgtgtggacatcaaggcttacctgggctcggccatacagctggtgtcctgtctgtcggagacgacggtgttggcggccgtgctgcggcacatcagcgtgctggtgccctgcttcctgaccttccccaagcagtgccgcatgctgctcaagagaatggtggtcgtatggagcactggggaggagtctctgcgggtgctggctttcctggtcctcagcagagtctgccggcacaagaaggacactttccttggccccgtcctcaagcaaatgtacatcacgtatgtgaggaactgcaagttcacctcgcctggtgccctccccttcatcagtttcatgcagtggaccttgacggagctgctggccctggagccgggtgtggcctaccagcacgccttcctctacatccgccagctcgccatacacctgcgcaacgccatgaccacccgcaagaagcgaaaaaggcacctaccggttggtcaatggcatatttgcttgctcttccgtgtgccggccgacatgtggcacagaactcaacctgt

SEQ ID NO: 286908 - DNA, 1743 bp, Homo sapiens
aacgatccgtttcatccccttgggggtgcacgcttcgggttggtgtcatggcagctgcggggagccgcaagagtgcagtggaccttgacggagctgctggccctggagccgggtgtggcctaccagcacgccttcctctacatccgccagctcgccatacacctgcgcaacgccatgaccacccgcaagaaggaaacataccagtctgtgtacaactggcagtatgtgcactgcctcttcctgtggtgccgggtcctgagcactgcgggccccagcgaagccctccagcccttggtctacccccttgcccaagtcatcattggctgtatcaagctcatccccactgcccgcttctacccgctgcgaatgcactgcatccgtgccctgacgctgctctcggggagctcgggggccttcatcccggtgctgcctttcatcctggagatgttccagcaggtcgacttcaacaggaagccagggcgcatgagctccaagcccatcaacttctccgtgatcctgaagctgtccaatgtcaacctgcaggagaaggcgtaccgggacggcctggtggagcagctgtacgacctcaccctggagtacctgcacagccaggcacactgcatcggcttcccggagctggtgctgcctgtggtcctgcagctgaagtcgttcctccgggagtgcaaggtggccaactactgccggcaggtgcagcagctgcttgggaaggttcaggagaactcggcatacatctgcagccgccgccagagggtttccttcggcgtctctgagcagcaggcagtggaagcctgggagaagctgacccgggaagaggggacacccttgaccttgtactacagccactggcgcaagctgcgtgaccgggagatccagctggagatcagtggcaaagagcggctggaagacctgaacttccctgagatcaaacgaaggaagatggctgacaggaaggatgaggacaggaagcaatttaaagacctctttgacctgaacagctctgaagaggacgacaccgagggattctcggagagagggatactgaggcccctgagcactcggcatggggtggaagacgatgaagaggacgaggaggagggcgaggaggacagcagcaactcggagggatggagacccagacgcagaggcggggctggcccctggggagctgcagcagctggcccaggggccggaggacgagctggaggatctgcagctctcagaggacgactgaggcagcccatctggggggcctgtaggggctgccgggctggtggccagtgtttccacctccctggcagtcaggcctagaggctggcgtctgtgcagttgggggaggcagtagacacgggacaggctttattatttatttttcagcatgaaagaccaaacgtatcgagagctgggctgggctgggctggtgtggctgctgaagccccacagctgtgggctgctgaagtcagctccgcgggggagctgaccctgacgtcagcagaccgagaccagtcccagttccagggggaggcctgcaggcccctggccccttccaccacctctgccctccgtctgcagacctcgtccatctgcaccaggctctgccttcactcccccaagtctttggaaatttgttcttttcctttgaagtcacattttcttttaaaattttttgttttgcatccgaaaccgaaagaaataaagcggtgggaggcagggccattgtgttga

SEQ ID NO: 286909 - DNA, 2000 bp, Homo sapiens
aacgatccgtttcatccccttgggggtgcacgcttcgggttggtgtcatggcagctgcggggagccgcaagaggcgcctggcggagctgacggtggacgagttcctagcttcgggctttgactccgagtccgaatccgagtccgaaaattctccacaagcggagacacgggaagcacgcgaggctgcccggagtccggataagccgggcgggagcccctcggccagccggcgtaaaggccgtgcctctgagcacaaagaccagctctctcggctgaaggacagagaccccgagttctacaagttcctgcaggagaatgaccagagcctgctaaacttcagcgactcggacagctctgaggaggaagaggggccgttccactccctgccagatgtgctggagcgccagctcgccatacacctgcgcaacgccatgaccacccgcaagaaggaaacataccagtctgtgtacaactggcagtatgtgcactgcctcttcctgtggtgccgggtcctgagcactgcgggccccagcgaagccctccagcccttggtctacccccttgcccaagtcatcattggctgtatcaagctcatccccactgcccgcttctacccgctgcgaatgcactgcatccgtgccctgacgctgctctcggggagctcgggggccttcatcccggtgctgcctttcatcctggagatgttccagcaggtcgacttcaacaggaagccagggcgcatgagctccaagcccatcaacttctccgtgatcctgaagctgtccaatgtcaacctgcaggagaaggcgtaccgggacggcctggtggagcagctgtacgacctcaccctggagtacctgcacagccaggcacactgcatcggcttcccggagctggtgctgcctgtggtcctgcagctgaagtcgttcctccgggagtgcaaggtggccaactactgccggcaggtgcagcagctgcttgggaaggttcaggagaactcggcatacatctgcagccgccgccagagggtttccttcggcgtctctgagcagcaggcagtggaagcctgggagaagctgacccgggaagaggggacacccttgaccttgtactacagccactggcgcaagctgcgtgaccgggagatccagctggagatcagtggcaaagagcggctggaagacctgaacttccctgagatcaaacgaaggaagatggctgacaggaaggatgaggacaggaagcaatttaaagacctctttgacctgaacagctctgaagaggacgacaccgagggattctcggagagagggatactgaggcccctgagcactcggcatggggtggaagacgatgaagaggacgaggaggagggcgaggaggacagcagcaactcggagggatggagacccagacgcagaggcggggctggcccctggggagctgcagcagctggcccaggggccggaggacgagctggaggatctgcagctctcagaggacgactgaggcagcccatctggggggcctgtaggggctgccgggctggtggccagtgtttccacctccctggcagtcaggcctagaggctggcgtctgtgcagttgggggaggcagtagacacgggacaggctttattatttatttttcagcatgaaagaccaaacgtatcgagagctgggctgggctgggctggtgtggctgctgaagccccacagctgtgggctgctgaagtcagctccgcgggggagctgaccctgacgtcagcagaccgagaccagtcccagttccagggggaggcctgcaggcccctggccccttccaccacctctgccctccgtctgcagacctcgtccatctgcaccaggctctgccttcactcccccaagtctttggaaatttgttcttttcctttgaagtcacattttcttttaaaattttttgttttgcatccgaaaccgaaagaaataaagcggtgggaggcagggccattgtgttga

SEQ ID NO: 286910 - DNA, 1551 bp, Homo sapiens
taagggctaggtgcgaggcctgggggttaccggggtgcacgcttcgggttggtgtcatggcagctgcggggagccgcaagaggcgcctggcggagctgacggtggacgagttcctagcttcgggctttgactccgagtccgaatccgagtccgaaaattctccacaagcggagacacgggaagcacgcgaggctgcccggagtccggataagccgggcgggagcccctcggccagccggcgtaaaggccgtgcctctgagcacaaagaccagctctctcggctgaaggacagagaccccgagttctacaagttcctgcaggagaatgaccagagcctgctaaacttcagcgactcggacagctctgaggaggaagaggggccgttccactccctgccagatgtgctggaggaagccagtgaggaggaggatggagcggaggaaggagaagatggggacagagtccccagagggctgaaggggaagaagaattctgttcctgtgaccgtcgccatggttgagagatggaagcaggcagcaaagcaacgcctcactccaaagctgttccatgaagtggtacaggcgttccgagcagctgtggccaccacccgaggggaccaggaaagtgctgaggccaacaaattccaggtcacggacagtgctgcattcaatgctctggttaccttctgcatcaagagacctcattggctgtctccagaagctgctgtttggaaaggtggcaaaggatagcagcaggatgctgcagccgtccagcagcccgctctgggggaagcttcgtgtggacatcaaggcttacctgggctcggccatacagctggtgtcctgtctgtcggagacgacggtgttggcggccgtgctgcggcacatcagcgtgctggtgccctgcttcctgaccttccccaagcagtgccgcatgctgctcaagagaatggtggtcgtatggagcactggggaggagtctctgcgggtgctggctttcctggtcctcagcagagtctgccggcacaagaaggacactttccttggccccgtcctcaagcaaatgtacatcacgtatgtgaggaactgcaagttcacctcgcctggtgccctccccttcatcagtttcatgcagtggaccttgacggagctgctggccctggagccgggtgtggcctaccagcacgccttcctctacatccaggtaagcatgcctacctgggcgtatggcaagactccctctctataaaaagttaaaagaatgagttgaatgtggtggcacatgcctgtagtcccggctacttgagaggctagggcgggagaatcagttgagctcaggaggtcaaggctgcagtgagccaagaccatgccactgcactccagcctgggcaacaagagtgaagcttcatttcaaacaaacaaacaaacaatcaaacaagtaaacaaacagaccccaaactattattttacttctggggcccagaattccaaaatcagcttcactgggataacgtcaggtgcagcagggctggtactccggagcttgtagagg

SEQ ID NO: 286911 - DNA, 884 bp, Homo sapiens
aacgatccgtttcatccccttgggggtgcacgcttcgggttggtgtcatggcagctgcggggagccgcaagaggcgcctggcggagctgacggtggacgagttcctagcttcgggctttgactccgagtccgaatccgagtccgaaaattctccacaagcggagacacgggaagcacgcgaggctgcccggagtccggataagccgggcgggagcccctcggccaggttagtggggacatgcgtgagcagaacctcttgctcgtcctgtcccaccccggttgggttgctgacctcgcctggggtctcagggccaaggcctaaggatcgccgacctctgccccccagtcctttcagcttaacttactctttcatccgatgtttactgagctcctgttccgtgccaaactctgtcctaggcagggagcgtatgttggtgagttgtgcaaaaatctcttcccgatctaggagaactctcacgttcttgggtgaaatcaccgcctgcagttcggtagaagagagataagtgctggggagggaaaggaaggacagaggggctgaagagagagttgcaggggagccgagttgctctgttagaaggagcggaggctgtgctcggtggctcacgcctgtaatgccagcactttgggaggccgaggcgggcagattacctgaggtcaggaattcgagaccagcctgaccaacacggaaaaatcatgtctctactaaaaatataaaaattagccgggcgtggtgggcacctgtaatcccaactactcgggaggctgaggcaggagaatcgcttgaacttgggaggtggaggttgcagtgagccgagatggcaccattgcattccagcctgggtgagagagtgagactccatctc

SEQ ID NO: 286912 - DNA, 921 bp, Homo sapiens
acgcgtaacgccctctgcgtgcgccggcgccctatgaagatccggcgcagctaaagtcagtggaaggtagaaagacgccacagccgcctttcgacaactttttgttacaaaagtggagatctacacggaggcgacggcctaggtcgctctgacaggacccaacgaccctcctgacgcgtccacccgtcctcgctagcagggtcccccagcgggctctcgacctgcgccaccagagttccactctttttgtcgacaataatatggcgcccaaacacgtggggcctcagagaagactctggatccggaaggagtatcccaaaaccagagctaaggtaccagctggagcccactgaagcctcaccgagtttgggcttctcctcctgtggaactggaaaccaaaatcatggtattttgaaaaccagaggtatgaatctccctcgtttggcatcccactgggcctggacctgtttcactgctaatgttctgctgccaaaactatacaagctgcctggactattgcagaagaggaagatgaaacactgaattaggagatctgggaaactgcagacacactttctgacatgttcaaatcaggaaaaaaagggtttgaaatctttcttctataatacttcatgaatttttctaaaatactgttcaattttaatgtatttgtttattctgttgccaatgtttaagtctttaatcactttaaacaataggaagtaaaaattaaacagcttcataactttaagctttcatattagcagaaactctattttctaaaaattgttgccagatcattgaattctaaatacttgcctattaaatgtctgtgaaatgaatcaatttctcacataccacattacttccttctatctcctaccttcagctagtggggcaatccaatagcctactagaagt

SEQ ID NO: 286913 - DNA, 1035 bp, Homo sapiens
acgcgtaacgccctctgcgtgcgccggcgccctatgaagatccggcgcagctaaagtcagtggaaggtagaaagacgccacagccgcctttcgacaactttttgttacaaaagtggagatctacacggaggcgacggcctaggtcgctctgacaggacccaacgaccctcctgacgcgtccacccgtcctcgctagcagggtcccccagcgggctctcgacctgcgccaccagagttccactctttttgtcgacaataatatggcgcccaaacacgtggggcctcagagaagactctggatccggaaggagtatcccaaaaccagagctaaggtaccagctggagcccactgaagcctcaccgagtttgggcttctcctcctgtggaactggaaaccaaaatcatggtattttgaaaaccagaggtatgaatctccctcgtttggcatcccactgggcctggacctgtttcactgctaatgttctgctgccaaaactatacaagctgcctggactattgcagaagaggtgggtgcataagattgtaaggaccggctttcagggaaaaaattagcttaaggtcaaaccctccaaatcaagaaagggggtacaaaaatgcctaaacagcaggtaaaacaagtttagttgccttctaagctattatgtgtcacttttgcatccaccccaaccataaaaattttctgcttactatagaattaaaggaaattctttactaacaggataaaaatattttgtaacaaagcctcctgggtataatactaccaatcatgagttgtgaagatcgatcgatctatctatctatctatctatctatctatctatgtaactatatttttcagaagaatgcttatgtttggtatataaggctaactgttacaagtctgtaacaaaaaccaagctcacagtagctcaacacatagaagttaaaaataagtccgtcttttaacttttgttttgttttgttttgttgttggcttttttacttaaaataataattttacgaagtaacaagtgc

SEQ ID NO: 286914 - DNA, 469 bp, Homo sapiens
gggacctcccccaggggaaggggactcatccaggagagcagggccccagccatgtgccagtgttctgtgctaacatctccagctgctgggtccccctgaactgatggtgaactgccagagccagggagcccacagatgccaactccagctcccttgcctgagagcagatactgttctgaaaactccctggaacaactcacactcgccgcagtcctttgaggtaaatatgattatcgtcacccccatcgtgtagatgaagaaaccgaagtacagaggggttaagtgacttgcccaaggtcacacagccagcaactggtagagctgggatttgaaccccggtagctgcctccaggacctaccgctctgttgctttctcatgtgctaagtggcccaaaagaagagttaaggtgggtggggcaggggagaaaggcaggcagggcctggagcccagcaggagtcactagctaga

SEQ ID NO: 286915 - DNA, 603 bp, Homo sapiens
ccatctgggagcagggccaagagaagctggcagcagttacacagcgcaaaataaaaggccttgggctggactcaggcggaaagaaagtgctggaggaaatgaaagaacaaagcgggctgtctgtgtgcccacgccgggccggtcactaccttttctgcctgacaagtgtacataaaacaattcccgaacagcacggagcatcagacacaactagagctgctgggtccccctgaactgatggtgaactgccagagccagggagcccacagatgccaactccagctcccttgcctgagagcagatactgttctgaaaactccctggaacaactcacactcgccgcagtcctttgaggtaaatatgattatcgtcacccccatcgtgtagatgaagaaaccgaagtacagaggggttaagtgacttgcccaaggtcacacagccagcaactggtagagctgggatttgaaccccggtagctgcctccaggacctaccgctctgttgctttctcatgtgctaagtggcccaaaagaagagttaaggtgggtggggcaggggagaaaggcaggcagggcctggagcccagcaggagtcactagctaga

SEQ ID NO: 286916 - DNA, 377 bp, Homo sapiens
caggaaaactgccttgggtgccatggcgcagcctgcccacacttcaggcacagagcacagaagattctgtggtttccacacctgggaagagaaaagaaaaaccttccagtgttcaggtagccacaacttgaccatggggaccccttgaactggcacgacctcccgtccgcacccaagtccccaccagcctgtccctctgatggttctgggctgggtgtggcagggaaagggcagaagtgagactttgacctggtgggtgcacacgcctaggtgtaaatctagctccaacatcttacatgagaatgaattgaattcagattctttaatggctcaccctggagttttatccctcctggtaataatttcatgaccaacac

SEQ ID NO: 286917 - DNA, 454 bp, Homo sapiens
tcaagtaattattcagcacaaattcatgaacatgtacctaaagcatagatataaaaatgtttatactcccaaagcaaaagcaacccaaagtctgtcaattatagaataaataagtagtgttttagtcacacaataaatactgtaaaacaattaaaatgaacaatctacaactgtgttcaaccacatggatgaattttataaaccaaaattttagtgaaaggagccaaatacaaaacaacacatactctatgattcatttttgtatagttgaaaacagacaaaacaagtctattgtgttagaagtcagtgtagtgagtaacatttgctttggagtactggggtgctgatttggacagtgcaggaggaggtggtggtgatgctcaatttcttgagcagattgattgttaccttggttagttcaatttgtgctcatgatttatatacttttctctta

SEQ ID NO: 286918 - DNA, 1352 bp, Homo sapiens
ccccccaggagcaatgggcccaggccccgcctcccgcacacacccaccctgatgtagtcggctccgggcccgctgtcatcctcgttgagcaggatgactcaagggtagcatcaactgggaagggaggtgccgctcagttctccagggcacagctcgtgggcctcaccctgcctctttgcccgcagaccctgtggtgagcagagatggagggtccagggtatgcaagggggagcctcaggtcagcggtggcagatgctcggcctgccccccacctcccccaggcccgacgggtgacgccctggcctccgccctcacagggaaggatgttcttgtagtgattcttgggcttgttctccacactctgcccctccttccgagggtacaggaaccggcattcctgctgctgcagcatctggaggtgatggagccttcagctcacagccccggccccttcccagagcccgagatggccacccccagcccgtcccgtgtgggcggaagagtacctaggtgccgaggcaagagactgaaggcacaaactgtttcagtataataaagaaaatagaataagaatagtcataatacaaattagatacagcgatgatcatgaacaattatccatcattattataaacattattaatcattagcttttaatattactctgttgcattaataatataacctaggaataaccggcaggtatagggtcaggtgctgaagggacattgtgagaagtgaatagaaggcaagaggggagccttctgtcatgcccgcataagggccgcttgagggccccttggtcaagcggtaacgccagtgtctgggaaggcacccgttactgagcagaccgggaaagggagtctcctttccttggaggagtcagggaacgctctgctccaccagcttcttgtgggaggctggatgttacccaggcctgcctgcagtcatccggaggcctgaacccctccctgtggtgcttcaatggtcacgttccttgtccactttcatgctccttccgtactcctggttcctctttgaagttcgtagtagatagcggtagaagaaatagtgaaagtcttaaagtctttgatcttataagttcatagaagaaaacgctgatgcctgccgccttctctctctgcttcagctacctaagagggaagggcccgctgtcctgtgatcaggtgacttgcttcaccttgtcaatcacttagaagactgaccctccttatcctgcccccttgtcttgtatgcaataaatatcagcgagcccagccgttcagggccactaccggtctccgtgtctttgtggtagtggtccccggggcccagctgttttctctttatct

SEQ ID NO: 286919 - DNA, 1371 bp, Homo sapiens
ccccccaggagcaatgggcccaggccccgcctcccgcacacacccaccctgatgtagtcggctccgggcccgctgtcatcctcgttgagcaggatgactcaagggtagcatcaactgggaagggaggtgccgctcagttctccagggcacagctcgtgggcctcaccctgcctctttgcccgcagaccctgtggtgagcagagatggagggtccagggtatgcaagggggagcctcaggtcagcggtggcagatgctcggcctgccccccacctcccccaggcccgacgggtgacgccctggcctccgccctcacagggaaggatgttcttgtagtgattcttgggcttgttctccacactctgcccctccttccgagggtacaggaaccggcattcctgctgctgcagcatctggaggtgatggagccttcagctcacagccccggccccttcccagagcccgagatggccacccccagcccgtcccgtgtgggcggaagagtacctaggtgccgaggcaagagactgaaggcacaaactgtttcagtataataaagaaaatagaataagaatagtcataatacaaattagatacagcgatgatcatgaacaattatccatcattattataaacattattaatcattagcttttaatattactctgttgcattaataatataacctaggaataaccggcaggtatagggtcaggtgctgaagggacattgtgagaagtgaatagaaggcaagaggggagccttctgtcatgcccgcataagggccgcttgagggccccttggtcaagcggtaacgccagtgtctgggaaggcacccgttactgagcagaccgggaaagggagtctcctttccttggaggagtcagggaacgctctgctccaccagcttcttgtgggaggctggatgttacccaggcctgcctgcagtcatccggaggcctgaacccctccctgtggtgcttcaatggtcacgttccttgtccactttcatgctccttccgtactcctggttcctctttgaagttcgtagtagatagcggtagaagaaatagtgaaagtcttaaagtctttgatcttataagttcatagaagaaaacgctgatgcctgccgccttctctctctgcttcagctctgacggacagcgtgaagccccccgggctgctctcactgggcctggcaaggaagtccccacgctgacctctggataggaacagcttctccgcctccaccctgctgatgttggggtgaaaccacctgtaatcccagctacacgggaggctgaggcaggagaatcgcttgaacccgggaggcggaggttgcggtgagccgagatctcgccactgcactcca

SEQ ID NO: 286920 - DNA, 1226 bp, Homo sapiens
ccccccaggagcaatgggcccaggccccgcctcccgcacacacccaccctgatgtagtcggctccgggcccgctgtcatcctcgttgagcaggatgactcaagggtagcatcaactgggaagggaggtgccgctcagttctccagggcacagctcgtgggcctcaccctgcctctttgcccgcagaccctgtggtgagcagagatggagggtccagggtatgcaagggggagcctcaggtcagcggtggcagatgctcggcctgccccccacctcccccaggcccgacgggtgacgccctggcctccgccctcacagggaaggatgttcttgtagtgattcttgggcttgttctccacactctgcccctccttccgagggtacaggaaccggcattcctgctgctgcagcatctggaggtgatggagccttcagctcacagccccggccccttcccagagcccgagatggccacccccagcccgtcccgtgtgggcggaagagtacctaggtgccgaggcaagagactgaaggcacaaactgtttcagtataataaagaaaatagaataagaatagtcataatacaaattagatacagcgatgatcatgaacaattatccatcattattataaacattattaatcattagcttttaatattactctgttgcattaataatataacctaggaataaccggcaggtatagggtcaggtgctgaagggacattgtgagaagtgaatagaaggcaagaggggagccttctgtcatgcccgcataagggccgcttgagggccccttggtcaagcggtaacgccagtgtctgggaaggcacccgttactgagcagaccgggaaagggagtctcctttccttggaggagtcagggaacgctctgctccaccagcttcttgtgggaggctggatgttacccaggcctgcctgcagtcatccggaggcctgaacccctccctgtggtgcttcaatggtcacgttccttgtccactttcatgctccttccgtactcctggttcctctttgaagttcgtagtagatagcggtagaagaaatagtgaaagtcttaaagtctttgatcttataagttcatagaagaaaacgctgatgcctgccgccttctctctctgcttcagctctgcttgaggtgcacaaccgcccccaccttccccatcaatgggctcttcctgctacaccgggtctccgagggtg

SEQ ID NO: 286921 - DNA, 268 bp, Homo sapiens
agtccggccagccgaagtactggaagtgctgcaccgtacgctgtggctcctcctgagcggggcaagcgacctaagagggaagggcccgctgtcctgtgatcaggtgacttgcttcaccttgtcaatcacttagaagactgaccctccttatcctgcccccttgtcttgtatgcaataaatatcagcgagcccagccgttcagggccactaccggtctccgtgtctttgtggtagtggtccccggggcccagctgttttctctttatct

SEQ ID NO: 286922 - DNA, 446 bp, Homo sapiens
ctgttatcccctcgtcccgttgtcccctcgggacgtctggcacagcttccccgactaattccggcccctcacctcaactgtgctggccgggaggagagcagagacgcagtcctgcccagtgtagaccgtggaccccgcagccgaatcccttgggaagctgcttaaagtgcatcctaccaatgcagctcctttagggccatggagccccaatactctgcattcctaacacgcgctgtggggcaggcgcagtccaggtacacctactttctcctgcctctgccacccctgagacagcaagaccagccccctcttcctccttcccagtctactcaacatgaagacgacagaaggggaagacctttatgaggattcacttccacttaaggaataatgaatatgttttatcttccttaaaaaaaaaataaaagatgtggaggatggcttga

SEQ ID NO: 286923 - DNA, 476 bp, Homo sapiens
tagggccatggagccccaatactctgcattcctaacacgcgctgtggggcaggcgcagtccaggtaaggacatgggccaggctgctccctgataatacccgtgagcccatcccccgccacgacccgggcgacccgcggggaggaggcttccctgatcctcccacctcacctcgtccttgtccactttgctgaatcccttagaaacctggacttgaactgagccttgctcccctcccctagcccaaagactgggaaccttgagaggcccgcggtgctgggtacgaggagggggcgggaaagccccggggagctggactgaagtggactggggctgggggcagctggcatctggttttcacactcaccatgtacaccattcaataaacctttatcgccccgagtagaagaatgaataaaactagacccatttcgatctgcaattcattacctaagtcgagggaaaactattgggggcg

SEQ ID NO: 286924 - DNA, 2436 bp, Homo sapiens
aataagatgcgatactagctcacagcctgggctacagcttaaatgcagaaggctaaaaatttaaccagcttcttggggctccatttttaatactaattcattcagaaaatgcaacaggagctggtgctacacaaaatcagaagtctttaggaactgcactgggttgctctgttagtcaagaaaactaacagtaaaaatctgcccttaagtattttaagttaaaatccatgttcagtggtgcataactctggggtaccaacccagtatttactttgagaaaagtatccaatcttgctcaaaggtatcaaatctgttgtaggtgctgaagtgggatgagcttctgtctaagctaggttcctctagttctgtagtagacagccaggttcctctatttttacaaaagaataatgtgttctttgttgtctgcctgtagatttaatatctaaaagattcaagtctccctaattgacaatccatgcccatgggaccagttcataacagaattaagctgtgaagtgactcaatctgtcacctccccaaagctcagctggtactgctattttttcagaacaagacattcattttcctctaaacctactaaacttgatccatgtatatgttaaattgccaaaaaaggaatttacatgaactgtattaggcttaaactgaattataagatatcaggtccttggtttttaacagaaattcttttttttttttttttttttttttttttcctgagacagggtctacagggtcttgctctgtcgcccaggctggagtgcagtggcacaattatagctcactgcaacctccaacttctaggctcaagcaatccaactgcctcagcctcccgagtaataaattccattttaaagttgtttgccaatttcattgtctctgcaaactaatttatcctttgaatccaatgatgagaactgcaatcccaaggtttctctttttgctttggctgccaggaatttcagagctaaatgtaggcttagattcttaaagtgcctggcacatctctctcttcctgtaatctagtttctgatctttctcttccatttttaactttctaatctgcactgtccagtatggtagccactagtcacgtacatttgacaggtaggctagtccaaattgggatgtgctgtaagtgtaaaatatctcagtaagttttaatattgattacatattgaatgattttttgatatattgggtaaaattaagttattaaaattaatttcaccacttcattttacttattttggctactagaaaattttaaattatatatatggcttgcatttgtgacattatatttctagtggatggcactattctgcaaatcatctgttttatgactgtgttattattgtaaacctgaaatccttttggaaagcaggtgaagtaatacaaataataatacaaaggtggcagcagtggatggaatgagaaaggggaggtcgactgggacaagttcttgtccttatccttgtcaatttgtcttttgcttgtgtgattcacatacaaaccccttggtaaagtgtgttgtcagctctcttcatcccaggtgagtagtattctcatggctctcccttgtctccagaaaaacctcagctttactttagctaacaaattggaaacgatctgataagacaattcacaccacattgcaagtgactgataacaacattgtgttcatccctgtcagggagtatttccattttaaccggaaacaatccctgaacccacaggaatgaatgcctaatggtggagtttcagccatcagtgacaggtgagtgagaggtagactctggttttgtgtgtgtgtatgtttatatgtgtatggctacattcaggatagggctgaaagtagggtatttggatggaaaggtaatggggctggcagagaagccaagcggagaaggtggcaaatccccagctgggccagactgagaggggtggtgagacaccaaccagatgcggtgcaggccctcaaggatttgttaagcaatagaatagcccagttgatgtcaccagagggtgggtatcaagacagtctccacagtaactactgtagagtaacagaaaaggtctcagagtaggattcaggagattatgactgcagtctacaactgactcactggcttaactctgggcaagtccttttaccccttgggtttcagtttcttcatctggcattttccagacaaagaaatgggtgttcgattctcaaatgagttctaagagatgtgaaggtgctctgagaagtagaaagtgctctatacatgcaaggatgcaaggaagagtgatttcatatcttaaaatggaaatacagccaggcaggcctagagtagtagaggacagaaagcagggatggaggactatggggaaacctgaaagccggtgtacttgaaacactggtctttc

SEQ ID NO: 286925 - DNA, 917 bp, Homo sapiens
ctcggttatggaggaggccttccgctcgcagcggcctctccagcaccccttttaggcctgagcacccgcaggggtgcccaggccgcacgccaaacgcgggcccgcgccggttacctggctgcgcgctcccgctctgcctcgcgattctccggaatcgtacctcttcgtgggctcgcgccagcgctgtgagcgcacaattagtttaaactatggccccgccccctcgcgctgccctctgattggcctctgtcggcggggcccgcttaaggacccgggaaaaggaagtttgagggccactgggaaagagaaggggtatcaccgcttccggaccccggcctgtacttgaaggcaaagagaactacaaatcccagcgtcacccgcggccttgaagccccgcccctgacaaactgaaggtcccggtaagcatcgcgtcagtacttatggcgcctgccgggttgtggtgacgaaagcagttgccatggagttgctctgagtaaccctgaggcagtgggacgccaagactggagaggaagcgactgcggggagtatttccattttaaccggaaacaatccctgaacccacaggaatgaatgcctaatggtggagtttcagccatcagtgacaggctgaacccagactcccagggcacctgcttgcacctttgaatgatggcctgaactatgaacaaacgggactatatgaacacttcggtacaggagccccctcttgactactccttcagaagcatccacgtcattcaagcagcaaatctgaaaggaaacagggggctatcacagtagttgatcatctttaaaagaagccaggctacagcaggaaagtcaagtggaagaaaactgggaagccagtctatcagccaatagttttattctcctgtttttacctgaagagaggagga

SEQ ID NO: 286926 - DNA, 2634 bp, Homo sapiens
ctcggttatggaggaggccttccgctcgcagcggcctctccagcaccccttttaggcctgagcacccgcaggggtgcccaggccgcacgccaaacgcgggcccgcgccggttacctggctgcgcgctcccgctctgcctcgcgattctccggaatcgtacctcttcgtgggctcgcgccagcgctgtgagcgcacaattagtttaaactatggccccgccccctcgcgctgccctctgattggcctctgtcggcggggcccgcttaaggacccgggaaaaggaagtttgagggccactgggaaagagaaggggtatcaccgcttccggaccccggcctgtacttgaaggcaaagagaactacaaatcccagcgtcacccgcggccttgaagccccgcccctgacaaactgaaggtcccggtaagcatcgcgtcagtacttatggcgcctgccgggttgtggtgacgaaagcagttgccatggagttgctctgagtaaccctgaggcagtgggacgccaagactggagaggaagcgactgcggggagtatttccattttaaccggaaacaatccctgaacccacaggaatgaatgcctaatggtggagtttcagccatcagtgacaggctgaacccagactcccagggcacctgcttgcacctttgaatgatggcctgaactatgaacaaacgggactatatgaacacttcggtacaggagccccctcttgactactccttcagaagcatccacgtcattcaagatctggtaaatgaggagccaaggacaggactacgaccactgaagcgttcaaagtcggggaaatcactgacccagtccctgtggctgaataacaatgttctcaatgatctgagagacttcaaccaggtggcttcacagctgttggagcacccagagaacctggcctggatcgacctgtcctttaatgacctgacttccattgaccctgtcctaacaactttcttcaacctgagtgtcctctatcttcacggcaacagcatccagcgcctgggggaggtgaataagctggctgtccttcctcggctccgtagcctgacactccatgggaaccccatggaggaagagaaagggtataggcaatatgtgctgtgcaccctgtcccgtatcaccacgttcgacttcagtggggtcaccaaagcagaccgcaccacagctgaagtctggaaacgcatgaacatcaagcccaagaaggcctggaccaagcagaatacactttgaggctcccacgaccctagtagtcctaaaggcctaagcatagacagcatggtttgacaataaataatttgagctgttgagcagatgagaagtcacttacaccttgtagagatgttctctaactcaggcaactgcaagtagctctagccttttcttttctttttttttttttgagacggagtctcactctgtcacacaggctggagtgcagtggcacgatcttggctcactgcaacctcagcctcccaggttcaagagattctcctgcctcagcctccccagtagctgtgattaaagggcgcctgccaccatgactggctaattttgttgttgttgttgttgttttgagacggtttcactcgtcaccccagctggagtgcagtggtgcgatctcagctcactgcaacctccgcctgctgggttcaagcgattctcctgcctcagcctcctgagtagctgggattacaggcgcctgctaccacatccagctaattttttttttgagacggagtctcgctctgtcgcccaggctggagtgcagtggcacgatctcggctcactgcaaactccgccttccaggttcacgccattctcctgcctcagcctcccaagtagctgggactataggcacctactaccacgcctggctaattttttgtatttttagtagagacggggtttcaccatgttagccaggatggtctccatctcctgaccttgtgatccacccacctcggcttcccccagctaattttttatattttagtagagacaaggtttcgccatgttggccaggctggtcttgaactcctgacctcaggtgatccgtctgctttggcctcccaaagtgctgggattagaagcgtgagccaccacgcccagcctttttttgtatttttagtagagatggggtttcgccatgttggccaggctggtctcaaactcctgacctcaggtgatctgcccacctcagcctcccaaagtgctaggattacaggataagccactgcacctggccagctctagtcttattttgctgaaaaagggaggcaattgagggaaaggcctgctggcctgggacactggagacgtgggtttaccacacagccttgggaaatttatctaactctctgggcccctttgtacttttcagcttagagatttgggggttaaagtagatcagtaatttccaaactcttcacagagtaccagggtctgtagagatgcctcacaggcctccatgacaggccaagaagatggcctatgatctctgaaaccagcccccacttcaatcagatcaaagtaattccattctgttttatatgctgggattctgcttaagatttcatttgataaaaagaatcttctgcttaaaaa

SEQ ID NO: 286927 - DNA, 3809 bp, Homo sapiens
aataagatgcgatactagctcacagcctgggctacagcttaaatgcagaaggctaaaaatttaaccagcttcttggggctccatttttaatactaattcattcagaaaatgcaacaggagctggtgctacacaaaatcagaagtctttaggaactgcactgggttgctctgttagtcaagaaaactaacagtaaaaatctgcccttaagtattttaagttaaaatccatgttcagtggtgcataactctggggtaccaacccagtatttactttgagaaaagtatccaatcttgctcaaaggtatcaaatctgttgtaggtgctgaagtgggatgagcttctgtctaagctaggttcctctagttctgtagtagacagccaggttcctctatttttacaaaagaataatgtgttctttgttgtctgcctgtagatttaatatctaaaagattcaagtctccctaattgacaatccatgcccatgggaccagttcataacagaattaagctgtgaagtgactcaatctgtcacctccccaaagctcagctggtactgctattttttcagaacaagacattcattttcctctaaacctactaaacttgatccatgtatatgttaaattgccaaaaaaggaatttacatgaactgtattaggcttaaactgaattataagatatcaggtccttggtttttaacagaaattcttttttttttttttttttttttttttttcctgagacagggtctacagggtcttgctctgtcgcccaggctggagtgcagtggcacaattatagctcactgcaacctccaacttctaggctcaagcaatccaactgcctcagcctcccgagtaataaattccattttaaagttgtttgccaatttcattgtctctgcaaactaatttatcctttgaatccaatgatgagaactgcaatcccaaggtttctctttttgctttggctgccaggaatttcagagctaaatgtaggcttagattcttaaagtgcctggcacatctctctcttcctgtaatctagtttctgatctttctcttccatttttaactttctaatctgcactgtccagtatggtagccactagtcacgtacatttgacaggtaggctagtccaaattgggatgtgctgtaagtgtaaaatatctcagtaagttttaatattgattacatattgaatgattttttgatatattgggtaaaattaagttattaaaattaatttcaccacttcattttacttattttggctactagaaaattttaaattatatatatggcttgcatttgtgacattatatttctagtggatggcactattctgcaaatcatctgttttatgactgtgttattattgtaaacctgaaatccttttggaaagcaggtgaagtaatacaaataataatacaaaggtggcagcagtggatggaatgagaaaggggaggtcgactgggacaagttcttgtccttatccttgtcaatttgtcttttgcttgtgtgattcacatacaaaccccttggtaaagtgtgttgtcagctctcttcatcccaggtgagtagtattctcatggctctcccttgtctccagaaaaacctcagctttactttagctaacaaattggaaacgatctgataagacaattcacaccacattgcaagtgactgataacaacattgtgttcatccctgtcagggagtatttccattttaaccggaaacaatccctgaacccacaggaatgaatgcctaatggtggagtttcagccatcagtgacaggctgaacccagactcccagggcacctgcttgcacctttgaatgatggcctgaactatgaacaaacgggactatatgaacacttcggtacaggagccccctcttgactactccttcagaagcatccacgtcattcaagatctggtaaatgaggagccaaggacaggactacgaccactgaagcgttcaaagtcggggaaatcactgacccagtccctgtggctgaataacaatgttctcaatgatctgagagacttcaaccaggtggcttcacagctgttggagcacccagagaacctggcctggatcgacctgtcctttaatgacctgacttccattgaccctgtcctaacaactttcttcaacctgagtgtcctctatcttcacggcaacagcatccagcgcctgggggaggtgaataagctggctgtccttcctcggctccgtagcctgacactccatgggaaccccatggaggaagagaaagggtataggcaatatgtgctgtgcaccctgtcccgtatcaccacgttcgacttcagtggggtcaccaaagcagaccgcaccacagctgaagtctggaaacgcatgaacatcaagcccaagaaggcctggaccaagcagaatacactttgaggctcccacgaccctagtagtcctaaaggcctaagcatagacagcatggtttgacaataaataatttgagctgttgagcagatgagaagtcacttacaccttgtagagatgttctctaactcaggcaactgcaagtagctctagccttttcttttctttttttttttttgagacggagtctcactctgtcacacaggctggagtgcagtggcacgatcttggctcactgcaacctcagcctcccaggttcaagagattctcctgcctcagcctccccagtagctgtgattaaagggcgcctgccaccatgactggctaattttgttgttgttgttgttgttttgagacggtttcactcgtcaccccagctggagtgcagtggtgcgatctcagctcactgcaacctccgcctgctgggttcaagcgattctcctgcctcagcctcctgagtagctgggattacaggcgcctgctaccacatccagctaattttttttttgagacggagtctcgctctgtcgcccaggctggagtgcagtggcacgatctcggctcactgcaaactccgccttccaggttcacgccattctcctgcctcagcctcccaagtagctgggactataggcacctactaccacgcctggctaattttttgtatttttagtagagacggggtttcaccatgttagccaggatggtctccatctcctgaccttgtgatccacccacctcggcttcccccagctaattttttatattttagtagagacaaggtttcgccatgttggccaggctggtcttgaactcctgacctcaggtgatccgtctgctttggcctcccaaagtgctgggattagaagcgtgagccaccacgcccagcctttttttgtatttttagtagagatggggtttcgccatgttggccaggctggtctcaaactcctgacctcaggtgatctgcccacctcagcctcccaaagtgctaggattacaggataagccactgcacctggccagctctagtcttattttgctgaaaaagggaggcaattgagggaaaggcctgctggcctgggacactggagacgtgggtttaccacacagccttgggaaatttatctaactctctgggcccctttgtacttttcagcttagagatttgggggttaaagtagatcagtaatttccaaactcttcacagagtaccagggtctgtagagatgcctcacaggcctccatgacaggccaagaagatggcctatgatctctgaaaccagcccccacttcaatcagatcaaagtaattccattctgttttatatgctgggattctgcttaagatttcatttgataaaaagaatcttctgcttaaaaa

SEQ ID NO: 286928 - DNA, 2636 bp, Homo sapiens
ctcggttatggaggaggccttccgctcgcagcggcctctccagcaccccttttaggcctgagcacccgcaggggtgcccaggccgcacgccaaacgcgggcccgcgccggttacctggctgcgcgctcccgctctgcctcgcgattctccggaatcgtacctcttcgtgggctcgcgccagcgctgtgagcgcacaattagtttaaactatggccccgccccctcgcgctgccctctgattggcctctgtcggcggggcccgcttaaggacccgggaaaaggaagtttgagggccactgggaaagagaaggggtatcaccgcttccggaccccggcctgtacttgaaggcaaagagaactacaaatcccagcgtcacccgcggccttgaagccccgcccctgacaaactgaaggtcccggtaagcatcgcgtcagtacttatggcgcctgccgggttgtggtgacgaaagcagttgccatggagttgctctgagtaaccctgaggcagtgggacgccaagactggagaggaagcgactgcggggagtatttccattttaaccggaaacaatccctgaacccacaggaatgaatgcctaatggtggagtttcagccatcagtgacaggctgaacccagactcccagggcacctgcttgcacctttgaatgatggcctgaactatgaacaaacgggactatatgaacacttcggtacaggagccccctcttgactactccttcagaagcatccacgtcattcaagatctggtaaatgaggagccaaggacaggactacgaccactgaagcgttcaaagtcggggaaatcactgacccagtccctgtggctgaataacaatgttctcaatgatctgagagacttcaaccaggtggcttcacagctgttggagcacccagagaacctggcctggatcgacctgtcctttaatgacctgacttccattgaccctgtcctaacaactttcttcaacctgagtgtcctctatcttcacggcaacagcatccagcgcctgggggaggtgaataagctggctgtccttcctcggctccgtagcctgacactccatgggaaccccatggaggaagagaaagggtataggcaatatgtgctgtgcaccctgtcccgtatcaccacgttcgacttcagtggggtcaccaaagcagaccgcaccacagctgaagtctggaaacgcatgaacatcaagcccaagaaggcctggaccaagcagaatacactttgaggctcccacgaccctagtagtcctaaaggcctaagcatagacagcatggtttgacaataaataatttgagctgttgagcagatgagaagtcacttacaccttgtagagatgttctctaactcaggcaactgcaagtagctctagccttttcttttctttttttttttttgagacggagtctcactctgtcacacaggctggagtgcagtggcacgatcttggctcactgcaacctcagcctcccaggttcaagagattctcctgcctcagcctccccagtagctgtgattaaagggcgcctgccaccatgactggctaattttgttgttgttgttgttgttttgagacggtttcactcgtcaccccagctggagtgcagtggtgcgatctcagctcactgcaacctccgcctgctgggttcaagcgattctcctgcctcagcctcctgagtagctgggattacaggcgcctgctaccacatccagctaattttttttttgagacggagtctcgctctgtcgcccaggctggagtgcagtggcacgatctcggctcactgcaaactccgccttccaggttcacgccattctcctgcctcagcctcccaagtagctgggactataggcacctactaccacgcctggctaattttttgtatttttagtagagacggggtttcaccatgttagccaggatggtctccatctcctgaccttgtgatccacccacctcggcttcccccagctaattttttatattttagtagagacaaggtttcgccatgttggccaggctggtcttgaactcctgacctcaggtgatccgtctgctttggcctcccaaagtgctgggattagaagcgtgagccaccacgcccagcctttttttgtatttttagtagagatggggtttcgccatgttggccaggctggtctcaaactcctgacctcaggtgatctgcccacctcagcctcccaaagtgctaggattacaggataagccactgcacctggccagctctagtcttattttgtggcctgggacactggagacgtgggtttaccacacagccttgggaaatttatctaactctctgggcccctttgtacttttcagcttagagatttgggggttaaagtagatcagtaatttccaaactcttcacagagtaccagggtctgtagagatgcctcacaggcctccatgacaggccaagaagatggcctatgatctctgaaaccagcccccacttcaatcagatcaaagtaattccattctgttttatatgctgggattctgcttaagatttcatttgataaaaagaatcttctgcttaaaaaaaaaaagtcgacgcggccgcgaatttagtagtagta

SEQ ID NO: 286929 - DNA, 2600 bp, Homo sapiens
ctcggttatggaggaggccttccgctcgcagcggcctctccagcaccccttttaggcctgagcacccgcaggggtgcccaggccgcacgccaaacgcgggcccgcgccggttacctggctgcgcgctcccgctctgcctcgcgattctccggaatcgtacctcttcgtgggctcgcgccagcgctgtgagcgcacaattagtttaaactatggccccgccccctcgcgctgccctctgattggcctctgtcggcggggcccgcttaaggacccgggaaaaggaagtttgagggccactgggaaagagaaggggtatcaccgcttccggaccccggcctgtacttgaaggcaaagagaactacaaatcccagcgtcacccgcggccttgaagccccgcccctgacaaactgaaggtcccggtaagcatcgcgtcagtacttatggcgcctgccgggttgtggtgacgaaagcagttgccatggagttgctctgagtaaccctgaggcagtgggacgccaagactggagaggaagcgactgcggggagtatttccattttaaccggaaacaatccctgaacccacaggaatgaatgcctaatggtggagtttcagccatcagtgacaggctgaacccagactcccagggcacctgcttgcacctttgaatgatggcctgaactatgaacaaacgggactatatgaacacttcggtacaggagccccctcttgactactccttcagaagcatccacgtcattcaagatctggtaaatgaggagccaaggacaggactacgaccactgaagcgttcaaagtcggggaaatcactgacccagtccctgtggctgaataacaatgttctcaatgatctgagagacttcaaccaggtggcttcacagctgttggagcacccagagaacctggcctggatcgacctgtcctttaatgacctgacttccattgaccctgtcctaacaactttcttcaacctgagtgtcctctatcttcacggcaacagcatccagcgcctgggggaggtgaataagctggctgtccttcctcggctccgtagcctgacactccatgggaaccccatggaggaagagaaagggtataggcaatatgtgctgtgcaccctgtcccgtatcaccacgttcgacttcagtggggtcaccaaagcagaccgcaccacagctgaagtctggaaacgcatgaacatcaagcccaagaaggcctggaccaagcagaatacactttgaggctcccacgaccctagtagtcctaaaggcctaagcatagacagcatggtttgacaataaataatttgagctgttgagcagatgagaagtcacttacaccttgtagagatgttctctaactcaggcaactgcaagtagctctagccttttcttttctttttttttttttgagacggagtctcactctgtcacacaggctggagtgcagtggcacgatcttggctcactgcaacctcagcctcccaggttcaagagattctcctgcctcagcctccccagtagctgtgattaaagggcgcctgccaccatgactggctaattttgttgttgttgttgttgttttgagacggtttcactcgtcaccccagctggagtgcagtggtgcgatctcagctcactgcaacctccgcctgctgggttcaagcgattctcctgcctcagcctcctgagtagctgggattacaggcgcctgctaccacatccagctaattttttttttgagacggagtctcgctctgtcgcccaggctggagtgcagtggcacgatctcggctcactgcaaactccgccttccaggttcacgccattctcctgcctcagcctcccaagtagctgggactataggcacctactaccacgcctggctaattttttgtatttttagtagagacggggtttcaccatgttagccaggatggtctccatctcctgaccttgtgatccacccacctcggcttcccccagctaattttttatattttagtagagacaaggtttcgccatgttggccaggctggtcttgaactcctgacctcaggtgatccgtctgctttggcctcccaaagtgctgggattagaagcgtgagccaccacgcccagcctttttttgtatttttagtagagatggggtttcgccatgttggccaggctggtctcaaactcctgacctcaggtgatctgcccacctcagcctcccaaagtgctaggattacaggataagccactgcacctggccagctctagtcttattttgtggcctgggacactggagacgtgggtttaccacacagccttgggaaatttatctaactctctgggcccctttgtacttttcagcttagagatttgggggttaaagtagatcagtaatttccaaactcttcacagagtaccagggtctgtagagatgcctcacaggcctccatgacaggccaagaagatggcctatgatctctgaaaccagcccccacttcaatcagatcaaagtaattccattctgttttatatgctgggattctgcttaagatttcatttgataaaaagaatcttctgcttaaaaa

SEQ ID NO: 286930 - DNA, 2511 bp, Homo sapiens
ctcggttatggaggaggccttccgctcgcagcggcctctccagcaccccttttaggcctgagcacccgcaggggtgcccaggccgcacgccaaacgcgggcccgcgccggttacctggctgcgcgctcccgctctgcctcgcgattctccggaatcgtacctcttcgtgggctcgcgccagcgctgtgagcgcacaattagtttaaactatggccccgccccctcgcgctgccctctgattggcctctgtcggcggggcccgcttaaggacccgggaaaaggaagtttgagggccactgggaaagagaaggggtatcaccgcttccggaccccggcctgtacttgaaggcaaagagaactacaaatcccagcgtcacccgcggccttgaagccccgcccctgacaaactgaaggtcccgggagtatttccattttaaccggaaacaatccctgaacccacaggaatgaatgcctaatggtggagtttcagccatcagtgacaggctgaacccagactcccagggcacctgcttgcacctttgaatgatggcctgaactatgaacaaacgggactatatgaacacttcggtacaggagccccctcttgactactccttcagaagcatccacgtcattcaagatctggtaaatgaggagccaaggacaggactacgaccactgaagcgttcaaagtcggggaaatcactgacccagtccctgtggctgaataacaatgttctcaatgatctgagagacttcaaccaggtggcttcacagctgttggagcacccagagaacctggcctggatcgacctgtcctttaatgacctgacttccattgaccctgtcctaacaactttcttcaacctgagtgtcctctatcttcacggcaacagcatccagcgcctgggggaggtgaataagctggctgtccttcctcggctccgtagcctgacactccatgggaaccccatggaggaagagaaagggtataggcaatatgtgctgtgcaccctgtcccgtatcaccacgttcgacttcagtggggtcaccaaagcagaccgcaccacagctgaagtctggaaacgcatgaacatcaagcccaagaaggcctggaccaagcagaatacactttgaggctcccacgaccctagtagtcctaaaggcctaagcatagacagcatggtttgacaataaataatttgagctgttgagcagatgagaagtcacttacaccttgtagagatgttctctaactcaggcaactgcaagtagctctagccttttcttttctttttttttttttgagacggagtctcactctgtcacacaggctggagtgcagtggcacgatcttggctcactgcaacctcagcctcccaggttcaagagattctcctgcctcagcctccccagtagctgtgattaaagggcgcctgccaccatgactggctaattttgttgttgttgttgttgttttgagacggtttcactcgtcaccccagctggagtgcagtggtgcgatctcagctcactgcaacctccgcctgctgggttcaagcgattctcctgcctcagcctcctgagtagctgggattacaggcgcctgctaccacatccagctaattttttttttgagacggagtctcgctctgtcgcccaggctggagtgcagtggcacgatctcggctcactgcaaactccgccttccaggttcacgccattctcctgcctcagcctcccaagtagctgggactataggcacctactaccacgcctggctaattttttgtatttttagtagagacggggtttcaccatgttagccaggatggtctccatctcctgaccttgtgatccacccacctcggcttcccccagctaattttttatattttagtagagacaaggtttcgccatgttggccaggctggtcttgaactcctgacctcaggtgatccgtctgctttggcctcccaaagtgctgggattagaagcgtgagccaccacgcccagcctttttttgtatttttagtagagatggggtttcgccatgttggccaggctggtctcaaactcctgacctcaggtgatctgcccacctcagcctcccaaagtgctaggattacaggataagccactgcacctggccagctctagtcttattttgctgaaaaagggaggcaattgagggaaaggcctgctggcctgggacactggagacgtgggtttaccacacagccttgggaaatttatctaactctctgggcccctttgtacttttcagcttagagatttgggggttaaagtagatcagtaatttccaaactcttcacagagtaccagggtctgtagagatgcctcacaggcctccatgacaggccaagaagatggcctatgatctctgaaaccagcccccacttcaatcagatcaaagtaattccattctgttttatatgctgggattctgcttaagatttcatttgataaaaagaatcttctgcttaaaaa

SEQ ID NO: 286931 - DNA, 2497 bp, Homo sapiens
ctcggttatggaggaggccttccgctcgcagcggcctctccagcaccccttttaggcctgagcacccgcaggggtgcccaggccgcacgccaaacgcgggcccgcgccggttacctggctgcgcgctcccgctctgcctcgcgattctccggaatcgtacctcttcgtgggctcgcgccagcgctgtgagcgcacaattagtttaaactatggccccgccccctcgcgctgccctctgattggcctctgtcggcggggcccgcttaaggacccgggaaaaggaagtttgagggccactgggaaagagaaggggtatcaccgcttccggaccccggcctgtacttgaaggcaaagagaactacaaatcccagcgtcacccgcggccttgaagccccgcccctgacaaactgaaggtcccggtaagcatcgcgtcagtacttatggcgcctgccgggttgtggtgacgaaagcagttgccatggagttgctctgagtaaccctgaggcagtgggacgccaagactggagaggaagcgactgcggggagtatttccattttaaccggaaacaatccctgaacccacaggaatgaatgcctaatggtggagtttcagccatcagtgacagatctggtaaatgaggagccaaggacaggactacgaccactgaagcgttcaaagtcggggaaatcactgacccagtccctgtggctgaataacaatgttctcaatgatctgagagacttcaaccaggtggcttcacagctgttggagcacccagagaacctggcctggatcgacctgtcctttaatgacctgacttccattgaccctgtcctaacaactttcttcaacctgagtgtcctctatcttcacggcaacagcatccagcgcctgggggaggtgaataagctggctgtccttcctcggctccgtagcctgacactccatgggaaccccatggaggaagagaaagggtataggcaatatgtgctgtgcaccctgtcccgtatcaccacgttcgacttcagtggggtcaccaaagcagaccgcaccacagctgaagtctggaaacgcatgaacatcaagcccaagaaggcctggaccaagcagaatacactttgaggctcccacgaccctagtagtcctaaaggcctaagcatagacagcatggtttgacaataaataatttgagctgttgagcagatgagaagtcacttacaccttgtagagatgttctctaactcaggcaactgcaagtagctctagccttttcttttctttttttttttttgagacggagtctcactctgtcacacaggctggagtgcagtggcacgatcttggctcactgcaacctcagcctcccaggttcaagagattctcctgcctcagcctccccagtagctgtgattaaagggcgcctgccaccatgactggctaattttgttgttgttgttgttgttttgagacggtttcactcgtcaccccagctggagtgcagtggtgcgatctcagctcactgcaacctccgcctgctgggttcaagcgattctcctgcctcagcctcctgagtagctgggattacaggcgcctgctaccacatccagctaattttttttttgagacggagtctcgctctgtcgcccaggctggagtgcagtggcacgatctcggctcactgcaaactccgccttccaggttcacgccattctcctgcctcagcctcccaagtagctgggactataggcacctactaccacgcctggctaattttttgtatttttagtagagacggggtttcaccatgttagccaggatggtctccatctcctgaccttgtgatccacccacctcggcttcccccagctaattttttatattttagtagagacaaggtttcgccatgttggccaggctggtcttgaactcctgacctcaggtgatccgtctgctttggcctcccaaagtgctgggattagaagcgtgagccaccacgcccagcctttttttgtatttttagtagagatggggtttcgccatgttggccaggctggtctcaaactcctgacctcaggtgatctgcccacctcagcctcccaaagtgctaggattacaggataagccactgcacctggccagctctagtcttattttgctgaaaaagggaggcaattgagggaaaggcctgctggcctgggacactggagacgtgggtttaccacacagccttgggaaatttatctaactctctgggcccctttgtacttttcagcttagagatttgggggttaaagtagatcagtaatttccaaactcttcacagagtaccagggtctgtagagatgcctcacaggcctccatgacaggccaagaagatggcctatgatctctgaaaccagcccccacttcaatcagatcaaagtaattccattctgttttatatgctgggattctgcttaagatttcatttgataaaaagaatcttctgcttaaaaa

SEQ ID NO: 286932 - DNA, 2290 bp, Homo sapiens
ctcggttatggaggaggccttccgctcgcagcggcctctccagcaccccttttaggcctgagcacccgcaggggtgcccaggccgcacgccaaacgcgggcccgcgccggttacctggctgcgcgctcccgctctgcctcgcgattctccggaatcgtacctcttcgtgggctcgcgccagcgctgtgagcgcacaattagtttaaactatggccccgccccctcgcgctgccctctgattggcctctgtcggcggggcccgcttaaggacccgggaaaaggaagtttgagggccactgggaaagagaaggggtatcaccgcttccggaccccggcctgtacttgaaggcaaagagaactacaaatcccagcgtcacccgcggccttgaagccccgcccctgacaaactgaaggtcccgatctggtaaatgaggagccaaggacaggactacgaccactgaagcgttcaaagtcggggaaatcactgacccagtccctgtggctgaataacaatgttctcaatgatctgagagacttcaaccaggtggcttcacagctgttggagcacccagagaacctggcctggatcgacctgtcctttaatgacctgacttccattgaccctgtcctaacaactttcttcaacctgagtgtcctctatcttcacggcaacagcatccagcgcctgggggaggtgaataagctggctgtccttcctcggctccgtagcctgacactccatgggaaccccatggaggaagagaaagggtataggcaatatgtgctgtgcaccctgtcccgtatcaccacgttcgacttcagtggggtcaccaaagcagaccgcaccacagctgaagtctggaaacgcatgaacatcaagcccaagaaggcctggaccaagcagaatacactttgaggctcccacgaccctagtagtcctaaaggcctaagcatagacagcatggtttgacaataaataatttgagctgttgagcagatgagaagtcacttacaccttgtagagatgttctctaactcaggcaactgcaagtagctctagccttttcttttctttttttttttttgagacggagtctcactctgtcacacaggctggagtgcagtggcacgatcttggctcactgcaacctcagcctcccaggttcaagagattctcctgcctcagcctccccagtagctgtgattaaagggcgcctgccaccatgactggctaattttgttgttgttgttgttgttttgagacggtttcactcgtcaccccagctggagtgcagtggtgcgatctcagctcactgcaacctccgcctgctgggttcaagcgattctcctgcctcagcctcctgagtagctgggattacaggcgcctgctaccacatccagctaattttttttttgagacggagtctcgctctgtcgcccaggctggagtgcagtggcacgatctcggctcactgcaaactccgccttccaggttcacgccattctcctgcctcagcctcccaagtagctgggactataggcacctactaccacgcctggctaattttttgtatttttagtagagacggggtttcaccatgttagccaggatggtctccatctcctgaccttgtgatccacccacctcggcttcccccagctaattttttatattttagtagagacaaggtttcgccatgttggccaggctggtcttgaactcctgacctcaggtgatccgtctgctttggcctcccaaagtgctgggattagaagcgtgagccaccacgcccagcctttttttgtatttttagtagagatggggtttcgccatgttggccaggctggtctcaaactcctgacctcaggtgatctgcccacctcagcctcccaaagtgctaggattacaggataagccactgcacctggccagctctagtcttattttgctgaaaaagggaggcaattgagggaaaggcctgctggcctgggacactggagacgtgggtttaccacacagccttgggaaatttatctaactctctgggcccctttgtacttttcagcttagagatttgggggttaaagtagatcagtaatttccaaactcttcacagagtaccagggtctgtagagatgcctcacaggcctccatgacaggccaagaagatggcctatgatctctgaaaccagcccccacttcaatcagatcaaagtaattccattctgttttatatgctgggattctgcttaagatttcatttgataaaaagaatcttctgcttaaaaa

SEQ ID NO: 286933 - DNA, 3495 bp, Homo sapiens
aataagatgcgatactagctcacagcctgggctacagcttaaatgcagaaggctaaaaatttaaccagcttcttggggctccatttttaatactaattcattcagaaaatgcaacaggagctggtgctacacaaaatcagaagtctttaggaactgcactgggttgctctgttagtcaagaaaactaacagtaaaaatctgcccttaagtattttaagttaaaatccatgttcagtggtgcataactctggggtaccaacccagtatttactttgagaaaagtatccaatcttgctcaaaggtatcaaatctgttgtaggtgctgaagtgggatgagcttctgtctaagctaggttcctctagttctgtagtagacagccaggttcctctatttttacaaaagaataatgtgttctttgttgtctgcctgtagatttaatatctaaaagattcaagtctccctaattgacaatccatgcccatgggaccagttcataacagaattaagctgtgaagtgactcaatctgtcacctccccaaagctcagctggtactgctattttttcagaacaagacattcattttcctctaaacctactaaacttgatccatgtatatgttaaattgccaaaaaaggaatttacatgaactgtattaggcttaaactgaattataagatatcaggtccttggtttttaacagaaattcttttttttttttttttttttttttttttcctgagacagggtctacagggtcttgctctgtcgcccaggctggagtgcagtggcacaattatagctcactgcaacctccaacttctaggctcaagcaatccaactgcctcagcctcccgagtaataaattccattttaaagttgtttgccaatttcattgtctctgcaaactaatttatcctttgaatccaatgatgagaactgcaatcccaaggtttctctttttgctttggctgccaggaatttcagagctaaatgtaggcttagattcttaaagtgcctggcacatctctctcttcctgtaatctagtttctgatctttctcttccatttttaactttctaatctgcactgtccagtatggtagccactagtcacgtacatttgacaggtaggctagtccaaattgggatgtgctgtaagtgtaaaatatctcagtaagttttaatattgattacatattgaatgattttttgatatattgggtaaaattaagttattaaaattaatttcaccacttcattttacttattttggctactagaaaattttaaattatatatatggcttgcatttgtgacattatatttctagtggatggcactattctgcaaatcatctgttttatgactgtgttattattgtaaacctgaaatccttttggaaagcaggtgaagtaatacaaataataatacaaaggtggcagcagtggatggaatgagaaaggggaggtcgactgggacaagttcttgtccttatccttgtcaatttgtcttttgcttgtgtgattcacatacaaaccccttggtaaagtgtgttgtcagctctcttcatcccaggtgagtagtattctcatggctctcccttgtctccagaaaaacctcagctttactttagctaacaaattggaaacgatctgataagacaattcacaccacattgcaagtgactgataacaacattgtgttcatccctgtcagggagtatttccattttaaccggaaacaatccctgaacccacaggaatgaatgcctaatggtggagtttcagccatcagtgacaggctgaacccagactcccagggcacctgcttgcacctttgaatgatggcctgaactatgaacaaacgggactatatgaacacttcggtacaggagccccctcttgactactccttcagaagcatccacgtcattcaagatctggtaaatgaggagccaaggacaggactacgaccactgaagcgttcaaagtcggggaaatcactgacccagtccctgtggctgaataacaatgttctcaatgatctgagagacttcaaccaggtggcttcacagctgttggagcacccagagaacctggcctggatcgacctgtcctttaatgacctgacttccattgaccctgtcctaacaactttcttcaacctgagtgtcctctatcttcacggcaacagcatccagcgcctgggggaggtgaataagctggctgtccttcctcggctccgtagcctgacactccatgggaaccccatggaggaagagaaagggtatagacggagtctcactctgtcacacaggctggagtgcagtggcacgatcttggctcactgcaacctcagcctcccaggttcaagagattctcctgcctcagcctccccagtagctgtgattaaagggcgcctgccaccatgactggctaattttgttgttgttgttgttgttttgagacggtttcactcgtcaccccagctggagtgcagtggtgcgatctcagctcactgcaacctccgcctgctgggttcaagcgattctcctgcctcagcctcctgagtagctgggattacaggcgcctgctaccacatccagctaattttttttttgagacggagtctcgctctgtcgcccaggctggagtgcagtggcacgatctcggctcactgcaaactccgccttccaggttcacgccattctcctgcctcagcctcccaagtagctgggactataggcacctactaccacgcctggctaattttttgtatttttagtagagacggggtttcaccatgttagccaggatggtctccatctcctgaccttgtgatccacccacctcggcttcccccagctaattttttatattttagtagagacaaggtttcgccatgttggccaggctggtcttgaactcctgacctcaggtgatccgtctgctttggcctcccaaagtgctgggattagaagcgtgagccaccacgcccagcctttttttgtatttttagtagagatggggtttcgccatgttggccaggctggtctcaaactcctgacctcaggtgatctgcccacctcagcctcccaaagtgctaggattacaggataagccactgcacctggccagctctagtcttattttgctgaaaaagggaggcaattgagggaaaggcctgctggcctgggacactggagacgtgggtttaccacacagccttgggaaatttatctaactctctgggcccctttgtacttttcagcttagagatttgggggttaaagtagatcagtaatttccaaactcttcacagagtaccagggtctgtagagatgcctcacaggcctccatgacaggccaagaagatggcctatgatctctgaaaccagcccccacttcaatcagatcaaagtaattccattctgttttatatgctgggattctgcttaagatttcatttgataaaaagaatcttctgcttaaaaa

SEQ ID NO: 286934 - DNA, 2466 bp, Homo sapiens
aataagatgcgatactagctcacagcctgggctacagcttaaatgcagaaggctaaaaatttaaccagcttcttggggctccatttttaatactaattcattcagaaaatgcaacaggagctggtgctacacaaaatcagaagtctttaggaactgcactgggttgctctgttagtcaagaaaactaacagtaaaaatctgcccttaagtattttaagttaaaatccatgttcagtggtgcataactctggggtaccaacccagtatttactttgagaaaagtatccaatcttgctcaaaggtatcaaatctgttgtaggtgctgaagtgggatgagcttctgtctaagctaggttcctctagttctgtagtagacagccaggttcctctatttttacaaaagaataatgtgttctttgttgtctgcctgtagatttaatatctaaaagattcaagtctccctaattgacaatccatgcccatgggaccagttcataacagaattaagctgtgaagtgactcaatctgtcacctccccaaagctcagctggtactgctattttttcagaacaagacattcattttcctctaaacctactaaacttgatccatgtatatgttaaattgccaaaaaaggaatttacatgaactgtattaggcttaaactgaattataagatatcaggtccttggtttttaacagaaattcttttttttttttttttttttttttttttcctgagacagggtctacagggtcttgctctgtcgcccaggctggagtgcagtggcacaattatagctcactgcaacctccaacttctaggctcaagcaatccaactgcctcagcctcccgagtaataaattccattttaaagttgtttgccaatttcattgtctctgcaaactaatttatcctttgaatccaatgatgagaactgcaatcccaaggtttctctttttgctttggctgccaggaatttcagagctaaatgtaggcttagattcttaaagtgcctggcacatctctctcttcctgtaatctagtttctgatctttctcttccatttttaactttctaatctgcactgtccagtatggtagccactagtcacgtacatttgacaggtaggctagtccaaattgggatgtgctgtaagtgtaaaatatctcagtaagttttaatattgattacatattgaatgattttttgatatattgggtaaaattaagttattaaaattaatttcaccacttcattttacttattttggctactagaaaattttaaattatatatatggcttgcatttgtgacattatatttctagtggatggcactattctgcaaatcatctgttttatgactgtgttattattgtaaacctgaaatccttttggaaagcaggtgaagtaatacaaataataatacaaaggtggcagcagtggatggaatgagaaaggggaggtcgactgggacaagttcttgtccttatccttgtcaatttgtcttttgcttgtgtgattcacatacaaaccccttggtaaagtgtgttgtcagctctcttcatcccaggtgagtagtattctcatggctctcccttgtctccagaaaaacctcagctttactttagctaacaaattggaaacgatctgataagacaattcacaccacattgcaagtgactgataacaacattgtgttcatccctgtcagggagtatttccattttaaccggaaacaatccctgaacccacaggaatgaatgcctaatggtggagtttcagccatcagtgacaggctgaacccagactcccagggcacctgcttgcacctttgaatgatggcctgaactatgaacaaacgggactatatgaacacttcggtacaggagccccctcttgactactccttcagaagcatccacgtcattcaagatctggtaaatgaggagccaaggacaggactacgaccactgaagcgttcaaagtcggggaaatcactgacccagtccctgtggctgaataacaatgttctcaatgatctgagagacttcaaccaggtggcttcacagctgttggagcacccagagaacctggcctggatcgacctgtcctttaatgacctgacttccattgaccctgtcctaacaactttcttcaacctgagtgtcctctatcttcacggcaacagcatccagcgcctgggggaggtgaataagctggctgtccttcctcggctccgtagcctgacactccatgggaaccccatggaggaagagaaagggtatagagtaccagggtctgtagagatgcctcacaggcctccatgacaggccaagaagatggcctatgatctctgaaaccagcccccacttcaatcagatcaaagtaattccattctgttttatatgctgggattctgcttaagatttcatttgataaaaagaatcttctgcttaaaaa

SEQ ID NO: 286935 - DNA, 2113 bp, Homo sapiens
aataagatgcgatactagctcacagcctgggctacagcttaaatgcagaaggctaaaaatttaaccagcttcttggggctccatttttaatactaattcattcagaaaatgcaacaggagctggtgctacacaaaatcagaagtctttaggaactgcactgggttgctctgttagtcaagaaaactaacagtaaaaatctgcccttaagtattttaagttaaaatccatgttcagtggtgcataactctggggtaccaacccagtatttactttgagaaaagtatccaatcttgctcaaaggtatcaaatctgttgtaggtgctgaagtgggatgagcttctgtctaagctaggttcctctagttctgtagtagacagccaggttcctctatttttacaaaagaataatgtgttctttgttgtctgcctgtagatttaatatctaaaagattcaagtctccctaattgacaatccatgcccatgggaccagttcataacagaattaagctgtgaagtgactcaatctgtcacctccccaaagctcagctggtactgctattttttcagaacaagacattcattttcctctaaacctactaaacttgatccatgtatatgttaaattgccaaaaaaggaatttacatgaactgtattaggcttaaactgaattataagatatcaggtccttggtttttaacagaaattcttttttttttttttttttttttttttttcctgagacagggtctacagggtcttgctctgtcgcccaggctggagtgcagtggcacaattatagctcactgcaacctccaacttctaggctcaagcaatccaactgcctcagcctcccgagtaataaattccattttaaagttgtttgccaatttcattgtctctgcaaactaatttatcctttgaatccaatgatgagaactgcaatcccaaggtttctctttttgctttggctgccaggaatttcagagctaaatgtaggcttagattcttaaagtgcctggcacatctctctcttcctgtaatctagtttctgatctttctcttccatttttaactttctaatctgcactgtccagtatggtagccactagtcacgtacatttgacaggtaggctagtccaaattgggatgtgctgtaagtgtaaaatatctcagtaagttttaatattgattacatattgaatgattttttgatatattgggtaaaattaagttattaaaattaatttcaccacttcattttacttattttggctactagaaaattttaaattatatatatggcttgcatttgtgacattatatttctagtggatggcactattctgcaaatcatctgttttatgactgtgttattattgtaaacctgaaatccttttggaaagcaggtgaagtaatacaaataataatacaaaggtggcagcagtggatggaatgagaaaggggaggtcgactgggacaagttcttgtccttatccttgtcaatttgtcttttgcttgtgtgattcacatacaaaccccttggtaaagtgtgttgtcagctctcttcatcccaggtgagtagtattctcatggctctcccttgtctccagaaaaacctcagctttactttagctaacaaattggaaacgatctgataagacaattcacaccacattgcaagtgactgataacaacattgtgttcatccctgtcagggagtatttccattttaaccggaaacaatccctgaacccacaggaatgaatgcctaatggtggagtttcagccatcagtgacaggctgaacccagactcccagggcacctgcttgcacctttgaatgatggcctgaactatgaacaaacgggactatatgaacacttcggtacaggagccccctcttgactactccttcagaagcatccacgtcattcaaggtcagcccccagagcacagtactccactcactaaggcagcaggcccagtgtggtccctaggaagaaaccataatctacttaaaagcctaaagagattcttcccatatgcttgcagatgtgttgttactgtcttttggagggtaggggagagtgagaggtttttttctgtcttttt

SEQ ID NO: 286936 - DNA, 2670 bp, Homo sapiens
ctcggttatggaggaggccttccgctcgcagcggcctctccagcaccccttttaggcctgagcacccgcaggggtgcccaggccgcacgccaaacgcgggcccgcgccggttacctggctgcgcgctcccgctctgcctcgcgattctccggaatcgtacctcttcgtgggctcgcgccagcgctgtgagcgcacaattagtttaaactatggccccgccccctcgcgctgccctctgattggcctctgtcggcggggcccgcttaaggacccgggaaaaggaagtttgagggccactgggaaagagaaggggtatcaccgcttccggaccccggcctgtacttgaaggcaaagagaactacaaatcccagcgtcacccgcggccttgaagccccgcccctgacaaactgaaggtcccggtaagcatcgcgtcagtacttatggcgcctgccgggttgtggtgacgaaagcagttgccatggagttgctctgagtaaccctgaggcagtgggacgccaagactggagaggaagcgactgcggggagtatttccattttaaccggaaacaatccctgaacccacaggaatgaatgcctaatggtggagtttcagccatcagtgacaggctgaacccagactcccagggcacctgcttgcacctttgaatgatggcctgaactatgaacaaacgggactatatgaacacttcggtacaggagccccctcttgactactccttcagaagcatccacgtcattcaagatctggtaaatgaggagccaaggacaggactacgaccactgaagcgttcaaagtcggggaaatcactgacccagtccctgtggctgaataacaatgttctcaatgatctgagagacttcaaccaggtggcttcacagctgttggagcacccagagaacctggcctggatcgacctgtcctttaatgacctgacttccattgaccctgtcctaacaactttcttcaacctgagtgtcctctatcttcacggcaacagcatccagcgcctgggggaggtgaataagctggctgtccttcctcggctccgtagcctgacactccatgggaaccccatggaggaagagaaagggtataggcaatatgtgctgtgcaccctgtcccgtatcaccacgttcgacttcagtggggtcaccaaagcagaccgcaccacagctgaagtctggaaacgcatgaacatcaagcccaagaaggcctggaccaagcagaatacactttgaggctcccacgaccctagtagtcctaaaggcctaagcatagacagcatggtttgacaataaataatttgagctgttgagcagatgagaagtcacttacaccttgtagagatgttctctaactcaggcaactgcaagtagctctagccttttcttttctttttttttttttgagacggagtctcactctgtcacacaggctggagtgcagtggcacgatcttggctcactgcaacctcagcctcccaggttcaagagattctcctgcctcagcctccccagtagctgtgattaaagggcgcctgccaccatgactggctaattttgttgttgttgttgttgttttgagacggtttcactcgtcaccccagctggagtgcagtggtgcgatctcagctcactgcaacctccgcctgctgggttcaagcgattctcctgcctcagcctcctgagtagctgggattacaggcgcctgctaccacatccagctaattttttttttgagacggagtctcgctctgtcgcccaggctggagtgcagtggcacgatctcggctcactgcaaactccgccttccaggttcacgccattctcctgcctcagcctcccaagtagctgggactataggcacctactaccacgcctggctaattttttgtatttttagtagagacggggtttcaccatgttagccaggatggtctccatctcctgaccttgtgatccacccacctcggcttcccccagctaattttttatattttagtagagacaaggtttcgccatgttggccaggctggtcttgaactcctgacctcaggtgatccgtctgctttggcctcccaaagtgctgggattagaagcgtgagccaccacgcccagcctttttttgtatttttagtagagatggggtttcgccatgttggccaggctggtctcaaactcctgacctcaggtgatctgcccacctcagcctcccaaagtgctaggattacaggataagccactgcacctggccagctctagtcttattttgctgaaaaagggaggcaattgagggaaaggcctgctggcctgggacactggagacgtgggtttaccacacagccttgggaaatttatctaactctctgggcccctttgtacttttcagcttagagatttgggggttaaagtagatcagtaatttccaaactcttcacagagtaccagggtctgtagagatgcctcacaggcctccatgacaggccaagaagatggcctatgatctctgaaaccagcccccacttcaatcagatcaaagtaattccattctgttttatatgctgggattctgcttaagatttcatttgataaaaagaatcttctgcttaaaaaaaaaaagtcgacgcggccgcgaatttagtagtagta

SEQ ID NO: 286937 - DNA, 2591 bp, Homo sapiens
ctcggttatggaggaggccttccgctcgcagcggcctctccagcaccccttttaggcctgagcacccgcaggggtgcccaggccgcacgccaaacgcgggcccgcgccggttacctggctgcgcgctcccgctctgcctcgcgattctccggaatcgtacctcttcgtgggctcgcgccagcgctgtgagcgcacaattagtttaaactatggccccgccccctcgcgctgccctctgattggcctctgtcggcggggcccgcttaaggacccgggaaaaggaagtttgagggccactgggaaagagaaggggtatcaccgcttccggaccccggcctgtacttgaaggcaaagagaactacaaatcccagcgtcacccgcggccttgaagccccgcccctgacaaactgaaggtcccggtaagcatcgcgtcagtacttatggcgcctgccgggttgtggtgacgaaagcagttgccatggagttgctctgagtaaccctgaggcagtgggacgccaagactggagaggaagcgactgcgggaatgaatgcctaatggtggagtttcagccatcagtgacaggctgaacccagactcccagggcacctgcttgcacctttgaatgatggcctgaactatgaacaaacgggactatatgaacacttcggtacaggagccccctcttgactactccttcagaagcatccacgtcattcaagatctggtaaatgaggagccaaggacaggactacgaccactgaagcgttcaaagtcggggaaatcactgacccagtccctgtggctgaataacaatgttctcaatgatctgagagacttcaaccaggtggcttcacagctgttggagcacccagagaacctggcctggatcgacctgtcctttaatgacctgacttccattgaccctgtcctaacaactttcttcaacctgagtgtcctctatcttcacggcaacagcatccagcgcctgggggaggtgaataagctggctgtccttcctcggctccgtagcctgacactccatgggaaccccatggaggaagagaaagggtataggcaatatgtgctgtgcaccctgtcccgtatcaccacgttcgacttcagtggggtcaccaaagcagaccgcaccacagctgaagtctggaaacgcatgaacatcaagcccaagaaggcctggaccaagcagaatacactttgaggctcccacgaccctagtagtcctaaaggcctaagcatagacagcatggtttgacaataaataatttgagctgttgagcagatgagaagtcacttacaccttgtagagatgttctctaactcaggcaactgcaagtagctctagccttttcttttctttttttttttttgagacggagtctcactctgtcacacaggctggagtgcagtggcacgatcttggctcactgcaacctcagcctcccaggttcaagagattctcctgcctcagcctccccagtagctgtgattaaagggcgcctgccaccatgactggctaattttgttgttgttgttgttgttttgagacggtttcactcgtcaccccagctggagtgcagtggtgcgatctcagctcactgcaacctccgcctgctgggttcaagcgattctcctgcctcagcctcctgagtagctgggattacaggcgcctgctaccacatccagctaattttttttttgagacggagtctcgctctgtcgcccaggctggagtgcagtggcacgatctcggctcactgcaaactccgccttccaggttcacgccattctcctgcctcagcctcccaagtagctgggactataggcacctactaccacgcctggctaattttttgtatttttagtagagacggggtttcaccatgttagccaggatggtctccatctcctgaccttgtgatccacccacctcggcttcccccagctaattttttatattttagtagagacaaggtttcgccatgttggccaggctggtcttgaactcctgacctcaggtgatccgtctgctttggcctcccaaagtgctgggattagaagcgtgagccaccacgcccagcctttttttgtatttttagtagagatggggtttcgccatgttggccaggctggtctcaaactcctgacctcaggtgatctgcccacctcagcctcccaaagtgctaggattacaggataagccactgcacctggccagctctagtcttattttgctgaaaaagggaggcaattgagggaaaggcctgctggcctgggacactggagacgtgggtttaccacacagccttgggaaatttatctaactctctgggcccctttgtacttttcagcttagagatttgggggttaaagtagatcagtaatttccaaactcttcacagagtaccagggtctgtagagatgcctcacaggcctccatgacaggccaagaagatggcctatgatctctgaaaccagcccccacttcaatcagatcaaagtaattccattctgttttatatgctgggattctgcttaagatttcatttgataaaaagaatcttctgcttaaaaa

SEQ ID NO: 286938 - DNA, 1906 bp, Homo sapiens
gcctcgtgccgaattcggcacgaggacgtcattcaatctggtaaatgaggagccaaggacaggactacgaccactgaagcgttcaaagtcggggaaatcactgacccagtccctgtggctgaataacaatgttctcaatgatctgagagacttcaaccaggtggcttcacagctgttggagcacccagagaacctggcctggatcgacctgtcctttaatgacctgacttccattgaccctgtcctaacaactttcttcaacctgagtgtcctctatcttcacggcaacagcatccagcgcctgggggaggtgaataagctggctgtccttcctcggctccgtagcctgacactccatgggaaccccatggaggaagagaaagggtataggcaatatgtgctgtgcaccctgtcccgtatcaccacgttcgacttcagtggggtcaccaaagcagaccgcaccacagctgaagtctggaaacgcatgaacatcaagcccaagaaggcctggaccaagcagaatacactttgaggctcccacgaccctagtagtcctaaaggcctaagcatagacagcatggtttgacaataaataatttgagctgttgagcagatgagaagtcacttacaccttgtagagatgttctctaactcaggcaactgcaagtagctctagccttttcttttctttttttttttttgagacggagtctcactctgtcacacaggctggagtgcagtggcacgatcttggctcactgcaacctcagcctcccaggttcaagagattctcctgcctcagcctccccagtagctgtgattaaagggcgcctgccaccatgactggctaattttgttgttgttgttgttgttttgagacggtttcactcgtcaccccagctggagtgcagtggtgcgatctcagctcactgcaacctccgcctgctgggttcaagcgattctcctgcctcagcctcctgagtagctgggattacaggcgcctgctaccacatccagctaattttttttttgagacggagtctcgctctgtcgcccaggctggagtgcagtggcacgatctcggctcactgcaaactccgccttccaggttcacgccattctcctgcctcagcctcccaagtagctgggactataggcacctactaccacgcctggctaattttttgtatttttagtagagacggggtttcaccatgttagccaggatggtctccatctcctgaccttgtgatccacccacctcggcttcccccagctaattttttatattttagtagagacaaggtttcgccatgttggccaggctggtcttgaactcctgacctcaggtgatccgtctgctttggcctcccaaagtgctgggattagaagcgtgagccaccacgcccagcctttttttgtatttttagtagagatggggtttcgccatgttggccaggctggtctcaaactcctgacctcaggtgatctgcccacctcagcctcccaaagtgctaggattacaggataagccactgcacctggccagctctagtcttattttgctgaaaaagggaggcaattgagggaaaggcctgctggcctgggacactggagacgtgggtttaccacacagccttgggaaatttatctaactctctgggcccctttgtacttttcagcttagagatttgggggttaaagtagatcagtaatttccaaactcttcacagagtaccagggtctgtagagatgcctcacaggcctccatgacaggccaagaagatggcctatgatctctgaaaccagcccccacttcaatcagatcaaagtaattccattctgttttatatgctgggattctgcttaagatttcatttgataaaaagaatcttctgcttaaaaa

SEQ ID NO: 286939 - DNA, 1148 bp, Homo sapiens
tgtttgtttgttttgtttttggtcgatttatttaactgctagtaaaaggagctttctgcagtgtcggctgggatcccacacagctgtggcagccagggctgcggcggcggctcggtcgcggcttgtgtccccgctgcccctgctgctgctggtctctgctccggacgcgctcagaaggtgccaccgccgccttctctggccggctggccgccgggagtgaacgcgcccccgcctcctgtctgctcttctgtccgtctgcacgtctgtcagtccgaccgtctgtgggtccgactagcagctcggcgcgggattctcgctttgctgcgctctgctctcaaagctgccactctcgcaggctgccagtctgtgcgctggtctgtccgtccgtccgaatccctccgtcccaccagcaatgcagcgtccctcttccggtcttctgtgcccacagtcctctcccactctgtgcccctggccgcttcgctcggctgtctgactgctcccacctgtccgtagctctgccagtcccacccctagccagccagcctcggtcgatccctcggtcccgttcctccagcttggccgcctccgtcgtctgcccctccgccggtccgtgccctcccacgcggctggcactgccgccgggggcggcgcccggctcctccccgcagctccggatgcgtccggtccccgcccgggctgagggcaacgcgcgtgttgcacgtggctccacagctgctctggccggagaccccgggccccagacccgccacacccgggaggtggcggcagccggacgcctgccagtgtcgccgcctctgcgccactgggagcatccagaactggcccatccagagtgatggcacctgctgggtgcgccgggcgcccgcggtaccactcattccctgggccgttctccgccagccctaaggctggagacaaagcgcatgagccacgcgcagcagcgtgagcatcattaatcagaaagaaaactggcacgttgccccctgccccgccacaccgcctccctgctcccagcgagcaggcatgtattctctcttgtcccccgtgcccaggccctccagcgtacccgtctcgggggcgcccctggactcctggggactcttgacgaagccttgttccactccctc

SEQ ID NO: 286940 - DNA, 1267 bp, Homo sapiens
tgtttgtttgttttgtttttggtcgatttatttaactgctagtaaaaggagctttctgcagtgtcggctgggatcccacacagctgtggcagccagggctgcggcggcggctcggtcgcggcttgtgtccccgctgcccctgctgctgctggtctctgctccggacgcgctcagaaggtgccaccgccgccttctctggccggctggccgccgggagtgaacgcgcccccgcctcctgtctgctcttctgtccgtctgcacgtctgtcagtccgaccgtctgtgggtccgactagcagctcggcgcgggattctcgctttgctgcgctctgctctcaaagctgccactctcgcaggctgccagtctgtgcgctggtctgtccgtccgtccgaatccctccgtcccaccagcaatgcagcgtccctcttccggtcttctgtgcccacagtcctctcccactctgtgcccctggccgcttcgctcggtaagaggagggcgtgtggagggagggagcacgcgagtgttgctgtctatctttctgtgtgcctctccctgcctacttaatgctctcgctctctttgcgttctggtctccctctctcaggctgtctgactgctcccacctgtccgtagctctgccagtcccacccctagccagccagcctcggtcgatccctcggtcccgttcctccagcttggccgcctccgtcgtctgcccctccgccggtccgtgccctcccacgcggctggcactgccgccgggggcggcgcccggctcctccccgcagctccggatgcgtccggtccccgcccgggctgagggcaacgcgcgtgttgcacgtggctccacagctgctctggccggagaccccgggccccagacccgccacacccgggaggtggcggcagccggacgcctgccagtgtcgccgcctctgcgccactgggagcatccagaactggcccatccagagtgatggcacctgctgggtgcgccgggcgcccgcggtaccactcattccctgggccgttctccgccagccctaaggctggagacaaagcgcatgagccacgcgcagcagcgtgagcatcattaatcagaaagaaaactggcacgttgccccctgccccgccacaccgcctccctgctcccagcgagcaggcatgtattctctcttgtcccccgtgcccaggccctccagcgtacccgtctcgggggcgcccctggactcctggggactcttgacgaagccttgttccactccctc

SEQ ID NO: 286941 - DNA, 496 bp, Homo sapiens
gaggaaggaaacatgcaatcacaaacaatgaacaactctaaagacaaaaaggttggtccaaaagaactcaacataattaatccaatgactgtgaagagcttcactgagtaggattaagatattgcagatgtagtgtttccacagggtggctcttcagtgcaccagcggggcctgcttgagggagatgaggactgagcgcatgcgggagacatctttggcctgcttgctagacttggggttaaagtcacacagccgggccacccgttcccactcagtgcctggggacgactcgtcaatgtcatttacaaaggcttcttctgctgccctgttgtttgctttgggtgtctacaaatgaaagcaaaagcaatgcaagtactggtttcagatttacaaataaattttagtgagtaggcatgaaataatgagcatcagctgtacaaaggaaataatgagcatcaactgtacaaagaaaaggtaagaaaataaagagtccagc

SEQ ID NO: 286942 - DNA, 766 bp, Homo sapiens
  misc_feature (750)..(750): n is a, c, g, or t
gccaaactgctggaattgcaggtgtgagccactcactgtgtccggcataaagtagaacattcttacaagaaataaatatttcgtagtcatggagaagaacgctcctaaaatgatgaacgcacgacggaaaagagtagggaacattttgcttgatgagaaaatccgccagcaaggatgttgggctctaagcagaactgaagctctggaattaagaacacagccaaggaagagctctggactctgagtttaaagaagctgactgacttgtaaggcaattccaggtaagattggtgaatcaagttaagaatcaaaagcaactgagatcaacgtggaggcctggaaggtaagggcccatattttacctagatactagcttagagacttgctacattggcactgtattttaagtatgttatttagtagtattgtgaaatcaactggtttcaacattgaaaaggataaaaatagcttatgaaaaccaaacggtttttttttttttaaaggataaggtgcatgtttaatttcaattgcagaaatgaagggaagaggcactcctgccacctggtgggcatttatccaaattgtttgttcaggtcttttaggggtgaaattcgggttgttgaatctaggttgaacacacaaacattccagccccagcagcagttgggtcttatttccttccccttgacctgggatctgtacctttctgtttccaattaaggcctctctcgtgaggactcagtcagtccngtgggggatcctctag

SEQ ID NO: 286943 - DNA, 725 bp, Homo sapiens
  misc_feature (709)..(709): n is a, c, g, or t
cctgccaaatgctggatgaggatcgagtagaacattcttacaagaaatatactagtcatgacgcctaaatgatgaacgcacgacggaaaagagtagggaacattttgcttgatgagaaaatccgccagcaaggatgttgggctctaagcagaactgaagctctggaattaagaacacagccaaggaagagctctggactctgagtttaaagaagctgactgacttgtaaggcaattccaggtaagattggtgaatcaagttaagaatcaaaagcaactgagatcaacgtggaggcctggaaggtaagggcccatattttacctagatactagcttagagacttgctacattggcactgtattttaagtatgttatttagtagtattgtgaaatcaactggtttcaacattgaaaaggataaaaatagcttatgaaaaccaaacggtttttttttttttaaaggataaggtgcatgtttaatttcaattgcagaaatgaagggaagaggcactcctgccacctggtgggcatttatccaaattgtttgttcaggtcttttaggggtgaaattcgggttgttgaatctaggttgaacacacaaacattccagccccagcagcagttgggtcttatttccttccccttgacctgggatctgtacctttctgtttccaattaaggcctctctcgtgaggactcagtcagtccngtgggggatcctctag

SEQ ID NO: 286944 - DNA, 270 bp, Homo sapiens
tatgtatttcttgtagagacagagtctcgctgtgttgcctacactggtctagaactcctggcctcaagcgatcctcctgcctcggcctgccaaactgctggaattgcaggtgtgagccactcactgtgtccggcataaagtagaacattcttacaagaaataaatatttcgtagtcatggagaagaacgctcctaaaatgtatgtatccgttcattcatccatccattcattcattcttttatggggcggggggtctgttgcttatgctg

SEQ ID NO: 286945 - DNA, 463 bp, Homo sapiens
atctcaggccacacaggattccattcatcgaacattcctgagacaacggaattctggcgatggagcacaggatgcttcacagtctacggcaaaggacagaacgttggttgctcgagagcccgtcttaagtctcctatgagcttcaagccaacacaacagagggcaaactccaggctacccgatccctcagcaaagatgcagatggacacagcgttctggccccacgcatctgaagttcgtcttaagatgtgtgaaagcctcagcgcatgagccaattctgtgcagtgctcgacatacagatgagaacactgaggcacgaggcacagcctgtgatctggccaccgcgctcaggaggaggtggttacccgcgggcctgagggcgctgactttttagaatgggcgagtgcagctgtgtcccagtgtcccagtgaccagaacgattactgcctttaaaaaaaaaaaa

SEQ ID NO: 286946 - DNA, 689 bp, Homo sapiens
tctcacaggatacatggctatgaaagacattcatcatactgtgggctagcctgaaccagccactctggagagaccacttgtcaaggcacaatggatacgaactgaatctcaacaaccagcatcaaccatcaaaagatatgcaaagaagcctcagctgtttagcctcatctctgctccgtgatgattctcatctgccagaaggaatggaaggacatcatatcatcataatgcagctataaatttatggcgcttttttctctcacaggatatatacccagtaatgactgatcgacttacaacagtgatataattctggaattttcttctgttttgcaattttgacttggagtgctgatctcccacatgtcattatttcaactagccctaaatgaaagaaacaacataattaataaagtcattctcaaatatgggcaattatgtattatcaaacacctaaacatctagattcaacttggcaaaagaaaagcaaattttcttcccctttcacatcgtttatttagattttgacggattatttttaaagaaggtaatttaactgtgttaatatatactctaaatgtcaatctaaacgtatttttcctctgtatgtaatacagtgtattgattatgaattcatatcgtatttctgattcatttgtcatcattaaaataaagccagattattccag

SEQ ID NO: 286947 - DNA, 631 bp, Homo sapiens
tctcacaggatacatggctatgaaagacattcatcatactgtgggctagcctgaaccagccactctggagagaccacttgtcaaggcacaatggatacgaactgaatctcaacaaccagcatcaaccatcaaaagatatgcaagaatggaaggacatcatatcatcataatgcagctataaatttatggcgcttttttctctcacaggatatatacccagtaatgactgatcgacttacaacagtgatataattctggaattttcttctgttttgcaattttgacttggagtgctgatctcccacatgtcattatttcaactagccctaaatgaaagaaacaacataattaataaagtcattctcaaatatgggcaattatgtattatcaaacacctaaacatctagattcaacttggcaaaagaaaagcaaattttcttcccctttcacatcgtttatttagattttgacggattatttttaaagaaggtaatttaactgtgttaatatatactctaaatgtcaatctaaacgtatttttcctctgtatgtaatacagtgtattgattatgaattcatatcgtatttctgattcatttgtcatcattaaaataaagccagattattccag

SEQ ID NO: 286948 - DNA, 1951 bp, Homo sapiens
  misc_feature (1942)..(1951): n is a, c, g, or t
ccctgcggcggccccgaggacgtggccctggcgccctgcaccgccgccgccgcctgcgaagcgggcccctccccggtctacgtcaaggtcaagagcgcggagccggctgactgcgccgaggggccggtgcagtgcaagaacggcctcttggtgagaacagatgcaaaaactattgctcaaggaaaataaagtgaaaacgaggaaaagcaaaagaagatctggagagggctctcacctgaccacaagcatcctggagcaatgagtttcaggcaggaagactcatcctgagctgagctgcttttcttgaagttgtgcaagaacgtcctgttggctggggcaaattcagtatttcttttcctggccactgtgctggagcgtgaggaaagactctccaccctcactcccagatcctgcaggaggcgtgagagcggatggagatggtgaggatgtctattaatatggtgtttcctgcaaaacggtgcccatctcaaccatgggttgtcaaccatcctcggtgtctacaactgcaatttacctttgagggcccatgaactctgattacctgaaagtccttaggccagaaagagaaacccctgtcccccacctctcactttcacctatttctagaccttttcttacagcaatgccttggccctcaggaagcatcagatctcaaactgcagggtctggggctgaagctgatgctggcatgggtgactcagagttcctctattagttcaaatatgtaatatcttttagagcctaggactcaggctggaggcaattccttggtgccagttggttaatactttatgaatagtggtgggggagggaatgccttggactattaatgtccccatggatctggatcctggagaacttccagtgtcctggatggaatgttctgcttggctcatcttgcccagagaagagccaggatatgagaagatgggagagggaagggggaggtgtgaaacgtgctggtgcttcctgtcctcgtggtgtgatggctgcccaggctgctccttcgaggcaggacaggattcccatgggagatatgaggaccatggtgatttccaggcaccagttatgtcccagagcatcgtgtgcctgtgcagtggggttactgatagtccaggcatcagttcatattgtcctttatggcagatcctgcacaagggggttctctgtctctggacccactctgtcagcatggacatcctttttctttttccctggtaaggacatcagaaagaaagttacccctccagtgtttggagtcttggaatccttggcctgcctgcaggcctctgaatcctcagtgtgttagcccaaggtcaccttaggtaaaggaacatttctcctggtcttccaacaccctggaaagggaggctcttcaagaataggaaattcttcctagtatctaaccttggcctgcaactatgccatacatttaattgtagaaggtatggaaagttaggactgtggtggacccagttaaatcactggacagaagccatgaggcagagccagaaccagcttctggactccctgcatggagctttctactatcccaggttgttgggtcccttctcagtggccaaagatgctattttatgagccttgaggacatgacactaagtgaaaaaagcctggccaaagggccacatagtgtatagttctatttatatgaaatgtccaggaaagacaaaagcatagaggcagaaagcagactagtgctgtgggaggaatgggggatttgggaggtgatggctaaggggttatggggttttgggggaggtaatagaaatgttttaaaattggttgtgaaggtggatgcccaactctgcgaatacactaaaaggcatcgaattgtatactttaaataggtgaattgtatgctatgtgaattatatctcaataaaggtattttttccctgcnnnnnnnnnn

SEQ ID NO: 286949 - DNA, 2217 bp, Homo sapiens
  misc_feature (2208)..(2217): n is a, c, g, or t
ccctgcggcggccccgaggacgtggccctggcgccctgcaccgccgccgccgcctgcgaagcgggcccctccccggtctacgtcaaggtcaagagcgcggagccggctgactgcgccgaggggccggtgcagtgcaagaacggcctcttggtctccagcccacactgtgaagagccttgtgcccacagctgtgcacatcctgggcttcctccacaccttgtccataaactgcccctcagctaccttcagacccaggatacagacgcagcctccagaagaataaatgctccattagcagctggctggagctggctgaggctctggctggtgactctggcctctggtgtagacttccctcaggtgagtgcatggatgagagctctaccttctcctgactgcccaggcctcaggacaacaggagaacagatgcaaaaactattgctcaaggaaaataaagtgaaaacgaggaaaagcaaaagaagatctggagagggctctcacctgaccacaagcatcctggagcaatgagtttcaggcaggaagactcatcctgagctgagctgcttttcttgaagttgtgcaagaacgtcctgttggctggggcaaattcagtatttcttttcctggccactgtgctggagcgtgaggaaagactctccaccctcactcccagatcctgcaggaggcgtgagagcggatggagatggtgaggatgtctattaatatggtgtttcctgcaaaacggtgcccatctcaaccatgggttgtcaaccatcctcggtgtctacaactgcaatttacctttgagggcccatgaactctgattacctgaaagtccttaggccagaaagagaaacccctgtcccccacctctcactttcacctatttctagaccttttcttacagcaatgccttggccctcaggaagcatcagatctcaaactgcagggtctggggctgaagctgatgctggcatgggtgactcagagttcctctattagttcaaatatgtaatatcttttagagcctaggactcaggctggaggcaattccttggtgccagttggttaatactttatgaatagtggtgggggagggaatgccttggactattaatgtccccatggatctggatcctggagaacttccagtgtcctggatggaatgttctgcttggctcatcttgcccagagaagagccaggatatgagaagatgggagagggaagggggaggtgtgaaacgtgctggtgcttcctgtcctcgtggtgtgatggctgcccaggctgctccttcgaggcaggacaggattcccatgggagatatgaggaccatggtgatttccaggcaccagttatgtcccagagcatcgtgtgcctgtgcagtggggttactgatagtccaggcatcagttcatattgtcctttatggcagatcctgcacaagggggttctctgtctctggacccactctgtcagcatggacatcctttttctttttccctggtaaggacatcagaaagaaagttacccctccagtgtttggagtcttggaatccttggcctgcctgcaggcctctgaatcctcagtgtgttagcccaaggtcaccttaggtaaaggaacatttctcctggtcttccaacaccctggaaagggaggctcttcaagaataggaaattcttcctagtatctaaccttggcctgcaactatgccatacatttaattgtagaaggtatggaaagttaggactgtggtggacccagttaaatcactggacagaagccatgaggcagagccagaaccagcttctggactccctgcatggagctttctactatcccaggttgttgggtcccttctcagtggccaaagatgctattttatgagccttgaggacatgacactaagtgaaaaaagcctggccaaagggccacatagtgtatagttctatttatatgaaatgtccaggaaagacaaaagcatagaggcagaaagcagactagtgctgtgggaggaatgggggatttgggaggtgatggctaaggggttatggggttttgggggaggtaatagaaatgttttaaaattggttgtgaaggtggatgcccaactctgcgaatacactaaaaggcatcgaattgtatactttaaataggtgaattgtatgctatgtgaattatatctcaataaaggtattttttccctgcnnnnnnnnnn

SEQ ID NO: 286950 - DNA, 2061 bp, Homo sapiens
  misc_feature (2052)..(2061): n is a, c, g, or t
ccctgcggcggccccgaggacgtggccctggcgccctgcaccgccgccgccgcctgcgaagcgggcccctccccggtctacgtcaaggtcaagagcgcggagccggctgactgcgccgaggggccggtgcagtgcaagaacggcctcttggtctccagcccacactgtgaagagccttgtgcccacagctgtgcacatcctgggcttcctccacaccttgtccataaactgcccctcagctaccttcagacccaggatacaggagaacagatgcaaaaactattgctcaaggaaaataaagtgaaaacgaggaaaagcaaaagaagatctggagagggctctcacctgaccacaagcatcctggagcaatgagtttcaggcaggaagactcatcctgagctgagctgcttttcttgaagttgtgcaagaacgtcctgttggctggggcaaattcagtatttcttttcctggccactgtgctggagcgtgaggaaagactctccaccctcactcccagatcctgcaggaggcgtgagagcggatggagatggtgaggatgtctattaatatggtgtttcctgcaaaacggtgcccatctcaaccatgggttgtcaaccatcctcggtgtctacaactgcaatttacctttgagggcccatgaactctgattacctgaaagtccttaggccagaaagagaaacccctgtcccccacctctcactttcacctatttctagaccttttcttacagcaatgccttggccctcaggaagcatcagatctcaaactgcagggtctggggctgaagctgatgctggcatgggtgactcagagttcctctattagttcaaatatgtaatatcttttagagcctaggactcaggctggaggcaattccttggtgccagttggttaatactttatgaatagtggtgggggagggaatgccttggactattaatgtccccatggatctggatcctggagaacttccagtgtcctggatggaatgttctgcttggctcatcttgcccagagaagagccaggatatgagaagatgggagagggaagggggaggtgtgaaacgtgctggtgcttcctgtcctcgtggtgtgatggctgcccaggctgctccttcgaggcaggacaggattcccatgggagatatgaggaccatggtgatttccaggcaccagttatgtcccagagcatcgtgtgcctgtgcagtggggttactgatagtccaggcatcagttcatattgtcctttatggcagatcctgcacaagggggttctctgtctctggacccactctgtcagcatggacatcctttttctttttccctggtaaggacatcagaaagaaagttacccctccagtgtttggagtcttggaatccttggcctgcctgcaggcctctgaatcctcagtgtgttagcccaaggtcaccttaggtaaaggaacatttctcctggtcttccaacaccctggaaagggaggctcttcaagaataggaaattcttcctagtatctaaccttggcctgcaactatgccatacatttaattgtagaaggtatggaaagttaggactgtggtggacccagttaaatcactggacagaagccatgaggcagagccagaaccagcttctggactccctgcatggagctttctactatcccaggttgttgggtcccttctcagtggccaaagatgctattttatgagccttgaggacatgacactaagtgaaaaaagcctggccaaagggccacatagtgtatagttctatttatatgaaatgtccaggaaagacaaaagcatagaggcagaaagcagactagtgctgtgggaggaatgggggatttgggaggtgatggctaaggggttatggggttttgggggaggtaatagaaatgttttaaaattggttgtgaaggtggatgcccaactctgcgaatacactaaaaggcatcgaattgtatactttaaataggtgaattgtatgctatgtgaattatatctcaataaaggtattttttccctgcnnnnnnnnnn

SEQ ID NO: 286951 - DNA, 1563 bp, Homo sapiens
  misc_feature (1554)..(1563): n is a, c, g, or t
ccctgcggcggccccgaggacgtggccctggcgccctgcaccgccgccgccgcctgcgaagcgggcccctccccggtctacgtcaaggtcaagagcgcggagccggctgactgcgccgaggggccggtgcagtgcaagaacggcctcttggtctccagcccacactgtgaagagccttgtgcccacagctgtgcacatcctgggcttcctccacaccttgtccataaactgcccctcagctaccttcagacccaggatacagacgcagcctccagaagaataaatgctccattagcagctggctggagctggctgaggctctggctggtgactctggcctctggtgtagacttccctcaggtgagtgcatggatgagagctctaccttctcctgactgcccaggcctcaggacaacaggagaacagatgcaaaaactattgctcaaggaaaataaagtgaaaacgaggaaaagcaaaagaagatctggagagggctctcacctgaccacaagcatcctggagcaatgagtttcaggcaggaagactcatcctgagctgagctgcttttcttgaagttgtgcaagaacgtcctgttggctggggcaaattcagtatttcttttcctggccactgtgctggagcgtgaggaaagactctccaccctcactcccagatcctgcaggaggcgtgagagcggatggagatggtgaggatgtctattaatatggtgtttcctgcaaaacggtgcccatctcaaccatgggttgtcaaccatcctcggtgtctacaactgcaatttacctttgaggacccactctgtcagcatggacatcctttttctttttccctggtaaggacatcagaaagaaagttacccctccagtgtttggagtcttggaatccttggcctgcctgcaggcctctgaatcctcagtgtgttagcccaaggtcaccttaggtaaaggaacatttctcctggtcttccaacaccctggaaagggaggctcttcaagaataggaaattcttcctagtatctaaccttggcctgcaactatgccatacatttaattgtagaaggtatggaaagttaggactgtggtggacccagttaaatcactggacagaagccatgaggcagagccagaaccagcttctggactccctgcatggagctttctactatcccaggttgttgggtcccttctcagtggccaaagatgctattttatgagccttgaggacatgacactaagtgaaaaaagcctggccaaagggccacatagtgtatagttctatttatatgaaatgtccaggaaagacaaaagcatagaggcagaaagcagactagtgctgtgggaggaatgggggatttgggaggtgatggctaaggggttatggggttttgggggaggtaatagaaatgttttaaaattggttgtgaaggtggatgcccaactctgcgaatacactaaaaggcatcgaattgtatactttaaataggtgaattgtatgctatgtgaattatatctcaataaaggtattttttccctgcnnnnnnnnnn

SEQ ID NO: 286952 - DNA, 616 bp, Homo sapiens
aactaaggtaagtcttctgcatttgcatttgaaaatgaatgtggcagattctagagtgcctcagtaccctttctctccataatgttccttctgcatagcgttttatggttcttcactctctcagtttcaggcaggaagactcatcctgagctgagctgcttttcttgaagttgtgcaagaacgtcctgttggctggggcaaattcagtatttcttttcctggccactgtgctggagcgtgaggaaagactctccaccctcactcccagatcctgcaggaggcgtgagagcggatggagatggtgaggatgtctattaatatggtgtttcctgcaaaacggtgcccatctcaaccatgggttgtcaaccatcctcggtgtctacaactgcaatttacctttgagggcccatgaactctgattacctgaaagtccttaggccagaaagagaaacccctgtcccccacctctcactttcacctatttctagaccttttcttacagcaatgccttggccctcaggaagcatcagatctcaaactgcagggtctggggctgaagctgatgctggcatgggtgactcagagttcctctattagttcaaatatgtaatatctt

SEQ ID NO: 286953 - DNA, 2591 bp, Homo sapiens
  misc_feature (130)..(130): n is a, c, g, or t
agttctactgcccgctttagcacagtggctgcagctgtgctctgcgggtccctgccctcaagcccggacttcgcccataattctggaagttctcctccgcctcaaccccaggatgaagttgaagcgggtnctctgcgcttccgggaagtggtcatgtgataccccaggcgcctgcgctctctttctagggactttcctgagtgggagggatttcgccggaacaaaaatgcctcagtttggaggtcgcgctcactgcgacggcaggctttgagtgtagcacttggtagttcttcctctgctctgcttcccttcggaggaaaatttcaggctgaaggtttagcgggtgccgcctctaaagagagcaatcactacacttatggctgggattttgcgcttagtagttcaatggcccccaggcagactacagaccgtgacaaaaggtgtggagtctcttatttgtacagattggattcgtcacaaattcaccagatcaagaattccagaaaaagtgtttcaggcctcacctgaagatcatgaaaaatacggtggggatccacagaaccctcataaactgcatattgttaccagaataaaaagtacaagaagacgtccatattgggaaaaagatataataaagatgcttggattagaaaaagcacatacccctcaagttcacaagaatatcccttcagtgaatgcaaaattgaaagtagttaagcatttgataagaatcaagcccttgaagttgccacaaggacttccaacagaggagaacatgtctaacacgtgcctcaaaagcactggggagttagtagtgcagtggcatctgaaacctgtggagcagaaagcacatgagtcctaatgccccagcagcttccgattggaaaatgcaaattgtttttatttaaagatggtgagaaagtgttttcattaaaatatgttttcaaaaccattttcaggccgggcacggtggctcacctgtaatcccagcactttgggaggccaaggcgggcagatcacctgaggtcaagagttcgagaccagcctgaccaacatggagaaacccccatctctactgaaaatacagaattagccaggcatggtggcacatgcctgtaacccagctactcgggaggctgaagcaggagaatcacttgaacccgggaggcagaggttgcagtgagctgagatggtgccactgtactccagcctgggtgataggatgagactccatctcaggggaaaaaaaaaaatttttttttcactgactaaacctgctgcagctctcttttactacagacttggagattttagtttaatttggtttaattctctgtcctttccctttcactgtttcactccaaaacatgtaagaatggcaatgtttgaacatctgcgtttgggtctactgccaccttagcaagcctcattaaccattttataaaaattgcgttagtattgttgttgttgtttttgagacagggtcttgctctgtcacccaagctggaatacagtggcatgatttcagttcactgcggcctcgacctcccaggctcaagtgatcctcccacctcagcctccagagtagctgggactacaggcagtgtgccaccacatccagctaattttttaaagttttttcatagagacagggactcactatgttgtccaagctggtctcaaactcctgggttcaagccatcctcccacctcagcctcccaaaatgctgggattacaggcatgagccactgtacccagccaaaattgttttcttttttaagtgaattcaacaatttctgtgagtggctctttgcatgaacactgtgcaaggtgttggagaaatccaaagctgaccaaaacatggtccccaccttttggagcttacagtctgttctggggaacagagattcagccaaagtcaagaaacactggatgccagctagattatctgttctgtgctttggtgtctataagtacatatgtggatatgggttcattttatccctaaacttagtaccaaaccagcatttaatatctaattataaatctaatttggcctaaactttattattgcacactgcctgaacaaaacctatttgtctctatgtaaattttttcctcatggaacaagggtgtgaaatgaaaatattttaggatttattcaaaaacagactattctgttttcagcttcagaattgttctttgaatcctaaggaacctctgtcaacagttgaggttgctgttgaaaagaaagaagaaggaggcggaaatctctcagggagaattatttcctttcttttctatttcagatacctggaggggtggggagaagtaagaattgtaagggaggttcagtagtggggaattctgtgacagctgattgaagatgatgatgaagaacctctgcattctagttaccctttgcttcccttcacctcttgtaaaatttggcttggcaacaatgacattgtcatgcttattgtcccaatatccatcctgtcgtagatcttaatgtttttgatcgttgcgttaaagtggaagtgccacccacagtgaaaccagatcccattaataaataagcttaaaggca

SEQ ID NO: 286954 - DNA, 502 bp, Homo sapiens
gattgctgcaacgactctcttaacatccaccgctacagaatcaagcccttgaagttgccacaaggacttccaacagaggagaacatgtctaacacgtgcctcaaaagcactggggagttagtagtgcagtggcatctgaaacctgtggagcagaaagcacatgagtcctaatgccccagcagcttccgattggaaaatgcaaattgtttttatttaatcagatacctggaggggtggggagaagtaagaattgtaagggaggttcagtagtggggaattctgtgacagctgattgaagatgatgatgaagaacctctgcattctagttaccctttgcttcccttcacctcttgtaaaatttggcttggcaacaatgacattgtcatgcttattgtcccaatatccatcctgtcgtagatcttaatgtttttgatcgttgcgttaaagtggaagtgccacccacagtgaaaccagatcccattaataaataagcttaaaggca

SEQ ID NO: 286955 - DNA, 526 bp, Homo sapiens
  misc_feature (130)..(130): n is a, c, g, or t
agttctactgcccgctttagcacagtggctgcagctgtgctctgcgggtccctgccctcaagcccggacttcgcccataattctggaagttctcctccgcctcaaccccaggatgaagttgaagcgggtnctctgcgcttccgggaagtggtcatgtgataccccaggcgcctgcgctctctttctagggactttcctgagtgggagggatttcgccggaacaaaaatgcctcagtttggaggtcgcgctcactgcgacggcaggctttgagtgtagcacttggtagttcttcctctgctctgcttcccttcggaggaaaatttcaggctgaaggtttagcgggtgccggtgagtggggaatgagtggcggagagtgcggcattcttcgcaaggtgtatccgggaaccctctgcagatcctaattgattttccctattgcgtactgaattggccggttacggcaacctaaatgggtctgcccctgatcccgtcacattggctcccgtaaggccattggcctgcagg

SEQ ID NO: 286956 - DNA, 334 bp, Homo sapiens
tacgtgttcaggtgcttagaacagcttcttgcatcttttctcacatgatgcctttttaatgaggcttagcctaacaaccctatttaaaattgcaatgtaagttttctcacatacacagttacaatcctccctttatcagctctacatttttttttaatagactgaatctcgctctgttgcccagcccatctcggcccactgaaacctccacctcccgggttcaagcgattctcctgcctcagcctcccgatgctttaggaggccaaggcaggaggactgcttgagcccaggagtttgagaccagcctggacaacaaagtgagattcatctctac

SEQ ID NO: 286957 - DNA, 2781 bp, Homo sapiens
  misc_feature (130)..(130): n is a, c, g, or t
agttctactgcccgctttagcacagtggctgcagctgtgctctgcgggtccctgccctcaagcccggacttcgcccataattctggaagttctcctccgcctcaaccccaggatgaagttgaagcgggtnctctgcgcttccgggaagtggtcatgtgataccccaggcgcctgcgctctctttctagggactttcctgagtgggagggatttcgccggaacaaaaatgcctcagtttggaggtcgcgctcactgcgacggcaggctttgagtgtagcacttggtagttcttcctctgctctgcttcccttcggaggaaaatttcaggctgaaggtttagcgggtgccgcctctaaagagagcaatcactacacttatggctgggattttgcgcttagtagttcaatggcccccaggcagactacagaccgtgacaaaaggtgtggagtctcttatttgtacagattggattcgtcacaaattcaccagatcaagaattccagaaaaagtgtttcaggcctcacctgaagatcatgaaaaatacggtggggatccacagaaccctcataaactgcatattgttaccagaataaaaagtacaagaagacgtccatattgggaaaaagatataataaagatgcttggattagaaaaagcacatacccctcaagttcacaagaatatcccttcagtgaatgcaaaattgaaagtagttaagcatttgataagaatcaagcccttgaagttgccacaaggacttccaacagaggagaacatgtctaacacgtgcctcaaaagcactggggagttagtagtgcagtggcatctgaaacctgtggagcagaaagcacatgagtcctaatgccccagcagcttccgattggaaaatgcaaattgtttttatttaaagatggtgagaaagtgttttcattaaaatatgttttcaaaaccattttcaggccgggcacggtggctcacctgtaatcccagcactttgggaggccaaggcgggcagatcacctgaggtcaagagttcgagaccagcctgaccaacatggagaaacccccatctctactgaaaatacagaattagccaggcatggtggcacatgcctgtaacccagctactcgggaggctgaagcaggagaatcacttgaacccgggaggcagaggttgcagtgagctgagatggtgccactgtactccagcctgggtgataggatgagactccatctcaggggaaaaaaaaaaatttttttttcactgactaaacctgctgcagctctcttttactacagacttggagattttagtttaatttggtttaattctctgtcctttccctttcactgtttcactccaaaacatgtaagaatggcaatgtttgaacatctgcgtttgggtctactgccaccttagcaagcctcattaaccattttataaaaattgcgttagtattgttgttgttgtttttgagacagggtcttgctctgtcacccaagctggaatacagtggcatgatttcagttcactgcggcctcgacctcccaggctcaagtgatcctcccacctcagcctccagagtagctgggactacaggcagtgtgccaccacatccagctaattttttaaagttttttcatagagacagggactcactatgttgtccaagctggtctcaaactcctgggttcaagccatcctcccacctcagcctcccaaaatgctgggattacaggcatgagccactgtacccagccaaaattgttttcttttttaagtgaattcaacaatttctgtgagtggctctttgcatgaacactgtgcaaggtgttggagaaatccaaagctgaccaaaacatggtccccaccttttggagcttacagtctgttctggggaacagagattcagccaaagtcaagaaacactggatgccagctagattatctgttctgtgctttggtgtctataagtacatatgtggatatgggttcattttatccctaaacttagtaccaaaccagcatttaatatctaattataaatctaatttggcctaaactttattattgcacactgcctgaacaaaacctatttgtctctatgtaaattttttcctcatggaacaagggtgtgaaatgaaaatattttaggatttattcaaaaacagactattctgttttcagcttcagaattgttctttgaatcctaaggaacctctgtcaacagttgaggttgctgttgaaaagaaagaagaaggaggcggaaatctctcagggagaattatttcctttcttttctatttcagatacctggaggggtggggagaagtaagaattgtaagggaggttcagtagtggggaattctgtgacagctgattgaagatgatgatgaagaacctctgcattctagttaccctttgcttcccttcacctcttgtaaaatttggcttggcaacaatgacattgtcatgcttattgtcccaatatccatcctgtcgtagatcttaatgtttttgatcgttgcgttaaagtggaagtgccacccacagtgaaaccagatcccattaataaataagcttaaaggcaactgcagttttaattccatagttattgaatatccagtgtgtgtaaggcctggaggggagccaaaggacactaacttctaagagctccgtctagttggagagaaacctgtgtgccacaacatacagtgtccttgcttatgtggggtcgaagacatctgtgaaaataaaagcagcctctgctaatttagcgc

SEQ ID NO: 286958 - DNA, 4103 bp, Homo sapiens
  misc_feature (130)..(130): n is a, c, g, or t
agttctactgcccgctttagcacagtggctgcagctgtgctctgcgggtccctgccctcaagcccggacttcgcccataattctggaagttctcctccgcctcaaccccaggatgaagttgaagcgggtnctctgcgcttccgggaagtggtcatgtgataccccaggcgcctgcgctctctttctagggactttcctgagtgggagggatttcgccggaacaaaaatgcctcagtttggaggtcgcgctcactgcgacggcaggctttgagtgtagcacttggtagttcttcctctgctctgcttcccttcggaggaaaatttcaggctgaaggtttagcgggtgccgcctctaaagagagcaatcactacacttatggctgggattttgcgcttagtagttcaatggcccccaggcagactacagaccgtgacaaaaggtgtggagtctcttatttgtacagattggattcgtcacaaattcaccagatcaagaattccagaaaaagtgtttcaggcctcacctgaagatcatgaaaaatacggtggggatccacagaaccctcataaactgcatattgttaccagaataaaaagtacaagaagacgtccatattgggaaaaagatataataaagatgcttggattagaaaaagcacatacccctcaagttcacaagaatatcccttcagtgaatgcaaaattgaaagtagttaagcatttgataagaatcaagcccttgaagttgccacaaggacttccaacagaggagaacatgtctaacacgtgcctcaaaagcactggggagttagtagtgcagtggcatctgaaacctgtggagcagaaagcacatgagtcctaatgccccagcagcttccgattggaaaatgcaaattgtttttatttaaagatggtgagaaagtgttttcattaaaatatgttttcaaaaccattttcaggccgggcacggtggctcacctgtaatcccagcactttgggaggccaaggcgggcagatcacctgaggtcaagagttcgagaccagcctgaccaacatggagaaacccccatctctactgaaaatacagaattagccaggcatggtggcacatgcctgtaacccagctactcgggaggctgaagcaggagaatcacttgaacccgggaggcagaggttgcagtgagctgagatggtgccactgtactccagcctgggtgataggatgagactccatctcaggggaaaaaaaaaaatttttttttcactgactaaacctgctgcagctctcttttactacagacttggagattttagtttaatttggtttaattctctgtcctttccctttcactgtttcactccaaaacatgtaagaatggcaatgtttgaacatctgcgtttgggtctactgccaccttagcaagcctcattaaccattttataaaaattgcgttagtattgttgttgttgtttttgagacagggtcttgctctgtcacccaagctggaatacagtggcatgatttcagttcactgcggcctcgacctcccaggctcaagtgatcctcccacctcagcctccagagtagctgggactacaggcagtgtgccaccacatccagctaattttttaaagttttttcatagagacagggactcactatgttgtccaagctggtctcaaactcctgggttcaagccatcctcccacctcagcctcccaaaatgctgggattacaggcatgagccactgtacccagccaaaattgttttcttttttaagtgaattcaacaatttctgtgagtggctctttgcatgaacactgtgcaaggtgttggagaaatccaaagctgaccaaaacatggtccccaccttttggagcttacagtctgttctggggaacagagattcagccaaagtcaagaaacactggatgccagctagattatctgttctgtgctttggtgtctataagtacatatgtggatatgggttcattttatccctaaacttagtaccaaaccagcatttaatatctaattataaatctaatttggcctaaactttattattgcacactgcctgaacaaaacctatttgtctctatgtaaattttttcctcatggaacaagggtgtgaaatgaaaatattttaggatttattcaaaaacagactattctgttttcagcttcagaattgttctttgaatcctaaggaacctctgtcaacagttgaggttgctgttgaaaagaaagaagaaggaggcggaaatctctcagggagaattatttcctttcttttctatttcagatacctggaggggtggggagaagtaagaattgtaagggaggttcagtagtggggaattctgtgacagctgattgaagatgatgatgaagaacctctgcattctagttaccctttgcttcccttcacctcttgtaaaatttggcttggcaacaatgacattgtcatgcttattgtcccaatatccatcctgtcgtagatcttaatgtttttgatcgttgcgttaaagtggaagtgccacccacagtgaaaccagatcccattaataaataagcttaaaggcaactgcagttttaattccatagttattgaatatccagtgtgtgtaaggcctggaggggagccaaaggacactaacttctaagagctccgtctagttggagagaaacctgtgtgccacaacatacagtgtccttgcttatgtggggtcgaagacatctgtgaaaataaaagcagcctctgctaatttagcgccatctcttttactgtgctaatttttttttctttagagacagggtctcactctgtcgcccagcctggagggcagtggtgtgatcgtagctcactattacctccaactcttgggctcaagtgatcctcccacctcagcctcctgagcagctaggactacagatacatgccaccgctcccggctagtattttttaaaattttttgtagagccaagtgttgctatgttgtccacactgatctggagcttctaatctcaaatgattctcctgcctcagcctcccaaagtgctgggaatacaggtgtgagccaccatacctggccttactgtactaatattaatattgtgtaaataggggaaaataccatggttaatttttactcaaacagtaagaaagtttgagtaactaattttaatctcaacagcccatagctagaagaggggatctaaatgttaagttgaatatttagaaataaaagtgtctacaagaagaaaagtctttagtgaaaatatgggcataggccagcagcattagctttctattgctgcagaacaaattaccacaaacttagctgcttaaaacaacacacacttattgtctcacaatgtttgtgggtcggaagtctaggcgtggcttagctgggtagtctgtttaggattcatggcaagttgcttcttccaaaaccagcattggagacagactagcaagatgggcactacactcttagataatcaaataaatgcaatcatgtgcctcgtgtcaccttttttgcattccattcattaagaacaagttgcagttcctacctacactcaaggaagggaggaattacacagaagtgtgaccacaggaggcagggctcatggaggcctccttaaagtcccccagccaaacctgaaaagtcaatcctggaccttatcatagtggctgtatagtttagaaggtttcttcagattggcattcctttgcctcatatcatcacttcaaaaccctataagggtttgttcctcggtcttgactttgtgtctttgaggattgctttgtttagtgtcacctgccttctttcaggaggttttgcctgacatctggtggtgaccgtggccaccaagtcaacccaaacactacctttaaggacgactgcagttctcttagggtctcctcaatctaaaattgtacctctttcaggccaaacacctattttcttcattttttttctcataagaatgctagctagtatgcctaattatctaactggcacagtttcaccaaggacagtttggaactacacaggccattttagggagattttgacatgaacaagattg

SEQ ID NO: 286959 - DNA, 2583 bp, Homo sapiens
  misc_feature (130)..(130): n is a, c, g, or t
agttctactgcccgctttagcacagtggctgcagctgtgctctgcgggtccctgccctcaagcccggacttcgcccataattctggaagttctcctccgcctcaaccccaggatgaagttgaagcgggtnctctgcgcttccgggaagtggtcatgtgataccccaggcgcctgcgctctctttctagggactttcctgagtgggagggatttcgccggaacaaaaatgcctcagtttggaggtcgcgctcactgcgacggcaggctttgagtgtagcacttggtagttcttcctctgctctgcttcccttcggaggaaaatttcaggctgaaggtttagcgggtgccgcctctaaagagagcaatcactacacttatggctgggattttgcgcttagtagttcaatggcccccaggcagactacagaccgtgacaaaaggtgtggagtctcttatttgtacagattggattcgtcacaaattcaccagatcaagaattccagaaaaagtgtttcaggcctcacctgaagatcatgaaaaatacggtggggatccacagaaccctcataaactgcatattgttaccagaataaaaagtacaagaagacgtccatattgggaaaaagatataataaagatgcttggattagaaaaagcacatacccctcaagttcacaagaatatcccttcagtgaatgcaaaattgaaagtagttaagcatttgataagaatcaagcccttgaagttgccacaaggacttccaacagaggagaacatgtctaacacgtgcctcaaaagcactggggagttagtagtgcagtggcatctgaaacctgtggagcagaaagcacatgagtcctaatgccccagcagcttccgattggaaaatgcaaattgtttttatttaaagatggtgagaaagtgttttcattaaaatatgttttcaaaaccattttcaggccgggcacggtggctcacctgtaatcccagcactttgggaggccaaggcgggcagatcacctgaggtcaagagttcgagaccagcctgaccaacatggagaaacccccatctctactgaaaatacagaattagccaggcatggtggcacatgcctgtaacccagctactcgggaggctgaagcaggagaatcacttgaacccgggaggcagaggttgcagtgagctgagatggtgccactgtactccagcctgggtgataggatgagactccatctcaggggaaaaaaaaaaatttttttttcactgactaaacctgctgcagctctcttttactacagacttggagattttagtttaatttggtttaattctctgtcctttccctttcactgtttcactccaaaacatgtaagaatggcaatgtttgaacatctgcgtttgggtctactgccaccttagcaagcctcattaaccattttataaaaattgcgttagtattgttgttgttgtttttgagacagggtcttgctctgtcacccaagctggaatacagtggcatgatttcagttcactgcggcctcgacctcccaggctcaagtgatcctcccacctcagcctccagagtagctgggactacaggcagtgtgccaccacatccagctaattttttaaagttttttcatagagacagggactcactatgttgtccaagctggtctcaaactcctgggttcaagccatcctcccacctcagcctcccaaaatgctgggattacaggcatgagccactgtacccagccaaaattgttttcttttttaagtgaattcaacaatttctgtgagtggctctttgcatgaacactgtgcaaggtgttggagaaatccaaagctgaccaaaacatggtccccaccttttggagcttacagtctgttctggggaacagagattcagccaaagtcaagaaacactggatgccagctagattatctgttctgtgctttggtgtctataagtacatatgtggatatgggttcattttatccctaaacttagtaccaaaccagcatttaatatctaattataaatctaatttggcctaaactttattattgcacactgcctgaacaaaacctatttgtctctatgtaaattttttcctcatggaacaagggtgtgaaatgaaaatattttaggatttattcaaaaacagactattctgttttcagcttcagaattgttctttgaatcctaaggaacctctgtcaacagttgaggttgctgttgaaaagaaagaagaaggaggcggaaatctctcagggagaattatttcctttcttttctatttcagatacctggaggggtggggagaagtagatgtacggagtcagtaggggatcgtacagtgatgaatgagatgaagaactctgatttagtacctggtccttacttgtaaatgggtgtgaatggctgttgtttggtcaatcacggggaactacgttgggcgggtaaggagagtgccaggacaacttaaaggaggggacaatggtccgggggggggaaaataagctgaaaggtaattctgtggaaattaaaaggggttttgttatttaggatgtaaagc

SEQ ID NO: 286960 - DNA, 2531 bp, Homo sapiens
  misc_feature (130)..(130): n is a, c, g, or t
agttctactgcccgctttagcacagtggctgcagctgtgctctgcgggtccctgccctcaagcccggacttcgcccataattctggaagttctcctccgcctcaaccccaggatgaagttgaagcgggtnctctgcgcttccgggaagtggtcatgtgataccccaggcgcctgcgctctctttctagggactttcctgagtgggagggatttcgccggaacaaaaatgcctcagtttggaggtcgcgctcactgcgacggcaggctttgagtgtagcacttggtagttcttcctctgctctgcttcccttcggaggaaaatttcaggctgaaggtttagcgggtgccgcctctaaagagagcaatcactacacttatggctgggattttgcgcttagtagttcaatggcccccaggcagactacagaccgtgacaaaaggtgtggagtctcttatttgtacagattggattcgtcacaaattcaccagatcaagaattccagaaaaagtgtttcaggcctcacctgaagatcatgaaaaatacggtggggatccacagaaccctcataaactgcatattgttaccagaataaaaagtacaagaagacgtccatattgggaaaaagatataataaagatgcttggattagaaaaagcacatacccctcaagttcacaagaatatcccttcagtgaatgcaaaattgaaagtagttaagcatttgataagaatcaagcccttgaagttgccacaaggacttccaacagaggagaacatgtctaacacgtgcctcaaaagcactggggagttagtagtgcagtggcatctgaaacctgtggagcagaaagcacatgagtcctaatgccccagcagcttccgattggaaaatgcaaattgtttttatttaaagatggtgagaaagtgttttcattaaaatatgttttcaaaaccattttcaggccgggcacggtggctcacctgtaatcccagcactttgggaggccaaggcgggcagatcacctgaggtcaagagttcgagaccagcctgaccaacatggagaaacccccatctctactgaaaatacagaattagccaggcatggtggcacatgcctgtaacccagctactcgggaggctgaagcaggagaatcacttgaacccgggaggcagaggttgcagtgagctgagatggtgccactgtactccagcctgggtgataggatgagactccatctcaggggaaaaaaaaaaatttttttttcactgactaaacctgctgcagctctcttttactacagacttggagattttagtttaatttggtttaattctctgtcctttccctttcactgtttcactccaaaacatgtaagaatggcaatgtttgaacatctgcgtttgggtctactgccaccttagcaagcctcattaaccattttataaaaattgcgttagtattgttgttgttgtttttgagacagggtcttgctctgtcacccaagctggaatacagtggcatgatttcagttcactgcggcctcgacctcccaggctcaagtgatcctcccacctcagcctccagagtagctgggactacaggcagtgtgccaccacatccagctaattttttaaagttttttcatagagacagggactcactatgttgtccaagctggtctcaaactcctgggttcaagccatcctcccacctcagcctcccaaaatgctgggattacaggcatgagccactgtacccagccaaaattgttttcttttttaagtgaattcaacaatttctgtgagtggctctttgcatgaacactgtgcaaggtgttggagaaatccaaagctgaccaaaacatggtccccaccttttggagcttacagtctgttctggggaacagagattcagccaaagtcaagaaacactggatgccagctagattatctgttctgtgctttggtgtctataagtacatatgtggatatgggttcattttatccctaaacttagtaccaaaccagcatttaatatctaattataaatctaatttggcctaaactttattattgcacactgcctgaacaaaacctatttgtctctatgtaaattttttcctcatggaacaagggtgtgaaatgaaaatattttaggatttattcaaaaacagactattctgttttcagcttcagaattgttctttgaatcctaaggaacctctgtcaacagttgaggttgctgttgtcagatacctggaggggtggggagaagtaagaattgtaagggaggttcagtagtggggaattctgtgacagctgattgaagatgatgatgaagaacctctgcattctagttaccctttgcttcccttcacctcttgtaaaatttggcttggcaacaatgacattgtcatgcttattgtcccaatatccatcctgtcgtagatcttaatgtttttgatcgttgcgttaaagtggaagtgccacccacagtgaaaccagatcccattaataaataagcttaaaggca

SEQ ID NO: 286961 - DNA, 2555 bp, Homo sapiens
cggcacgagggtttagcgggtgccctctaaagagagcaatcactacacttatggctgggattttgcgcttagtagttcaatggcccccaggcagactacaggcttgcttttagaaagtgcagtggtgctgcctaatctgctcataagggccagagcctagatgagcctattgacctgctcctggctgcagaggacaacaataccgtgacaaaaggtgtggagtctcttatttgtacagattggattcgtcacaaattcaccagatcaagaattccagaaaaagtgtttcaggcctcacctgaagatcatgaaaaatacggtggggatccacagaaccctcataaactgcatattgttaccagaataaaaagtacaagaagacgtccatattgggaaaaagatataataaagatgcttggattagaaaaagcacatacccctcaagttcacaagaatatcccttcagtgaatgcaaaattgaaagtagttaagcatttgataagaatcaagcccttgaagttgccacaaggacttccaacagaggagaacatgtctaacacgtgcctcaaaagcactggggagttagtagtgcagtggcatctgaaacctgtggagcagaaagcacatgagtcctaatgccccagcagcttccgattggaaaatgcaaattgtttttatttaaagatggtgagaaagtgttttcattaaaatatgttttcaaaaccattttcaggccgggcacggtggctcacctgtaatcccagcactttgggaggccaaggcgggcagatcacctgaggtcaagagttcgagaccagcctgaccaacatggagaaacccccatctctactgaaaatacagaattagccaggcatggtggcacatgcctgtaacccagctactcgggaggctgaagcaggagaatcacttgaacccgggaggcagaggttgcagtgagctgagatggtgccactgtactccagcctgggtgataggatgagactccatctcaggggaaaaaaaaaaatttttttttcactgactaaacctgctgcagctctcttttactacagacttggagattttagtttaatttggtttaattctctgtcctttccctttcactgtttcactccaaaacatgtaagaatggcaatgtttgaacatctgcgtttgggtctactgccaccttagcaagcctcattaaccattttataaaaattgcgttagtattgttgttgttgtttttgagacagggtcttgctctgtcacccaagctggaatacagtggcatgatttcagttcactgcggcctcgacctcccaggctcaagtgatcctcccacctcagcctccagagtagctgggactacaggcagtgtgccaccacatccagctaattttttaaagttttttcatagagacagggactcactatgttgtccaagctggtctcaaactcctgggttcaagccatcctcccacctcagcctcccaaaatgctgggattacaggcatgagccactgtacccagccaaaattgttttcttttttaagtgaattcaacaatttctgtgagtggctctttgcatgaacactgtgcaaggtgttggagaaatccaaagctgaccaaaacatggtccccaccttttggagcttacagtctgttctggggaacagagattcagccaaagtcaagaaacactggatgccagctagattatctgttctgtgctttggtgtctataagtacatatgtggatatgggttcattttatccctaaacttagtaccaaaccagcatttaatatctaattataaatctaatttggcctaaactttattattgcacactgcctgaacaaaacctatttgtctctatgtaaattttttcctcatggaacaagggtgtgaaatgaaaatattttaggatttattcaaaaacagactattctgttttcagcttcagaattgttctttgaatcctaaggaacctctgtcaacagttgaggttgctgttgaaaagaaagaagaaggaggcggaaatctctcagggagaattatttcctttcttttctatttcagatacctggaggggtggggagaagtaagaattgtaagggaggttcagtagtggggaattctgtgacagctgattgaagatgatgatgaagaacctctgcattctagttaccctttgcttcccttcacctcttgtaaaatttggcttggcaacaatgacattgtcatgcttattgtcccaatatccatcctgtcgtagatcttaatgtttttgatcgttgcgttaaagtggaagtgccacccacagtgaaaccagatcccattaataaataagcttaaaggcaactgcagttttaattccatagttattgaatatccagtgtgtgtaaggcctggaggggagccaaaggacactaacttctaagagctccgtctagttggagagaaacctgtgtgccacaacatacagtgtccttgcttatgtggggtcgaagacatctgtgaaaataaaagcagcctctgctaatttagcgc

SEQ ID NO: 286962 - DNA, 3164 bp, Homo sapiens
  misc_feature (130)..(130): n is a, c, g, or t
agttctactgcccgctttagcacagtggctgcagctgtgctctgcgggtccctgccctcaagcccggacttcgcccataattctggaagttctcctccgcctcaaccccaggatgaagttgaagcgggtnctctgcgcttccgggaagtggtcatgtgataccccaggcgcctgcgctctctttctagggactttcctgagtgggagggatttcgccggaacaaaaatgcctcagtttggaggtcgcgctcactgcgacggcaggctttgagtgtagcacttggtagttcttcctctgctctgcttcccttcggaggaaaatttcaggctgaaggtttagcgggtgccgcctctaaagagagcaatcactacacttatggctgggattttgcgcttagtagttcaatggcccccaggcagactacagaccgtgacaaaaggtgtggagtctcttatttgtacagattggattcgtcacaaattcaccagatcaagaattccagaaaaagtgtttcaggcctcacctgaagatcatgaaaaatacggtggggatccacagaaccctcataaactgcatattgttaccagaataaaaagtacaagaagacgtccatattgggaaaaagatataataaagatgcttggattagaaaaagcacatacccctcaagttcacaagaatatcccttcagtgaatgcaaaattgaaagtagttaagcatttgataaggtttgttgtttcttctcagctctttttaaaatgtattgcctagtgtaattctaaatgcatttttcttttttcgttaatgttctgaaaaaaactttttaaaaaactaaaattttattttgtttttttttaattgacacataataattgtacatatttatggggtacatagtgacgtttcaatatatataaagtatagtgatccgatcagggtaattggcatatccatcatctcagacatttaccatttcttcatgttgggaacattcaacatcctcctcctagctatttgaaactatgtgttattgttaactgtagttatcctgcggggatatagaacgctagaacgtattcctcctatctaaacgcattttcttgtgtcacagaatcaagcccttgaagttgccacaaggacttccaacagaggagaacatgtctaacacgtgcctcaaaagcactggggagttagtagtgcagtggcatctgaaacctgtggagcagaaagcacatgagtcctaatgccccagcagcttccgattggaaaatgcaaattgtttttatttaaagatggtgagaaagtgttttcattaaaatatgttttcaaaaccattttcaggccgggcacggtggctcacctgtaatcccagcactttgggaggccaaggcgggcagatcacctgaggtcaagagttcgagaccagcctgaccaacatggagaaacccccatctctactgaaaatacagaattagccaggcatggtggcacatgcctgtaacccagctactcgggaggctgaagcaggagaatcacttgaacccgggaggcagaggttgcagtgagctgagatggtgccactgtactccagcctgggtgataggatgagactccatctcaggggaaaaaaaaaaatttttttttcactgactaaacctgctgcagctctcttttactacagacttggagattttagtttaatttggtttaattctctgtcctttccctttcactgtttcactccaaaacatgtaagaatggcaatgtttgaacatctgcgtttgggtctactgccaccttagcaagcctcattaaccattttataaaaattgcgttagtattgttgttgttgtttttgagacagggtcttgctctgtcacccaagctggaatacagtggcatgatttcagttcactgcggcctcgacctcccaggctcaagtgatcctcccacctcagcctccagagtagctgggactacaggcagtgtgccaccacatccagctaattttttaaagttttttcatagagacagggactcactatgttgtccaagctggtctcaaactcctgggttcaagccatcctcccacctcagcctcccaaaatgctgggattacaggcatgagccactgtacccagccaaaattgttttcttttttaagtgaattcaacaatttctgtgagtggctctttgcatgaacactgtgcaaggtgttggagaaatccaaagctgaccaaaacatggtccccaccttttggagcttacagtctgttctggggaacagagattcagccaaagtcaagaaacactggatgccagctagattatctgttctgtgctttggtgtctataagtacatatgtggatatgggttcattttatccctaaacttagtaccaaaccagcatttaatatctaattataaatctaatttggcctaaactttattattgcacactgcctgaacaaaacctatttgtctctatgtaaattttttcctcatggaacaagggtgtgaaatgaaaatattttaggatttattcaaaaacagactattctgttttcagcttcagaattgttctttgaatcctaaggaacctctgtcaacagttgaggttgctgttgaaaagaaagaagaaggaggcggaaatctctcagggagaattatttcctttcttttctatttcagatacctggaggggtggggagaagtaagaattgtaagggaggttcagtagtggggaattctgtgacagctgattgaagatgatgatgaagaacctctgcattctagttaccctttgcttcccttcacctcttgtaaaatttggcttggcaacaatgacattgtcatgcttattgtcccaatatccatcctgtcgtagatcttaatgtttttgatcgttgcgttaaagtggaagtgccacccacagtgaaaccagatcccattaataaataagcttaaaggcaactgcagttttaattccatagttattgaatatccagtgtgtgtaaggcctggaggggagccaaaggacactaacttctaagagctccgtctagttggagagaaacctgtgtgccacaacatacagtgtccttgcttatgtggggtcgaagacatctgtgaaaataaaagcagcctctgctaatttagcgc

SEQ ID NO: 286963 - DNA, 1561 bp, Homo sapiens
gactagttctagatcgcgagcggccgcccaaaatttttttttcactgactaaacctgctgcagctctcttttactacagacttggagattttagtttaatttggtttaattctctgtcctttccctttcactgtttcactccaaaacatgtaagaatggcaatgtttgaacatctgcgtttgggtctactgccaccttagcaagcctcattaaccattttataaaaattgcgttagtattgttgttgttgtttttgagacagggtcttgctctgtcacccaagctggaatacagtggcatgatttcagttcactgcggcctcgacctcccaggctcaagtgatcctcccacctcagcctccagagtagctgggactacaggcagtgtgccaccacatccagctaattttttaaagttttttcatagagacagggactcactatgttgtccaagctggtctcaaactcctgggttcaagccatcctcccacctcagcctcccaaaatgctgggattacaggcatgagccactgtacccagccaaaattgttttcttttttaagtgaattcaacaatttctgtgagtggctctttgcatgaacactgtgcaaggtgttggagaaatccaaagctgaccaaaacatggtccccaccttttggagcttacagtctgttctggggaacagagattcagccaaagtcaagaaacactggatgccagctagattatctgttctgtgctttggtgtctataagtacatatgtggatatgggttcattttatccctaaacttagtaccaaaccagcatttaatatctaattataaatctaatttggcctaaactttattattgcacactgcctgaacaaaacctatttgtctctatgtaaattttttcctcatggaacaagggtgtgaaatgaaaatattttaggatttattcaaaaacagactattctgttttcagcttcagaattgttctttgaatcctaaggaacctctgtcaacagttgaggttgctgttgaaaagaaagaagaaggaggcggaaatctctcagggagaattatttcctttcttttctatttcagatacctggaggggtggggagaagtaagaattgtaagggaggttcagtagtggggaattctgtgacagctgattgaagatgatgatgaagaacctctgcattctagttaccctttgcttcccttcacctcttgtaaaatttggcttggcaacaatgacattgtcatgcttattgtcccaatatccatcctgtcgtagatcttaatgtttttgatcgttgcgttaaagtggaagtgccacccacagtgaaaccagatcccattaataaataagcttaaaggcaactgcagttttaattccatagttattgaatatccagtgtgtgtaaggcctggaggggagccaaaggacactaacttctaagagctccgtctagttggagagaaacctgtgtgccacaacatacagtgtccttgcttatgtggggtcgaagacatctgtgaaaataaaagcagcctctgctaatttagcgc

SEQ ID NO: 286964 - DNA, 3721 bp, Homo sapiens
  misc_feature (130)..(130): n is a, c, g, or t
agttctactgcccgctttagcacagtggctgcagctgtgctctgcgggtccctgccctcaagcccggacttcgcccataattctggaagttctcctccgcctcaaccccaggatgaagttgaagcgggtnctctgcgcttccgggaagtggtcatgtgataccccaggcgcctgcgctctctttctagggactttcctgagtgggagggatttcgccggaacaaaaatgcctcagtttggaggtcgcgctcactgcgacggcaggctttgagtgtagcacttggtagttcttcctctgctctgcttcccttcggaggaaaatttcaggctgaaggtttagcgggtgccggtgtttcaggcctcacctgaagatcatgaaaaatacggtggggatccacagaaccctcataaactgcatattgttaccagaataaaaagtacaagaagacgtccatattgggaaaaagatataataaagatgcttggattagaaaaagcacatacccctcaagttcacaagaatatcccttcagtgaatgcaaaattgaaagtagttaagcatttgataagaatcaagcccttgaagttgccacaaggacttccaacagaggagaacatgtctaacacgtgcctcaaaagcactggggagttagtagtgcagtggcatctgaaacctgtggagcagaaagcacatgagtcctaatgccccagcagcttccgattggaaaatgcaaattgtttttatttaaagatggtgagaaagtgttttcattaaaatatgttttcaaaaccattttcaggccgggcacggtggctcacctgtaatcccagcactttgggaggccaaggcgggcagatcacctgaggtcaagagttcgagaccagcctgaccaacatggagaaacccccatctctactgaaaatacagaattagccaggcatggtggcacatgcctgtaacccagctactcgggaggctgaagcaggagaatcacttgaacccgggaggatacagtggcatgatttcagttcactgcggcctcgacctcccaggctcaagtgatcctcccacctcagcctccagagtagctgggactacaggcagtgtgccaccacatccagctaattttttaaagttttttcatagagacagggactcactatgttgtccaagctggtctcaaactcctgggttcaagccatcctcccacctcagcctcccaaaatgctgggattacaggcatgagccactgtacccagccaaaattgttttcttttttaagtgaattcaacaatttctgtgagtggctctttgcatgaacactgtgcaaggtgttggagaaatccaaagctgaccaaaacatggtccccaccttttggagcttacagtctgttctggggaacagagattcagccaaagtcaagaaacactggatgccagctagattatctgttctgtgctttggtgtctataagtacatatgtggatatgggttcattttatccctaaacttagtaccaaaccagcatttaatatctaattataaatctaatttggcctaaactttattattgcacactgcctgaacaaaacctatttgtctctatgtaaattttttcctcatggaacaagggtgtgaaatgaaaatattttaggatttattcaaaaacagactattctgttttcagcttcagaattgttctttgaatcctaaggaacctctgtcaacagttgaggttgctgttgaaaagaaagaagaaggaggcggaaatctctcagggagaattatttcctttcttttctatttcagatacctggaggggtggggagaagtaagaattgtaagggaggttcagtagtggggaattctgtgacagctgattgaagatgatgatgaagaacctctgcattctagttaccctttgcttcccttcacctcttgtaaaatttggcttggcaacaatgacattgtcatgcttattgtcccaatatccatcctgtcgtagatcttaatgtttttgatcgttgcgttaaagtggaagtgccacccacagtgaaaccagatcccattaataaataagcttaaaggcaactgcagttttaattccatagttattgaatatccagtgtgtgtaaggcctggaggggagccaaaggacactaacttctaagagctccgtctagttggagagaaacctgtgtgccacaacatacagtgtccttgcttatgtggggtcgaagacatctgtgaaaataaaagcagcctctgctaatttagcgccatctcttttactgtgctaatttttttttctttagagacagggtctcactctgtcgcccagcctggagggcagtggtgtgatcgtagctcactattacctccaactcttgggctcaagtgatcctcccacctcagcctcctgagcagctaggactacagatacatgccaccgctcccggctagtattttttaaaattttttgtagagccaagtgttgctatgttgtccacactgatctggagcttctaatctcaaatgattctcctgcctcagcctcccaaagtgctgggaatacaggtgtgagccaccatacctggccttactgtactaatattaatattgtgtaaataggggaaaataccatggttaatttttactcaaacagtaagaaagtttgagtaactaattttaatctcaacagcccatagctagaagaggggatctaaatgttaagttgaatatttagaaataaaagtgtctacaagaagaaaagtctttagtgaaaatatgggcataggccagcagcattagctttctattgctgcagaacaaattaccacaaacttagctgcttaaaacaacacacacttattgtctcacaatgtttgtgggtcggaagtctaggcgtggcttagctgggtagtctgtttaggatctcagtgctggaaaaacgtgtctggccaggtgctcattgtagctttgacagggaagggatctgctcccaagcactctcaggttgttggcagaatttgtttccttatggctgtaggattcatggcaagttgcttcttccaaaaccagcattggagacagactagcaagatgggcactacactcttagataatcaaataaatgcaatcatgtgcctcgtgtcaccttttttgcattccattcattaagaacaagttgcagttcctacctacactcaaggaagggaggaattacacagaagtgtgaccacaggaggcagggctcatggaggcctccttaaagtcccccagccaaacctgaaaagtcaatcctggaccttatcatagtggctgtatagtttagaaggtttcttcagattggcattcctttgcctcatatcatcacttcaaaaccctataagggtttgttcctcggtcttgactttgtgtctttgaggattgctttgtttagtgtcacctgccttctttcaggaggttttgcctgacatctggtggtgaccgtggccaccaagtcaacccaaacactacctttaaggacgactgcagttctcttagggtctcctcaatctaaaattgtacctctttcaggccaaacacctattttcttcattttttttctcataagaatgctagctagtatgcctaattatctaactggcacagtttcaccaaggacagtttggaactacacaggccattttagggagattttgacatgaacaagattg

SEQ ID NO: 286965 - DNA, 3367 bp, Homo sapiens
  misc_feature (130)..(130): n is a, c, g, or t
agttctactgcccgctttagcacagtggctgcagctgtgctctgcgggtccctgccctcaagcccggacttcgcccataattctggaagttctcctccgcctcaaccccaggatgaagttgaagcgggtnctctgcgcttccgggaagtggtcatgtgataccccaggcgcctgcgctctctttctagggactttcctgagtgggagggatttcgccggaacaaaaatgcctcagtttggaggtcgcgctcactgcgacggcaggctttgagtgtagcacttggtagttcttcctctgctctgcttcccttcggaggaaaatttcaggctgaaggtttagcgggtgccgcctctaaagagagcaatcactacacttatggctgggattttgcgcttagtagttcaatggcccccaggcagactacagaccgtgacaaaaggtgtggagtctcttatttgtacagattggattcgtcacaaattcaccagatcaagaattccagaaaaagtgtttcaggcctcacctgaagatcatgaaaaatacggtggggatccacagaaccctcataaactgcatattgttaccagaataaaaagtacaagaagacgtccatattgggaaaaagatataataaagatgcttggattagaaaaaatacagtggcatgatttcagttcactgcggcctcgacctcccaggctcaagtgatcctcccacctcagcctccagagtagctgggactacaggcagtgtgccaccacatccagctaattttttaaagttttttcatagagacagggactcactatgttgtccaagctggtctcaaactcctgggttcaagccatcctcccacctcagcctcccaaaatgctgggattacaggcatgagccactgtacccagccaaaattgttttcttttttaagtgaattcaacaatttctgtgagtggctctttgcatgaacactgtgcaaggtgttggagaaatccaaagctgaccaaaacatggtccccaccttttggagcttacagtctgttctggggaacagagattcagccaaagtcaagaaacactggatgccagctagattatctgttctgtgctttggtgtctataagtacatatgtggatatgggttcattttatccctaaacttagtaccaaaccagcatttaatatctaattataaatctaatttggcctaaactttattattgcacactgcctgaacaaaacctatttgtctctatgtaaattttttcctcatggaacaagggtgtgaaatgaaaatattttaggatttattcaaaaacagactattctgttttcagcttcagaattgttctttgaatcctaaggaacctctgtcaacagttgaggttgctgttgaaaagaaagaagaaggaggcggaaatctctcagggagaattatttcctttcttttctatttcagatacctggaggggtggggagaagtaagaattgtaagggaggttcagtagtggggaattctgtgacagctgattgaagatgatgatgaagaacctctgcattctagttaccctttgcttcccttcacctcttgtaaaatttggcttggcaacaatgacattgtcatgcttattgtcccaatatccatcctgtcgtagatcttaatgtttttgatcgttgcgttaaagtggaagtgccacccacagtgaaaccagatcccattaataaataagcttaaaggcaactgcagttttaattccatagttattgaatatccagtgtgtgtaaggcctggaggggagccaaaggacactaacttctaagagctccgtctagttggagagaaacctgtgtgccacaacatacagtgtccttgcttatgtggggtcgaagacatctgtgaaaataaaagcagcctctgctaatttagcgccatctcttttactgtgctaatttttttttctttagagacagggtctcactctgtcgcccagcctggagggcagtggtgtgatcgtagctcactattacctccaactcttgggctcaagtgatcctcccacctcagcctcctgagcagctaggactacagatacatgccaccgctcccggctagtattttttaaaattttttgtagagccaagtgttgctatgttgtccacactgatctggagcttctaatctcaaatgattctcctgcctcagcctcccaaagtgctgggaatacaggtgtgagccaccatacctggccttactgtactaatattaatattgtgtaaataggggaaaataccatggttaatttttactcaaacagtaagaaagtttgagtaactaattttaatctcaacagcccatagctagaagaggggatctaaatgttaagttgaatatttagaaataaaagtgtctacaagaagaaaagtctttagtgaaaatatgggcataggccagcagcattagctttctattgctgcagaacaaattaccacaaacttagctgcttaaaacaacacacacttattgtctcacaatgtttgtgggtcggaagtctaggcgtggcttagctgggtagtctgtttaggatctcagtgctggaaaaacgtgtctggccaggtgctcattgtagctttgacagggaagggatctgctcccaagcactctcaggttgttggcagaatttgtttccttatggctgtaggattcatggcaagttgcttcttccaaaaccagcattggagacagactagcaagatgggcactacactcttagataatcaaataaatgcaatcatgtgcctcgtgtcaccttttttgcattccattcattaagaacaagttgcagttcctacctacactcaaggaagggaggaattacacagaagtgtgaccacaggaggcagggctcatggaggcctccttaaagtcccccagccaaacctgaaaagtcaatcctggaccttatcatagtggctgtatagtttagaaggtttcttcagattggcattcctttgcctcatatcatcacttcaaaaccctataagggtttgttcctcggtcttgactttgtgtctttgaggattgctttgtttagtgtcacctgccttctttcaggaggttttgcctgacatctggtggtgaccgtggccaccaagtcaacccaaacactacctttaaggacgactgcagttctcttagggtctcctcaatctaaaattgtacctctttcaggccaaacacctattttcttcattttttttctcataagaatgctagctagtatgcctaattatctaactggcacagtttcaccaaggacagtttggaactacacaggccattttagggagattttgacatgaacaagattg

SEQ ID NO: 286966 - DNA, 2534 bp, Homo sapiens
ggtacctccaggctgattgcaggcttccaggcttgattgcgctgggattacaggcatgagccactgtacccagccaaaattgttttcttttttaagtgaattcaacaatttctgtgagtggctctttgcatgaacactgtgcaaggtgttggagaaatccaaagctgaccaaaacatggtccccaccttttggagcttacagtctgttctggggaacagagattcagccaaagtcaagaaacactggatgccagctagattatctgttctgtgctttggtgtctataagtacatatgtggatatgggttcattttatccctaaacttagtaccaaaccagcatttaatatctaattataaatctaatttggcctaaactttattattgcacactgcctgaacaaaacctatttgtctctatgtaaattttttcctcatggaacaagggtgtgaaatgaaaatattttaggatttattcaaaaacagactattctgttttcagcttcagaattgttctttgaatcctaaggaacctctgtcaacagttgaggttgctgttgaaaagaaagaagaaggaggcggaaatctctcagggagaattatttcctttcttttctatttcagatacctggaggggtggggagaagtaagaattgtaagggaggttcagtagtggggaattctgtgacagctgattgaagatgatgatgaagaacctctgcattctagttaccctttgcttcccttcacctcttgtaaaatttggcttggcaacaatgacattgtcatgcttattgtcccaatatccatcctgtcgtagatcttaatgtttttgatcgttgcgttaaagtggaagtgccacccacagtgaaaccagatcccattaataaataagcttaaaggcaactgcagttttaattccatagttattgaatatccagtgtgtgtaaggcctggaggggagccaaaggacactaacttctaagagctccgtctagttggagagaaacctgtgtgccacaacatacagtgtccttgcttatgtggggtcgaagacatctgtgaaaataaaagcagcctctgctaatttagcgccatctcttttactgtgctaatttttttttctttagagacagggtctcactctgtcgcccagcctggagggcagtggtgtgatcgtagctcactattacctccaactcttgggctcaagtgatcctcccacctcagcctcctgagcagctaggactacagatacatgccaccgctcccggctagtattttttaaaattttttgtagagccaagtgttgctatgttgtccacactgatctggagcttctaatctcaaatgattctcctgcctcagcctcccaaagtgctgggaatacaggtgtgagccaccatacctggccttactgtactaatattaatattgtgtaaataggggaaaataccatggttaatttttactcaaacagtaagaaagtttgagtaactaattttaatctcaacagcccatagctagaagaggggatctaaatgttaagttgaatatttagaaataaaagtgtctacaagaagaaaagtctttagtgaaaatatgggcataggccagcagcattagctttctattgctgcagaacaaattaccacaaacttagctgcttaaaacaacacacacttattgtctcacaatgtttgtgggtcggaagtctaggcgtggcttagctgggtagtctgtttaggatctcagtgctggaaaaacgtgtctggccaggtgctcattgtagctttgacagggaagggatctgctcccaagcactctcaggttgttggcagaatttgtttccttatggctgtaggattcatggcaagttgcttcttccaaaaccagcattggagacagactagcaagatgggcactacactcttagataatcaaataaatgcaatcatgtgcctcgtgtcaccttttttgcattccattcattaagaacaagttgcagttcctacctacactcaaggaagggaggaattacacagaagtgtgaccacaggaggcagggctcatggaggcctccttaaagtcccccagccaaacctgaaaagtcaatcctggaccttatcatagtggctgtatagtttagaaggtttcttcagattggcattcctttgcctcatatcatcacttcaaaaccctataagggtttgttcctcggtcttgactttgtgtctttgaggattgctttgtttagtgtcacctgccttctttcaggaggttttgcctgacatctggtggtgaccgtggccaccaagtcaacccaaacactacctttaaggacgactgcagttctcttagggtctcctcaatctaaaattgtacctctttcaggccaaacacctattttcttcattttttttctcataagaatgctagctagtatgcctaattatctaactggcacagtttcaccaaggacagtttggaactacacaggccattttagggagattttgacatgaacaagattg

SEQ ID NO: 286967 - DNA, 2822 bp, Homo sapiens
  misc_feature (130)..(130): n is a, c, g, or t
agttctactgcccgctttagcacagtggctgcagctgtgctctgcgggtccctgccctcaagcccggacttcgcccataattctggaagttctcctccgcctcaaccccaggatgaagttgaagcgggtnctctgcgcttccgggaagtggtcatgtgataccccaggcgcctgcgctctctttctagggactttcctgagtgggagggatttcgccggaacaaaaatgcctcagtttggaggtcgcgctcactgcgacggcaggctttgagtgtagcacttggtagttcttcctctgctctgcttcccttcggaggaaaatttcaggctgaaggtttagcgggtgccgcctctaaagagagcaatcactacacttatggctgggattttgcgcttagtagttcaatggcccccaggcagactacagaccgtgacaaaaggtgtggagtctcttatttgtacagattggattcgtcacaaattcaccagatcaagaattccagaaaaagtgtttcaggcctcacctgaagatcatgaaaaatacggtggggatccacagaaccctcataaactgcatattgttaccagaataaaaagtacaagaagacgtccatattgggaaaaagatataataaagatgcttggattagaaaaagcacatacccctcaagttcacaagaatatcccttcagtgaatgcaaaattgaaagtagttaagcatttgataagaatcaagcccttgaagttgccacaaggacttccaacagaggagaacatgtctaacacgtgcctcaaaagcactggggagttagtagtgcagtggcatctgaaacctgtggagcagaaagcacatgagtcctaatgccccagcagcttccgattggaaaatgcaaattgtttttatttaatcagatacctggaggggtggggagaagtaagaattgtaagggaggttcagtagtggggaattctgtgacagctgattgaagatgatgatgaagaacctctgcattctagttaccctttgcttcccttcacctcttgtaaaatttggcttggcaacaatgacattgtcatgcttattgtcccaatatccatcctgtcgtagatcttaatgtttttgatcgttgcgttaaagtggaagtgccacccacagtgaaaccagatcccattaataaataagcttaaaggcaactgcagttttaattccatagttattgaatatccagtgtgtgtaaggcctggaggggagccaaaggacactaacttctaagagctccgtctagttggagagaaacctgtgtgccacaacatacagtgtccttgcttatgtggggtcgaagacatctgtgaaaataaaagcagcctctgctaatttagcgccatctcttttactgtgctaatttttttttctttagagacagggtctcactctgtcgcccagcctggagggcagtggtgtgatcgtagctcactattacctccaactcttgggctcaagtgatcctcccacctcagcctcctgagcagctaggactacagatacatgccaccgctcccggctagtattttttaaaattttttgtagagccaagtgttgctatgttgtccacactgatctggagcttctaatctcaaatgattctcctgcctcagcctcccaaagtgctgggaatacaggtgtgagccaccatacctggccttactgtactaatattaatattgtgtaaataggggaaaataccatggttaatttttactcaaacagtaagaaagtttgagtaactaattttaatctcaacagcccatagctagaagaggggatctaaatgttaagttgaatatttagaaataaaagtgtctacaagaagaaaagtctttagtgaaaatatgggcataggccagcagcattagctttctattgctgcagaacaaattaccacaaacttagctgcttaaaacaacacacacttattgtctcacaatgtttgtgggtcggaagtctaggcgtggcttagctgggtagtctgtttaggatctcagtgctggaaaaacgtgtctggccaggtgctcattgtagctttgacagggaagggatctgctcccaagcactctcaggttgttggcagaatttgtttccttatggctgtaggattcatggcaagttgcttcttccaaaaccagcattggagacagactagcaagatgggcactacactcttagataatcaaataaatgcaatcatgtgcctcgtgtcaccttttttgcattccattcattaagaacaagttgcagttcctacctacactcaaggaagggaggaattacacagaagtgtgaccacaggaggcagggctcatggaggcctccttaaagtcccccagccaaacctgaaaagtcaatcctggaccttatcatagtggctgtatagtttagaaggtttcttcagattggcattcctttgcctcatatcatcacttcaaaaccctataagggtttgttcctcggtcttgactttgtgtctttgaggattgctttgtttagtgtcacctgccttctttcaggaggttttgcctgacatctggtggtgaccgtggccaccaagtcaacccaaacactacctttaaggacgactgcagttctcttagggtctcctcaatctaaaattgtacctctttcaggccaaacacctattttcttcattttttttctcataagaatgctagctagtatgcctaattatctaactggcacagtttcaccaaggacagtttggaactacacaggccattttagggagattttgacatgaacaagattg

SEQ ID NO: 286968 - DNA, 1595 bp, Homo sapiens
agcgcgtgggcggccgtggggtcttgggcgcgcgcggtgtttctggcggtgggtcaggacttgcgggtcgcctccgccggtgttgaagcctcttgtgtgcacactttctcctcagcacttgggacgacctaatttcactgttaggaacggttgatcccgaacacaggagggagggtaaatatcgtaaaacatgttggacgctagctgtgtgcacgccccctgggagccaaaagggcgaagtaaaacatgcacacgaccgtaatgagattctgaactgaatctcgctctgttgcccagcccatctcggcccactgaaacctccacctcccgggttcaagcgattctcctgcctcagcctcccgagtagctgagattacaggcgcccgccaccacgcccagcatgctgatcccattttcaatgaagaattgcttccagttactttgtaactgccaggtcccagcagctggctttaaaaaaacagtaaaaaatgggctcattttacagtcaatttccaatgatgtctatcaaaatctggctgtggaagactggatccatgaccatatgaatctagaaggcaaaccaattctattcttttggcagaattctccctctgttgtaattggtaggcatcaaaatccttggcaggaatgtaacctgaatctaatgagagaagaaggtataaaactggctcggagaagaagtggaggaggaacagtctaccatgatatgggtaatatcaatttgactttctttacaaccaaaaaaaagtatgatagaatggaaaatctgaaattaattgtgagagctctgaatgctgtccaaccccagctggatgtgcaggctaccaaaagatttgaccttttacttgatggacagtttaaaatctcaggaacagcttctaagatcggccggactactgcctatcaccattgcactttattatgtagtactgatgggacgttcctgtcttctttgctaaagagcccttaccaagggatcaggagcaatgccactgctagcataccttccttagtgaaaaatcttttggaaaaggatcccactctgacctgtgaagtactaatgaatgctgttgctacagagtatgctgcctatcatcaaattgataatcacattcacctaataaacccaacggatgagacactgtttcctggaataaatagcaaagccaaagaactgcaaacttgggagtggatatatggcaaaactccaaagtttagtataaatacttcctttcatgtgttatatgaacagtcacacttggaaattaaagtattcatagacataaagaatggaagaattgaaatttgtaatattgaagcacctgatcattggttgccattggaaatacgtgacaaattaaattcaagtcttattggcagtaagttttgcccaactgaaactaccatgctaacaaatatattacttagaacatgtccacaagaccacaaactaaacagtaaatggaatattctctgtgaaaaaattaagggaataatgtgattccaagtaaatgtcttaatacagtttcaattagaaaataaaatgtctcatacttgcacattgtatgtcaaaa

SEQ ID NO: 286969 - DNA, 1293 bp, Homo sapiens
agcatcgcgcgcaaggcctgccggttgctcggggtcgtatgacgcacttttccagctcgagccctcacgaggccgtgggtacgaccggaagccgcagcatgctgatcccattttcaatgaagaattgcttccagttactttgtaactgccaggtcccagcagctggctttaaaaaaacagtaaaaaatgggctcattttacagtcaatttccaatgatgtctatcaaaatctggctgtggaagactggatccatgaccatatgaatctagaaggcaaaccaattctattcttttggcagaattctccctctgttgtaattggtaggcatcaaaatccttggcaggaatgtaacctgaatctaatgagagaagaaggtataaaactggctcggagaagaagtggaggaggaacagtctaccatgatatgggtaatatcaatttgactttctttacaaccaaaaaaaagtatgatagaatggaaaatctgaaattaattgtgagagctctgaatgctgtccaaccccagctggatgtgcaggctaccaaaagatttgaccttttacttgatggacagtttaaaatctcaggaacagcttctaagatcggccggactactgcctatcaccattgcactttattatgtagtactgatgggacgttcctgtcttctttgctaaagagcccttaccaagggatcaggagcaatgccactgctagcataccttccttagtgaaaaatcttttggaaaaggatcccactctgacctgtgaagtactaatgaatgctgttgctacagagtatgctgcctatcatcaaattgataatcacattcacctaataaacccaacggatgagacactgtttcctggaataaatagcaaagccaaagaactgcaaacttgggagtggatatatggcaaaactccaaagtttagtataaatacttcctttcatgtgttatatgaacagtcacacttggaaattaaagtattcatagacataaagaatggaagaattgaaatttgtaatattgaagcacctgatcattggttgccattggaaatacgtgacaaattaaattcaagtcttattggcagtaagttttgcccaactgaaactaccatgctaacaaatatattacttagaacatgtccacaagaccacaaactaaacagtaaatggaatattctctgtgaaaaaattaagggaataatgtgattccaagtaaatgtcttaatacagtttcaattagaaaataaaatgtctcatacttgcacattgtatgtcaaaa

SEQ ID NO: 286970 - DNA, 943 bp, Homo sapiens
cccaatggcagccggcccaatggcagccgaaaactggctcggagaagaagtggaggaggaacagtctaccatgatatgggtaatatcaatttgactttctttacaaccaaaaaaaagtatgatagaatggaaaatctgaaattaattgtgagagctctgaatgctgtccaaccccagctggatgtgcaggctaccaaaagatttgaccttttacttgatggacagtttaaaatctcaggaacagcttctaagatcggccggactactgcctatcaccattgcactttattatgtagtactgatgggacgttcctgtcttctttgctaaagagcccttaccaagggatcaggagcaatgccactgctagcataccttccttagtgaaaaatcttttggaaaaggatcccactctgacctgtgaagtactaatgaatgctgttgctacagagtatgctgcctatcatcaaattgataatcacattcacctaataaacccaacggatgagacactgtttcctggaataaatagcaaagccaaagaactgcaaacttgggagtggatatatggcaaaactccaaagtttagtataaatacttcctttcatgtgttatatgaacagtcacacttggaaattaaagtattcatagacataaagaatggaagaattgaaatttgtaatattgaagcacctgatcattggttgccattggaaatacgtgacaaattaaattcaagtcttattggcagtaagttttgcccaactgaaactaccatgctaacaaatatattacttagaacatgtccacaagaccacaaactaaacagtaaatggaatattctctgtgaaaaaattaagggaataatgtgattccaagtaaatgtcttaatacagtttcaattagaaaataaaatgtctcatacttgcacattgtatgtcaaaa

SEQ ID NO: 286971 - DNA, 840 bp, Homo sapiens
  misc_feature (827)..(827): n is a, c, g, or t
agcatcgcgcgcaaggcctgccggttgctcggggtcgtatgacgcacttttccagctcgagccctcacgaggccgtgggtacgaccggaagccgcagactgaatctcgctctgttgcccagcccatctcggcccactgaaacctccacctcccgggttcaagcgattctcctgcctcagcctcccgagtagctgagattacaggcgcccgccaccacgcccagcctctaaagagagcaatcactacacttatggctgggattttgcgcttagtagttcaatggcccccaggcagactacagaccgtgacaaaaggtgtggagtctcttatttgtacagattggattcgtcacaaattcaccagatcaagaattccagaaaaagtgtttcaggcctcacctgaagatcatgaaaaatacggtggggatccacagaaccctcataaactgcatattgttaccagaataaaaagtacaagaagacgtccatattgggaaaaagatataataaagatgcttggattagaaaaagcacatacccctcaagttcacaagaatatcccttcagtgaatgcaaaattgaaagtagttaagcatttgataagaatcaagcccttgaagttgccacaaggacttccaacagaggagaacatgtctaacacgtgcctcaaaagcactggggagttagtagtgcagtggcatctgaaacctgtggagcagaaagcacatgagtcctaatgccccagcagcttccgattggaaaatgcaaattgtttttatttaaattaagagcgagaaggttcataaattgtttaaaccattagccggncgtgtactgatca

SEQ ID NO: 286972 - DNA, 1193 bp, Homo sapiens
  misc_feature (130)..(130): n is a, c, g, or t
agttctactgcccgctttagcacagtggctgcagctgtgctctgcgggtccctgccctcaagcccggacttcgcccataattctggaagttctcctccgcctcaaccccaggatgaagttgaagcgggtnctctgcgcttccgggaagtggtcatgtgataccccaggcgcctgcgctctctttctagggactttcctgagtgggagggatttcgccggaacaaaaatgcctcagtttggaggtcgcgctcactgcgacggcaggctttgagtgtagcacttggtagttcttcctctgctctgcttcccttcggaggaaaatttcaggctgaaggtttagcgggtgccgcctctaaagagagcaatcactacacttatggctgggattttgcgcttagtagttcaatggcccccaggcagactacagaccgtgacaaaaggtgtggagtctcttatttgtacagattggattcgtcacaaattcaccagatcaagaattccagaaaaagtgtttcaggcctcacctgaagatcatgaaaaatacggtggggatccacagaaccctcataaactgcatattgttaccagaataaaaagtacaagaagacgtccatattgggaaaaagatataataaagatgcttggattagaaaaagcacatacccctcaagttcacaagaatatcccttcagtgaatgcaaaattgaaagtagttaagcatttgataagaatcaagcccttgaagttgccacaaggacttccaacagaggagaacatgtctaacacgtgcctcaaaagcactggggagttagtagtgcagtggcatctgaaacctgtggagcagaaagcacatgagtcctaatgccccagcagcttccgattggaaaatgcaaattgtttttatttaatcagatacctggaggggtggggagaagtaagaattgtaagggaggttcagtagtggggaattctgtgacagctgattgaagatgatgatgaagaacctctgcattctagttaccctttgcttcccttcacctcttgtaaaatttggcttggcaacaatgacattgtcatgcttattgtcccaatatccatcctgtcgtagatcttaatgtttttgatcgttgcgttaaagtggaagtgccacccacagtgaaaccagatcccattaataaataagcttaaaggca

SEQ ID NO: 286973 - DNA, 1419 bp, Homo sapiens
agcatcgcgcgcaaggcctgccggttgctcggggtcgtatgacgcacttttccagctcgagccctcacgaggccgtgggtacgaccggaagccgcagactgaatctcgctctgttgcccagcccatctcggcccactgaaacctccacctcccgggttcaagcgattctcctgcctcagcctcccgagtagctgagattacaggcgcccgccaccacgcccagcatgctgatcccattttcaatgaagaattgcttccagttactttgtaactgccaggtcccagcagctggctttaaaaaaacagtaaaaaatgggctcattttacagtcaatttccaatgatgtctatcaaaatctggctgtggaagactggatccatgaccatatgaatctagaaggcaaaccaattctattcttttggcagaattctccctctgttgtaattggtaggcatcaaaatccttggcaggaatgtaacctgaatctaatgagagaagaaggtataaaactggctcggagaagaagtggaggaggaacagtctaccatgatatgggtaatatcaatttgactttctttacaaccaaaaaaaagtatgatagaatggaaaatctgaaattaattgtgagagctctgaatgctgtccaaccccagctggatgtgcaggctaccaaaagatttgaccttttacttgatggacagtttaaaatctcaggaacagcttctaagatcggccggactactgcctatcaccattgcactttattatgtagtactgatgggacgttcctgtcttctttgctaaagagcccttaccaagggatcaggagcaatgccactgctagcataccttccttagtgaaaaatcttttggaaaaggatcccactctgacctgtgaagtactaatgaatgctgttgctacagagtatgctgcctatcatcaaattgataatcacattcacctaataaacccaacggatgagacactgtttcctggaataaatagcaaagccaaagaactgcaaacttgggagtggatatatggcaaaactccaaagtttagtataaatacttcctttcatgtgttatatgaacagtcacacttggaaattaaagtattcatagacataaagaatggaagaattgaaatttgtaatattgaagcacctgatcattggttgccattggaaatacgtgacaaattaaattcaagtcttattggcagtaagttttgcccaactgaaactaccatgctaacaaatatattacttagaacatgtccacaagaccacaaactaaacagtaaatggaatattctctgtgaaaaaattaagggaataatgtgattccaagtaaatgtcttaatacagtttcaattagaaaataaaatgtctcatacttgcacattgtatgtcaaaa

SEQ ID NO: 286974 - DNA, 4220 bp, Homo sapiens
  misc_feature (130)..(130): n is a, c, g, or t
agttctactgcccgctttagcacagtggctgcagctgtgctctgcgggtccctgccctcaagcccggacttcgcccataattctggaagttctcctccgcctcaaccccaggatgaagttgaagcgggtnctctgcgcttccgggaagtggtcatgtgataccccaggcgcctgcgctctctttctagggactttcctgagtgggagggatttcgccggaacaaaaatgcctcagtttggaggtcgcgctcactgcgacggcaggctttgagtgtagcacttggtagttcttcctctgctctgcttcccttcggaggaaaatttcaggctgaaggtttagcgggtgccgcctctaaagagagcaatcactacacttatggctgggattttgcgcttagtagttcaatggcccccaggcagactacagaccgtgacaaaaggtgtggagtctcttatttgtacagattggattcgtcacaaattcaccagatcaagaattccagaaaaagtgtttcaggcctcacctgaagatcatgaaaaatacggtggggatccacagaaccctcataaactgcatattgttaccagaataaaaagtacaagaagacgtccatattgggaaaaagatataataaagatgcttggattagaaaaagcacatacccctcaagttcacaagaatatcccttcagtgaatgcaaaattgaaagtagttaagcatttgataagaatcaagcccttgaagttgccacaaggacttccaacagaggagaacatgtctaacacgtgcctcaaaagcactggggagttagtagtgcagtggcatctgaaacctgtggagcagaaagcacatgagtcctaatgccccagcagcttccgattggaaaatgcaaattgtttttatttaaagatggtgagaaagtgttttcattaaaatatgttttcaaaaccattttcaggccgggcacggtggctcacctgtaatcccagcactttgggaggccaaggcgggcagatcacctgaggtcaagagttcgagaccagcctgaccaacatggagaaacccccatctctactgaaaatacagaattagccaggcatggtggcacatgcctgtaacccagctactcgggaggctgaagcaggagaatcacttgaacccgggaggcagaggttgcagtgagctgagatggtgccactgtactccagcctgggtgataggatgagactccatctcaggggaaaaaaaaaaatttttttttcactgactaaacctgctgcagctctcttttactacagacttggagattttagtttaatttggtttaattctctgtcctttccctttcactgtttcactccaaaacatgtaagaatggcaatgtttgaacatctgcgtttgggtctactgccaccttagcaagcctcattaaccattttataaaaattgcgttagtattgttgttgttgtttttgagacagggtcttgctctgtcacccaagctggaatacagtggcatgatttcagttcactgcggcctcgacctcccaggctcaagtgatcctcccacctcagcctccagagtagctgggactacaggcagtgtgccaccacatccagctaattttttaaagttttttcatagagacagggactcactatgttgtccaagctggtctcaaactcctgggttcaagccatcctcccacctcagcctcccaaaatgctgggattacaggcatgagccactgtacccagccaaaattgttttcttttttaagtgaattcaacaatttctgtgagtggctctttgcatgaacactgtgcaaggtgttggagaaatccaaagctgaccaaaacatggtccccaccttttggagcttacagtctgttctggggaacagagattcagccaaagtcaagaaacactggatgccagctagattatctgttctgtgctttggtgtctataagtacatatgtggatatgggttcattttatccctaaacttagtaccaaaccagcatttaatatctaattataaatctaatttggcctaaactttattattgcacactgcctgaacaaaacctatttgtctctatgtaaattttttcctcatggaacaagggtgtgaaatgaaaatattttaggatttattcaaaaacagactattctgttttcagcttcagaattgttctttgaatcctaaggaacctctgtcaacagttgaggttgctgttgaaaagaaagaagaaggaggcggaaatctctcagggagaattatttcctttcttttctatttcagatacctggaggggtggggagaagtaagaattgtaagggaggttcagtagtggggaattctgtgacagctgattgaagatgatgatgaagaacctctgcattctagttaccctttgcttcccttcacctcttgtaaaatttggcttggcaacaatgacattgtcatgcttattgtcccaatatccatcctgtcgtagatcttaatgtttttgatcgttgcgttaaagtggaagtgccacccacagtgaaaccagatcccattaataaataagcttaaaggcaactgcagttttaattccatagttattgaatatccagtgtgtgtaaggcctggaggggagccaaaggacactaacttctaagagctccgtctagttggagagaaacctgtgtgccacaacatacagtgtccttgcttatgtggggtcgaagacatctgtgaaaataaaagcagcctctgctaatttagcgccatctcttttactgtgctaatttttttttctttagagacagggtctcactctgtcgcccagcctggagggcagtggtgtgatcgtagctcactattacctccaactcttgggctcaagtgatcctcccacctcagcctcctgagcagctaggactacagatacatgccaccgctcccggctagtattttttaaaattttttgtagagccaagtgttgctatgttgtccacactgatctggagcttctaatctcaaatgattctcctgcctcagcctcccaaagtgctgggaatacaggtgtgagccaccatacctggccttactgtactaatattaatattgtgtaaataggggaaaataccatggttaatttttactcaaacagtaagaaagtttgagtaactaattttaatctcaacagcccatagctagaagaggggatctaaatgttaagttgaatatttagaaataaaagtgtctacaagaagaaaagtctttagtgaaaatatgggcataggccagcagcattagctttctattgctgcagaacaaattaccacaaacttagctgcttaaaacaacacacacttattgtctcacaatgtttgtgggtcggaagtctaggcgtggcttagctgggtagtctgtttaggatctcagtgctggaaaaacgtgtctggccaggtgctcattgtagctttgacagggaagggatctgctcccaagcactctcaggttgttggcagaatttgtttccttatggctgtaggattcatggcaagttgcttcttccaaaaccagcattggagacagactagcaagatgggcactacactcttagataatcaaataaatgcaatcatgtgcctcgtgtcaccttttttgcattccattcattaagaacaagttgcagttcctacctacactcaaggaagggaggaattacacagaagtgtgaccacaggaggcagggctcatggaggcctccttaaagtcccccagccaaacctgaaaagtcaatcctggaccttatcatagtggctgtatagtttagaaggtttcttcagattggcattcctttgcctcatatcatcacttcaaaaccctataagggtttgttcctcggtcttgactttgtgtctttgaggattgctttgtttagtgtcacctgccttctttcaggaggttttgcctgacatctggtggtgaccgtggccaccaagtcaacccaaacactacctttaaggacgactgcagttctcttagggtctcctcaatctaaaattgtacctctttcaggccaaacacctattttcttcattttttttctcataagaatgctagctagtatgcctaattatctaactggcacagtttcaccaaggacagtttggaactacacaggccattttagggagattttgacatgaacaagattg

SEQ ID NO: 286975 - DNA, 2655 bp, Homo sapiens
agcatcgcgcgcaaggcctgccggttgctcggggtcgtatgacgcacttttccagctcgagccctcacgaggccgtgggtacgaccggaagccgcagactgaatctcgctctgttgcccagcccatctcggcccactgaaacctccacctcccgggttcaagcgattctcctgcctcagcctcccgagtagctgagattacaggcgcccgccaccacgcccagcctctaaagagagcaatcactacacttatggctgggattttgcgcttagtagttcaatggcccccaggcagactacagaccgtgacaaaaggtgtggagtctcttatttgtacagattggattcgtcacaaattcaccagatcaagaattccagaaaaagtgtttcaggcctcacctgaagatcatgaaaaatacggtggggatccacagaaccctcataaactgcatattgttaccagaataaaaagtacaagaagacgtccatattgggaaaaagatataataaagatgcttggattagaaaaagcacatacccctcaagttcacaagaatatcccttcagtgaatgcaaaattgaaagtagttaagcatttgataagaatcaagcccttgaagttgccacaaggacttccaacagaggagaacatgtctaacacgtgcctcaaaagcactggggagttagtagtgcagtggcatctgaaacctgtggagcagaaagcacatgagtcctaatgccccagcagcttccgattggaaaatgcaaattgtttttatttaaagatggtgagaaagtgttttcattaaaatatgttttcaaaaccattttcaggccgggcacggtggctcacctgtaatcccagcactttgggaggccaaggcgggcagatcacctgaggtcaagagttcgagaccagcctgaccaacatggagaaacccccatctctactgaaaatacagaattagccaggcatggtggcacatgcctgtaacccagctactcgggaggctgaagcaggagaatcacttgaacccgggaggcagaggttgcagtgagctgagatggtgccactgtactccagcctgggtgataggatgagactccatctcaggggaaaaaaaaaaatttttttttcactgactaaacctgctgcagctctcttttactacagacttggagattttagtttaatttggtttaattctctgtcctttccctttcactgtttcactccaaaacatgtaagaatggcaatgtttgaacatctgcgtttgggtctactgccaccttagcaagcctcattaaccattttataaaaattgcgttagtattgttgttgttgtttttgagacagggtcttgctctgtcacccaagctggaatacagtggcatgatttcagttcactgcggcctcgacctcccaggctcaagtgatcctcccacctcagcctccagagtagctgggactacaggcagtgtgccaccacatccagctaattttttaaagttttttcatagagacagggactcactatgttgtccaagctggtctcaaactcctgggttcaagccatcctcccacctcagcctcccaaaatgctgggattacaggcatgagccactgtacccagccaaaattgttttcttttttaagtgaattcaacaatttctgtgagtggctctttgcatgaacactgtgcaaggtgttggagaaatccaaagctgaccaaaacatggtccccaccttttggagcttacagtctgttctggggaacagagattcagccaaagtcaagaaacactggatgccagctagattatctgttctgtgctttggtgtctataagtacatatgtggatatgggttcattttatccctaaacttagtaccaaaccagcatttaatatctaattataaatctaatttggcctaaactttattattgcacactgcctgaacaaaacctatttgtctctatgtaaattttttcctcatggaacaagggtgtgaaatgaaaatattttaggatttattcaaaaacagactattctgttttcagcttcagaattgttctttgaatcctaaggaacctctgtcaacagttgaggttgctgttgaaaagaaagaagaaggaggcggaaatctctcagggagaattatttcctttcttttctatttcagatacctggaggggtggggagaagtaagaattgtaagggaggttcagtagtggggaattctgtgacagctgattgaagatgatgatgaagaacctctgcattctagttaccctttgcttcccttcacctcttgtaaaatttggcttggcaacaatgacattgtcatgcttattgtcccaatatccatcctgtcgtagatcttaatgtttttgatcgttgcgttaaagtggaagtgccacccacagtgaaaccagatcccattaataaataagcttaaaggcaactgcagttttaattccatagttattgaatatccagtgtgtgtaaggcctggaggggagccaaaggacactaacttctaagagctccgtctagttggagagaaacctgtgtgccacaacatacagtgtccttgcttatgtggggtcgaagacatctgtgaaaataaaagcagcctctgctaatttagcgc

SEQ ID NO: 286976 - DNA, 3038 bp, Homo sapiens
agcatcgcgcgcaaggcctgccggttgctcggggtcgtatgacgcacttttccagctcgagccctcacgaggccgtgggtacgaccggaagccgcagactgaatctcgctctgttgcccagcccatctcggcccactgaaacctccacctcccgggttcaagcgattctcctgcctcagcctcccgagtagctgagattacaggcgcccgccaccacgcccagcctctaaagagagcaatcactacacttatggctgggattttgcgcttagtagttcaatggcccccaggcagactacagaccgtgacaaaaggtgtggagtctcttatttgtacagattggattcgtcacaaattcaccagatcaagaattccagaaaaagtgtttcaggcctcacctgaagatcatgaaaaatacggtggggatccacagaaccctcataaactgcatattgttaccagaataaaaagtacaagaagacgtccatattgggaaaaagatataataaagatgcttggattagaaaaagcacatacccctcaagttcacaagaatatcccttcagtgaatgcaaaattgaaagtagttaagcatttgataaggtttgttgtttcttctcagctctttttaaaatgtattgcctagtgtaattctaaatgcatttttcttttttcgttaatgttctgaaaaaaactttttaaaaaactaaaattttattttgtttttttttaattgacacataataattgtacatatttatggggtacatagtgacgtttcaatatatataaagtatagtgatccgatcagggtaattggcatatccatcatctcagacatttaccatttcttcatgttgggaacattcaacatcctcctcctagctatttgaaactatgtgttattgttaactgtagttatcctgcggggatatagaacgctagaacgtattcctcctatctaaacgcattttcttgtgtcacagaatcaagcccttgaagttgccacaaggacttccaacagaggagaacatgtctaacacgtgcctcaaaagcactggggagttagtagtgcagtggcatctgaaacctgtggagcagaaagcacatgagtcctaatgccccagcagcttccgattggaaaatgcaaattgtttttatttaaagatggtgagaaagtgttttcattaaaatatgttttcaaaaccattttcaggccgggcacggtggctcacctgtaatcccagcactttgggaggccaaggcgggcagatcacctgaggtcaagagttcgagaccagcctgaccaacatggagaaacccccatctctactgaaaatacagaattagccaggcatggtggcacatgcctgtaacccagctactcgggaggctgaagcaggagaatcacttgaacccgggaggcagaggttgcagtgagctgagatggtgccactgtactccagcctgggtgataggatgagactccatctcaggggaaaaaaaaaaatttttttttcactgactaaacctgctgcagctctcttttactacagacttggagattttagtttaatttggtttaattctctgtcctttccctttcactgtttcactccaaaacatgtaagaatggcaatgtttgaacatctgcgtttgggtctactgccaccttagcaagcctcattaaccattttataaaaattgcgttagtattgttgttgttgtttttgagacagggtcttgctctgtcacccaagctggaatacagtggcatgatttcagttcactgcggcctcgacctcccaggctcaagtgatcctcccacctcagcctccagagtagctgggactacaggcagtgtgccaccacatccagctaattttttaaagttttttcatagagacagggactcactatgttgtccaagctggtctcaaactcctgggttcaagccatcctcccacctcagcctcccaaaatgctgggattacaggcatgagccactgtacccagccaaaattgttttcttttttaagtgaattcaacaatttctgtgagtggctctttgcatgaacactgtgcaaggtgttggagaaatccaaagctgaccaaaacatggtccccaccttttggagcttacagtctgttctggggaacagagattcagccaaagtcaagaaacactggatgccagctagattatctgttctgtgctttggtgtctataagtacatatgtggatatgggttcattttatccctaaacttagtaccaaaccagcatttaatatctaattataaatctaatttggcctaaactttattattgcacactgcctgaacaaaacctatttgtctctatgtaaattttttcctcatggaacaagggtgtgaaatgaaaatattttaggatttattcaaaaacagactattctgttttcagcttcagaattgttctttgaatcctaaggaacctctgtcaacagttgaggttgctgttgaaaagaaagaagaaggaggcggaaatctctcagggagaattatttcctttcttttctatttcagatacctggaggggtggggagaagtaagaattgtaagggaggttcagtagtggggaattctgtgacagctgattgaagatgatgatgaagaacctctgcattctagttaccctttgcttcccttcacctcttgtaaaatttggcttggcaacaatgacattgtcatgcttattgtcccaatatccatcctgtcgtagatcttaatgtttttgatcgttgcgttaaagtggaagtgccacccacagtgaaaccagatcccattaataaataagcttaaaggcaactgcagttttaattccatagttattgaatatccagtgtgtgtaaggcctggaggggagccaaaggacactaacttctaagagctccgtctagttggagagaaacctgtgtgccacaacatacagtgtccttgcttatgtggggtcgaagacatctgtgaaaataaaagcagcctctgctaatttagcgc

SEQ ID NO: 286977 - DNA, 3483 bp, Homo sapiens
  misc_feature (130)..(130): n is a, c, g, or t
agttctactgcccgctttagcacagtggctgcagctgtgctctgcgggtccctgccctcaagcccggacttcgcccataattctggaagttctcctccgcctcaaccccaggatgaagttgaagcgggtnctctgcgcttccgggaagtggtcatgtgataccccaggcgcctgcgctctctttctagggactttcctgagtgggagggatttcgccggaacaaaaatgcctcagtttggaggtcgcgctcactgcgacggcaggctttgagtgtagcacttggtagttcttcctctgctctgcttcccttcggaggaaaatttcaggctgaaggtttagcgggtgccgcctctaaagagagcaatcactacacttatggctgggattttgcgcttagtagttcaatggcccccaggcagactacagaccgtgacaaaaggtgtggagtctcttatttgtacagattggattcgtcacaaattcaccagatcaagaattccagaaaaagtgtttcaggcctcacctgaagatcatgaaaaatacggtggggatccacagaaccctcataaactgcatattgttaccagaataaaaagtacaagaagacgtccatattgggaaaaagatataataaagatgcttggattagaaaaagcacatacccctcaagttcacaagaatatcccttcagtgaatgcaaaattgaaagtagttaagcatttgataagaatcaagcccttgaagttgccacaaggacttccaacagaggagaacatgtctaacacgtgcctcaaaagcactggggagttagtagtgcagtggcatctgaaacctgtggagcagaaagcacatgagtcctaatgccccagcagcttccgattggaaaatgcaaattgtttttatttaaagatggtgagaaagtgttttcattaaaatatgttttcaaaaccattttcaggccgggcacggtggctcacctgtaatcccagctgggattacaggcatgagccactgtacccagccaaaattgttttcttttttaagtgaattcaacaatttctgtgagtggctctttgcatgaacactgtgcaaggtgttggagaaatccaaagctgaccaaaacatggtccccaccttttggagcttacagtctgttctggggaacagagattcagccaaagtcaagaaacactggatgccagctagattatctgttctgtgctttggtgtctataagtacatatgtggatatgggttcattttatccctaaacttagtaccaaaccagcatttaatatctaattataaatctaatttggcctaaactttattattgcacactgcctgaacaaaacctatttgtctctatgtaaattttttcctcatggaacaagggtgtgaaatgaaaatattttaggatttattcaaaaacagactattctgttttcagcttcagaattgttctttgaatcctaaggaacctctgtcaacagttgaggttgctgttgaaaagaaagaagaaggaggcggaaatctctcagggagaattatttcctttcttttctatttcagatacctggaggggtggggagaagtaagaattgtaagggaggttcagtagtggggaattctgtgacagctgattgaagatgatgatgaagaacctctgcattctagttaccctttgcttcccttcacctcttgtaaaatttggcttggcaacaatgacattgtcatgcttattgtcccaatatccatcctgtcgtagatcttaatgtttttgatcgttgcgttaaagtggaagtgccacccacagtgaaaccagatcccattaataaataagcttaaaggcaactgcagttttaattccatagttattgaatatccagtgtgtgtaaggcctggaggggagccaaaggacactaacttctaagagctccgtctagttggagagaaacctgtgtgccacaacatacagtgtccttgcttatgtggggtcgaagacatctgtgaaaataaaagcagcctctgctaatttagcgccatctcttttactgtgctaatttttttttctttagagacagggtctcactctgtcgcccagcctggagggcagtggtgtgatcgtagctcactattacctccaactcttgggctcaagtgatcctcccacctcagcctcctgagcagctaggactacagatacatgccaccgctcccggctagtattttttaaaattttttgtagagccaagtgttgctatgttgtccacactgatctggagcttctaatctcaaatgattctcctgcctcagcctcccaaagtgctgggaatacaggtgtgagccaccatacctggccttactgtactaatattaatattgtgtaaataggggaaaataccatggttaatttttactcaaacagtaagaaagtttgagtaactaattttaatctcaacagcccatagctagaagaggggatctaaatgttaagttgaatatttagaaataaaagtgtctacaagaagaaaagtctttagtgaaaatatgggcataggccagcagcattagctttctattgctgcagaacaaattaccacaaacttagctgcttaaaacaacacacacttattgtctcacaatgtttgtgggtcggaagtctaggcgtggcttagctgggtagtctgtttaggatctcagtgctggaaaaacgtgtctggccaggtgctcattgtagctttgacagggaagggatctgctcccaagcactctcaggttgttggcagaatttgtttccttatggctgtaggattcatggcaagttgcttcttccaaaaccagcattggagacagactagcaagatgggcactacactcttagataatcaaataaatgcaatcatgtgcctcgtgtcaccttttttgcattccattcattaagaacaagttgcagttcctacctacactcaaggaagggaggaattacacagaagtgtgaccacaggaggcagggctcatggaggcctccttaaagtcccccagccaaacctgaaaagtcaatcctggaccttatcatagtggctgtatagtttagaaggtttcttcagattggcattcctttgcctcatatcatcacttcaaaaccctataagggtttgttcctcggtcttgactttgtgtctttgaggattgctttgtttagtgtcacctgccttctttcaggaggttttgcctgacatctggtggtgaccgtggccaccaagtcaacccaaacactacctttaaggacgactgcagttctcttagggtctcctcaatctaaaattgtacctctttcaggccaaacacctattttcttcattttttttctcataagaatgctagctagtatgcctaattatctaactggcacagtttcaccaaggacagtttggaactacacaggccattttagggagattttgacatgaacaagattg

SEQ ID NO: 286978 - DNA, 3068 bp, Homo sapiens
taggctaggtacgaggctgggtggtgcaggctgaaggttagcgggtgccgcctctaaagagagcaatcactacacttatggctgggattttgcgcttagtagttcaatggcccccaggcagactacagaccgtgacaaaaggtgtggagtctcttatttgtacagattggattcgtcacaaattcaccagatcaagaattccagaaaaagtgtttcaggcctcacctgaagatcatgaaaaatacggtggggatccacagaaccctcataaactgcatattgttaccagaataaaaagtacaagaagacgtccatattgggaaaaagatataataaagatgcttggattagaaaaaatacagtggcatgatttcagttcactgcggcctcgacctcccaggctcaagtgatcctcccacctcagcctccagagtagctgggactacaggcagtgtgccaccacatccagctaattttttaaagttttttcatagagacagggactcactatgttgtccaagctggtctcaaactcctgggttcaagccatcctcccacctcagcctcccaaaatgctgggattacaggcatgagccactgtacccagccaaaattgttttcttttttaagtgaattcaacaatttctgtgagtggctctttgcatgaacactgtgcaaggtgttggagaaatccaaagctgaccaaaacatggtccccaccttttggagcttacagtctgttctggggaacagagattcagccaaagtcaagaaacactggatgccagctagattatctgttctgtgctttggtgtctataagtacatatgtggatatgggttcattttatccctaaacttagtaccaaaccagcatttaatatctaattataaatctaatttggcctaaactttattattgcacactgcctgaacaaaacctatttgtctctatgtaaattttttcctcatggaacaagggtgtgaaatgaaaatattttaggatttattcaaaaacagactattctgttttcagcttcagaattgttctttgaatcctaaggaacctctgtcaacagttgaggttgctgttgaaaagaaagaagaaggaggcggaaatctctcagggagaattatttcctttcttttctatttcagatacctggaggggtggggagaagtaagaattgtaagggaggttcagtagtggggaattctgtgacagctgattgaagatgatgatgaagaacctctgcattctagttaccctttgcttcccttcacctcttgtaaaatttggcttggcaacaatgacattgtcatgcttattgtcccaatatccatcctgtcgtagatcttaatgtttttgatcgttgcgttaaagtggaagtgccacccacagtgaaaccagatcccattaataaataagcttaaaggcaactgcagttttaattccatagttattgaatatccagtgtgtgtaaggcctggaggggagccaaaggacactaacttctaagagctccgtctagttggagagaaacctgtgtgccacaacatacagtgtccttgcttatgtggggtcgaagacatctgtgaaaataaaagcagcctctgctaatttagcgccatctcttttactgtgctaatttttttttctttagagacagggtctcactctgtcgcccagcctggagggcagtggtgtgatcgtagctcactattacctccaactcttgggctcaagtgatcctcccacctcagcctcctgagcagctaggactacagatacatgccaccgctcccggctagtattttttaaaattttttgtagagccaagtgttgctatgttgtccacactgatctggagcttctaatctcaaatgattctcctgcctcagcctcccaaagtgctgggaatacaggtgtgagccaccatacctggccttactgtactaatattaatattgtgtaaataggggaaaataccatggttaatttttactcaaacagtaagaaagtttgagtaactaattttaatctcaacagcccatagctagaagaggggatctaaatgttaagttgaatatttagaaataaaagtgtctacaagaagaaaagtctttagtgaaaatatgggcataggccagcagcattagctttctattgctgcagaacaaattaccacaaacttagctgcttaaaacaacacacacttattgtctcacaatgtttgtgggtcggaagtctaggcgtggcttagctgggtagtctgtttaggatctcagtgctggaaaaacgtgtctggccaggtgctcattgtagctttgacagggaagggatctgctcccaagcactctcaggttgttggcagaatttgtttccttatggctgtaggattcatggcaagttgcttcttccaaaaccagcattggagacagactagcaagatgggcactacactcttagataatcaaataaatgcaatcatgtgcctcgtgtcaccttttttgcattccattcattaagaacaagttgcagttcctacctacactcaaggaagggaggaattacacagaagtgtgaccacaggaggcagggctcatggaggcctccttaaagtcccccagccaaacctgaaaagtcaatcctggaccttatcatagtggctgtatagtttagaaggtttcttcagattggcattcctttgcctcatatcatcacttcaaaaccctataagggtttgttcctcggtcttgactttgtgtctttgaggattgctttgtttagtgtcacctgccttctttcaggaggttttgcctgacatctggtggtgaccgtggccaccaagtcaacccaaacactacctttaaggacgactgcagttctcttagggtctcctcaatctaaaattgtacctctttcaggccaaacacctattttcttcattttttttctcataagaatgctagctagtatgcctaattatctaactggcacagtttcaccaaggacagtttggaactacacaggccattttagggagattttgacatgaacaagattg

SEQ ID NO: 286979 - DNA, 1368 bp, Homo sapiens
agcatcgcgcgcaaggcctgccggttgctcggggtcgtatgacgcacttttccagctcgagccctcacgaggccgtgggtacgaccggaagccgcagactgaatctcgctctgttgcccagcccatctcggcccactgaaacctccacctcccgggttcaagcgattctcctgcctcagcctcccgagtagctgagattacaggcgcccgccaccacgcccagcatgctgatcccattttcaatgaagaattgcttccagttactttgtaactgccaggtcccagcagctggctttaaaaaaacagtaaaaaatgggctcattttacagtcaatttccaatgatgtctatcaaaatctggctgtggaagactggatccatgaccatatgaatctagaaggcaaaccaattctattcttttggcagaattctccctctgttgtaattggtaggcatcaaaatccttggcaggaatgtaacctgaatctaatgagagaagaaggtataaaactggctcggagaagaagtggaggaggaacagtctaccatgatatgggtaatatcaatttgactttctttacaaccaaaaaaaagtatgatagaatggaaaatctgaaattaattgtgagagctctgaatgctgtccaaccccagctggatgtgcaggctaccaaaagatttgaccttttacttgatggacagtttaaaatctcaggaacagcttctaagatcggccggactactgcctatcaccattgcactttattatgtagtactgatgggacgttcctgtcttctttgctaaagagcccttaccaagggatcaggagcaatgccactgctagcataccttccttagtgaaaaatcttttggagtatgctgcctatcatcaaattgataatcacattcacctaataaacccaacggatgagacactgtttcctggaataaatagcaaagccaaagaactgcaaacttgggagtggatatatggcaaaactccaaagtttagtataaatacttcctttcatgtgttatatgaacagtcacacttggaaattaaagtattcatagacataaagaatggaagaattgaaatttgtaatattgaagcacctgatcattggttgccattggaaatacgtgacaaattaaattcaagtcttattggcagtaagttttgcccaactgaaactaccatgctaacaaatatattacttagaacatgtccacaagaccacaaactaaacagtaaatggaatattctctgtgaaaaaattaagggaataatgtgattccaagtaaatgtcttaatacagtttcaattagaaaataaaatgtctcatacttgcacattgtatgtcaaaa

SEQ ID NO: 286980 - DNA, 1718 bp, Homo sapiens
gattaggactatcaatgcttttatttttttcttcttgcttgtctgtattttctcatttttctcgatgaacatttgttacttgtgaattcaacataatttggctttaagatataggtaatgtggctgagtgcagtggctcatgcctgtaatcccagcactttgggaggccaaggtgggaggactgcttgagcccaggagtttgagaccagcctgggcaacatggtgaaatcctgtctgtaagagaaaaaaaaaagatatattacataatgtatttgcagcagacttattgtttgaaaactgtgaaattatttcaactgaaattatttgaaatttgtcttcatttatttcttttgaatacttggttatagcattgctaaagactaattgtaaagctaaaagccaaaagcaactgcactggatactttaagtttggattaaataaccgataattgatagttagaaaatagaatttaatgttccttttctcgatgaattaatttgtttgtcttccatttttaaaagcatgctgatcccattttcaatgaagaattgcttccagttactttgtaactgccaggtcccagcagctggctttaaaaaaacagtaaaaaatgggctcattttacagtcaatttccaatgatgtctatcaaaatctggctgtggaagactggatccatgaccatatgaatctagaaggcaaaccaattctattcttttggcagaattctccctctgttgtaattggtaggcatcaaaatccttggcaggaatgtaacctgaatctaatgagagaagaaggtataaaactggctcggagaagaagtggaggaggaacagtctaccatgatatgggtaatatcaatttgactttctttacaaccaaaaaaaagtatgatagaatggaaaatctgaaattaattgtgagagctctgaatgctgtccaaccccagctggatgtgcaggctaccaaaagatttgaccttttacttgatggacagtttaaaatctcaggaacagcttctaagatcggccggactactgcctatcaccattgcactttattatgtagtactgatgggacgttcctgtcttctttgctaaagagcccttaccaagggatcaggagcaatgccactgctagcataccttccttagtgaaaaatcttttggaaaaggatcccactctgacctgtgaagtactaatgaatgctgttgctacagagtatgctgcctatcatcaaattgataatcacattcacctaataaacccaacggatgagacactgtttcctggaataaatagcaaagccaaagaactgcaaacttgggagtggatatatggcaaaactccaaagtttagtataaatacttcctttcatgtgttatatgaacagtcacacttggaaattaaagtattcatagacataaagaatggaagaattgaaatttgtaatattgaagcacctgatcattggttgccattggaaatacgtgacaaattaaattcaagtcttattggcagtaagttttgcccaactgaaactaccatgctaacaaatatattacttagaacatgtccacaagaccacaaactaaacagtaaatggaatattctctgtgaaaaaattaagggaataatgtgattccaagtaaatgtcttaatacagtttcaattagaaaataaaatgtctcatacttgcacattgtatgtcaaaa

SEQ ID NO: 286981 - DNA, 646 bp, Homo sapiens
tggggcgactctagcaggatcttcaactacatcagactattccaagggatcaggagcaatgccactgctagcataccttccttagtgaaaaatcttttggaaaaggatcccactctgacctgtgaagtactaatgaatgctgttgctacagagtatgctgcctatcatcaaattgataatcacattcacctaataaacccaacggatgagacactgtttcctggaataaatagcaaagccaaagaactgcaaacttgggagtggatatatggcaaaactccaaagtttagtataaatacttcctttcatgtgttatatgaacagtcacacttggaaattaaagtattcatagacataaagaatggaagaattgaaatttgtaatattgaagcacctgatcattggttgccattggaaatacgtgacaaattaaattcaagtcttattggcagtaagttttgcccaactgaaactaccatgctaacaaatatattacttagaacatgtccacaagaccacaaactaaacagtaaatggaatattctctgtgaaaaaattaagggaataatgtgattccaagtaaatgtcttaatacagtttcaattagaaaataaaatgtctcatacttgcacattgtatgtcaaaa

SEQ ID NO: 286982 - DNA, 960 bp, Homo sapiens
cgggcccgttgcaagatggcggcggccatgctgggccccggggctgtgtgtgcgcagcgggcggcggcgcggcccggaaggctggcgcggcgacggcgttagcccggccctcggcccctctttgcggccgctccctccgcctattccctccttgctcgagatggatctgcccgtgggccccggcgcggcggggcccagcaacgtcccggccttcctgaccaagctgtggaccctcgtgagcgacccggacaccgacgcgctcatctgctggagcccgagcgggaacagcttccacgtgttcgaccagggccagtttgccaaggaggtgctgcccaagtacttcaagcacaacaacatggccagcttcgtgcggcagctcaacatgtatggcttccggaaagtggtccacatcgagcagggcggcctggtcaagccagagagagacgacacggagttccagcacccatgcttcctgcgtggccaggagcagctccttgagaacatcaagaggaaagtgaccagtgtgtccaccctgaagagtgaagacataaagatccgccaggacagcgtcaccaagctgctgacggacgtgcagctgatgaaggggaagcaggagtgcatggactccaagctcctggccatgaagcatgagaatgaggctctgtggcgggaggtggccagccttcggcagaagcatgcccagcaacagaaagtcgtcaacaagctcattcagttcctgatctcactggtgcagtcaaaccggatcctgggggtgaagagaaagatccccctgatgctgaacgacagtggctcagcacattccatgcccaagtatagccggcagttctccctggagcacgtccacggctcgggcccctactcggccctcccagctaagagtccgctttggcctgtgcgtggcgtctggccttttcgtcccggtgtctgggcctggcccgg

SEQ ID NO: 286983 - DNA, 799 bp, Homo sapiens
cgggcccgttgcaagatggcggcggccatgctgggccccggggctgtgtgtgcgcagcgggcggcggcgcggcccggaaggctggcgcggcgacggcgttagcccggccctcggcccctctttgcggccgctccctccgcctattccctccttgctcgagatggatctgcccgtgggccccggcgcggcggggcccagcaacgtcccggccttcctgaccaagctgtggaccctcgtgagcgacccggacaccgacgcgctcatctgctggagcccgagacggggttttgccatgttgcccaggccagtctccaactcctgagcttgagcaacccacccgcctcggcttcccaaagtgctgggaccgcaggcgtgaaccagcgcagccggctggaaaactggaactctcatcggttgagagtggcagctctggagctcggactcccccacctccccaggatttgtcattgctgctgtttgtcgtggttatctgtcaggtagcttttcggcactaattctgtaaaggttgcgttctttcttgtttatggccactgccgtctctgttcagttaactgagataggtggtgatggggcagaaatgttcttgaatgcctggggccagtgagtctcccgtcttttccgggggctgtgtgtgtgtgtgtgtgtgttggggacgccttcagcacttggccaggcagtggacaacccaactgtatgcctgacttcctgcttacacagagcctcaaggtcagccagaagtgagagctcggggctggctcaggtctttcctgagcacggg

SEQ ID NO: 286984 - DNA, 583 bp, Homo sapiens
cgggcccgttgcaagatggcggcggccatgctgggccccggggctgtgtgtgcgcagcgggcggcggcgcggcccggaaggctggcgcggcgacggcgttagcccggccctcggcccctctttgcggccgctccctccgcctattccctccttgctcgagatggatctgcccgtgggccccggcgcggcggggcccagcaacgtcccggccttcctgaccaagctgtggaccctcgtgagcgacccggacaccgacgcgctcatctgctggagcccgagcgggaacagcttccacgtgttcgaccagggccagtttgccaaggaggtgctgcccaagtacttcaagcacaacaacatggccagcttcgtgcggcagctcaacatgtgtgagtgctgcctccaggcagcgcaggggtgcgggaggcagacctgcagatggcgggaccccagcaggaggaccctgtgatgaaggacggggcgtcctgtgctggccaagggcatggcgtgggaccctgcaagcctgggggccggggagcagccgcctcttccatgggggagggtccttgtgggtatgaacctgggg

SEQ ID NO: 286985 - DNA, 2722 bp, Homo sapiens
cgggcccgttgcaagatggcggcggccatgctgggccccggggctgtgtgtgcgcagcgggcggcggcgcggcccggaaggctggcgcggcgacggcgttagcccggccctcggcccctctttgcggccgctccctccgcctattccctccttgctcgagatggatctgcccgtgggccccggcgcggcggggcccagcaacgtcccggccttcctgaccaagctgtggaccctcgtgagcgacccggacaccgacgcgctcatctgctggagcccgagcgggaacagcttccacgtgttcgaccagggccagtttgccaaggaggtgctgcccaagtacttcaagcacaacaacatggccagcttcgtgcggcagctcaacatgtatggcttccggaaagtggtccacatcgagcagggcggcctggtcaagccagagagagacgacacggagttccagcacccatgcttcctgcgtggccaggagcagctccttgagaacatcaagaggaaagtgaccagtgtgtccaccctgaagagtgaagacataaagatccgccaggacagcgtcaccaagctgctgacggacgtgcagctgatgaaggggaagcaggagtgcatggactccaagctcctggccatgaagcatgagaatgaggctctgtggcgggaggtggccagccttcggcagaagcatgcccagcaacagaaagtcgtcaacaagctcattcagttcctgatctcactggtgcagtcaaaccggatcctgggggtgaagagaaagatccccctgatgctgaacgacagtggctcagcacattccatgcccaagtatagccggcagttctccctggagcacgtccacggctcgggcccctactcggccccctccccagcctacagcagctccagcctctacgcccctgatgctgtggccagctctggacccatcatctccgacatcaccgagctggctcctgccagccccatggcctcccccggcgggagcatagacgagaggcccctatccagcagccccctggtgcgtgtcaaggaggagccccccagcccgcctcagagcccccgggtagaggaggcgagtcccgggcgcccatcttccgtggacaccctcttgtccccgaccgccctcattgactccatcctgcgggagagtgaacctgcccccgcctccgtcacagccctcacggacgccaggggccacacggacaccgagggccggcctccctcccccccgcccacctccacccctgaaaagtgcctcagcgtagcctgcctggacaagaatgagctcagtgaccacttggatgctatggactccaacctggataacctgcagaccatgctgagcagccacggcttcagcgtggacaccagtgccctgctggacctgttcagcccctcggtgaccgtgcccgacatgagcctgcctgaccttgacagcagcctggccagtatccaagagctcctgtctccccaggagccccccaggcctcccgaggcagagaacagcagcccggattcagggaagcagctggtgcactacacagcgcagccgctgttcctgctggaccccggctccgtggacaccgggagcaacgacctgccggtgctgtttgagctgggagagggctcctacttctccgaaggggacggcttcgccgaggaccccaccatctccctgctgacaggctcggagcctcccaaagccaaggaccccactgtctcctagaggccccggaggagctgggccagccgcccacccccacccccagtgcagggctggtcttggggaggcagggcagcctcgcggtcttgggcactggtgggtcggccgccatagccccagtaggacaaacgggctcgggtctgggcagcacctctggtcaggagggtcaccctggcctgccagtctgccttcccccaaccccgtgtcctgtggtttggttggggcttcacagccacacctggactgaccctgcaggttgttcatagtcagaattgtattttggatttttacacaactgtcccgttccccgctccacagagatacacagatatatacacacagtggatggacggacaagacaggcagagatctataaacagacaggctctatgaaaaaaaaaaaaaaaaaaaaaaaaaaaaaaaaaaaaaaaaaaaaaaaaaaaaaaaaataacaaaaaagggacaaaaaaatataagaagataaacagataatgtatgttgtgtacaaaatggtggggcctatatggtagaggtgtattattttatgtagagtgggtacttgggtacgttgtttttaataaaggtgtgagtactgtggataacagtgttagcgtgggaatcttttgtgtgagagaacccttaacttctggggggggggaaacaaataggttggggaaacaaattatacttatagaagaagatatttataaaggtgctcataaggggataaaattattaatactttttagaaagggggtttactaggggggtaaaaaccctgtgagcgtggaataatagatgctagtgacggccgttgacaaagatttgtggcctaataagtggggctattattatatttgtagtgaacaaatattgtttttatacggagagagaatgattgtgtgataataacggttgtgatcatcgaagaaaataatgatctttaccgagcaatacaagcagggtcatgtgttg

SEQ ID NO: 286986 - DNA, 2057 bp, Homo sapiens
cgggcccgttgcaagatggcggcggccatgctgggccccggggctgtgtgtgcgcagcgggcggcggcgcggcccggaaggctggcgcggcgacggcgttagcccggccctcggcccctctttgcggccgctccctccgcctattccctccttgctcgagatggatctgcccgtgggccccggcgcggcggggcccagcaacgtcccggccttcctgaccaagctgtggaccctcgtgagcgacccggacaccgacgcgctcatctgctggagcccgagcgggaacagcttccacgtgttcgaccagggccagtttgccaaggaggtgctgcccaagtacttcaagcacaacaacatggccagcttcgtgcggcagctcaacatgtatggcttccggaaagtggtccacatcgagcagggcggcctggtcaagccagagagagacgacacggagttccagcacccatgcttcctgcgtggccaggagcagctccttgagaacatcaagaggaaagtgaccagtgtgtccaccctgaagagtgaagacataaagatccgccaggacagcgtcaccaagctgctgacggacgtgcagctgatgaaggggaagcaggagtgcatggactccaagctcctggccatgaagcatgagaatgaggctctgtggcgggaggtggccagccttcggcagaagcatgcccagcaacagaaagtcgtcaacaagctcattcagttcctgatctcactggtgcagtcaaaccggatcctgggggtgaagagaaagatccccctgatgctgaacgacagtggctcagcacattccatgcccaagtatagccggcagttctccctggagcacgtccacggctcgggcccctactcggccccctccccagcctacagcagctccagcctctacgcccctgatgctgtggccagctctggacccatcatctccgacatcaccgagctggctcctgccagccccatggcctcccccggcgggagcatagacgagaggcctccgtcacagccctcacggacgccaggggccacacggacaccgagggccggcctccctcccccccgcccacctccacccctgaaaagtgcctcagcgtagcctgcctggacaatttggctcgcactccacagatgtctagggtcgcccgcctcttcccctgcccctcttcctctccgcatggccaagtccagccagggaatgagctcagtgaccacttggatgctatggactccaacctggataacctgcagaccatgctgagcagccacggcttcagcgtggacaccagtgccctgctggacctgttcagcccctcggtgaccgtgcccgacatgagcctgcctgaccttgacagcagcctggccagtatccaagagctcctgtctccccaggagccccccaggcctcccgaggcagagaacagcagcccggattcagggaagcagctggtgcactacacagcgcagccgctgttcctgctggaccccggctccgtggacaccgggagcaacgacctgccggtgctgtttgagctgggagagggctcctacttctccgaaggggacggcttcgccgaggaccccaccatctccctgctgacaggctcggagcctcccaaagccaaggaccccactgtctcctagaggccccggaggagctgggccagccgcccacccccacccccagtgcagggctggtcttggggaggcagggcagcctcgcggtcttgggcactggtgggtcggccgccatagccccagtaggacaaacgggctcgggtctgggcagcacctctggtcaggagggtcaccctggcctgccagtctgccttcccccaaccccgtgtcctgtggtttggttggggcttcacagccacacctggactgaccctgcaggttgttcatagtcagaattgtattttggatttttacacaactgtcccgttccccgctccacagagatacacagatatatacacacagtggatggacggacaagacaggcagagatctataaacagacaggctctatg

SEQ ID NO: 286987 - DNA, 2394 bp, Homo sapiens
cgggcccgttgcaagatggcggcggccatgctgggccccggggctgtgtgtgcgcagcgggcggcggcgcggcccggaaggctggcgcggcgacggcgttagcccggccctcggcccctctttgcggccgctccctccgcctattccctccttgctcgagatggatctgcccgtgggccccggcgcggcggggcccagcaacgtcccggccttcctgaccaagctgtggaccctcgtgagcgacccggacaccgacgcgctcatctgctggagcccgagcgggaacagcttccacgtgttcgaccagggccagtttgccaaggaggtgctgcccaagtacttcaagcacaacaacatggccagcttcgtgcggcagctcaacatgtatggcttccggaaagtggtccacatcgagcagggcggcctggtcaagccagagagagacgacacggagttccagcacccatgcttcctgcgtggccaggagcagctccttgagaacatcaagaggaaagtgaccagtgtgtccaccctgaagagtgaagacataaagatccgccaggacagcgtcaccaagctgctgacggacgtgcagctgatgaaggggaagcaggagtgcatggactccaagctcctggccatgaagcatgagaatgaggctctgtggcgggaggtggccagccttcggcagaagcatgcccagcaacagaaagtcgtcaacaagctcattcagttcctgatctcactggtgcagtcaaaccggatcctgggggtgaagagaaagatccccctgatgctgaacgacagtggctcagcacattccatgcccaagtatagccggcagttctccctggagcacgtccacggctcgggcccctactcggccccctccccagcctacagcagctccagcctctacgcccctgatgctgtggccagctctggacccatcatctccgacatcaccgagctggctcctgccagccccatggcctcccccggcgggagcatagacgagaggcccctatccagcagccccctggtgcgtgtcaaggaggagccccccagcccgcctcagagcccccgggtagaggaggcgagtcccgggcgcccatcttccgtggacaccctcttgtccccgaccgccctcattgactccatcctgcgggagagtgaacctgcccccgcctccgtcacagccctcacggacgccaggggccacacggacaccgagggccggcctccctcccccccgcccacctccacccctgaaaagtgcctcagcgtagcctgcctggacaagaatgagctcagtgaccacttggatgctatggactccaacctggataacctgcagaccatgctgagcagccacggcttcagcgtggacaccagtgccctgctggacctgttcagcccctcggtgaccgtgcccgacatgagcctgcctgaccttgacagcagcctggccagtatccaagagctcctgtctccccaggagccccccaggcctcccgaggcagagaacagcagcccggattcagggaagcagctggtgcactacacagcgcagccgctgttcctgctggaccccggctccgtggacaccgggagcaacgacctgccggtgctgtttgagctgggagagggctcctacttctccgaaggggacggcttcgccgaggaccccaccatctccctgctgacaggctcggagcctcccaaagccaaggaccccactgtctcctagaggccccggaggagctgggccagccgcccacccccacccccagtgcagggctggtcttggggaggcagggcagcctcgcggtcttgggcactggtgggtcggccgccatagccccagtaggacaaacgggctcgggtctgggcagcacctctggtcaggagggtcaccctggcctgccagtctgccttcccccaaccccgtgtcctgtggtttggttggggcttcacagccacacctggactgaccctgcaggttgttcatagtcagaattgtattttggatttttacacaactgtcccgttccccgctccacagagatacacagatatatacacacagtggatggacggacaagacaggcagagatctataaacagacaggctctatgaaaacaacaaatacatcataactatatatgagcagcacagtagatagcaagacgaaaacacggggggcggcatagacatctcgggggcacgattatcatcacctctttaaagggcacaagaggattataagcgcgcgacacacaggaggacggctggttgaagcccttcgttggcaccaccgtgtttttttgtgctcttgttcgttctcctgctgctcgcttagtctgccacatacgcaacgaagcatagagctc

SEQ ID NO: 286988 - DNA, 1735 bp, Homo sapiens
cgggcccgttgcaagatggcggcggccatgctgggccccggggctgtgtgtgcgcagcgggcggcggcgcggcccggaaggctggcgcggcgacggcgttagcccggccctcggcccctctttgcggccgctccctccgcctattccctccttgctcgagatggatctgcccgtgggccccggcgcggcggggcccagcaacgtcccggccttcctgaccaagctgtggaccctcgtgagcgacccggacaccgacgcgctcatctgctggagcccgagcgggaacagcttccacgtgttcgaccagggccagtttgccaaggaggtgctgcccaagtacttcaagcacaacaacatggccagcttcgtgcggcagctcaacatgtatggcttccggaaagtggtccacatcgagcagggcggcctggtcaagccagagagagacgacacggagttccagcacccatgcttcctgcgtggccaggagcagctccttgagaacatcaagaggaaagtgaccagtgtgtccaccctgaagagtgaagacataaagatccgccaggacagcgtcaccaagctgctgacggacgtgcagctgatgaaggggaagcaggagtgcatggactccaagctcctggccatgaagcatgagaatgaggctctgtggcgggaggtggccagccttcggcagaagcatgcccagcaacagaaagtcgtcaacaagctcattcagttcctgatctcactggtgcagtcaaaccggatcctgggggtgaagagaaagatccccctgatgctgaacgacagtggctcagcacattccatgcccaagtatagccggcagttctccctggagcacgtccacggctcgggcccctactcggccccctccccagcctacagcagctccagcctctacgcccctgatgctgtggccagctctggacccatcatctccgacatgagcctgcctgaccttgacagcagcctggccagtgtgcgtaggcgggcggggggtgagggggaacgagaccagcgggagtgctcacaataccgtctccaccccacagatccaagagctcctgtctccccaggagccccccaggcctcccgaggcagagaacagcagcccggattcagggaagcagctggtgcactacacagcgcagccgctgttcctgctggaccccggctccgtggacaccgggagcaacgacctgccggtgctgtttgagctgggagagggctcctacttctccgaaggggacggcttcgccgaggaccccaccatctccctgctgacaggctcggagcctcccaaagccaaggaccccactgtctcctagaggccccggaggagctgggccagccgcccacccccacccccagtgcagggctggtcttggggaggcagggcagcctcgcggtcttgggcactggtgggtcggccgccatagccccagtaggacaaacgggctcgggtctgggcagcacctctggtcaggagggtcaccctggcctgccagtctgccttcccccaaccccgtgtcctgtggtttggttggggcttcacagccacacctggactgaccctgcaggttgttcatagtcagaattgtattttggatttttacacaactgtcccgttccccgctccacagagatacacagatatatacacacagtggatggacggacaagacaggcagagatctataaacagacaggctctatg

SEQ ID NO: 286989 - DNA, 2209 bp, Homo sapiens
cgggcccgttgcaagatggcggcggccatgctgggccccggggctgtgtgtgcgcagcgggcggcggcgcggcccggaaggctggcgcggcgacggcgttagcccggccctcggcccctctttgcggccgctccctccgcctattccctccttgctcgagatggatctgcccgtgggccccggcgcggcggggcccagcaacgtcccggccttcctgaccaagctgtggaccctcgtgagcgacccggacaccgacgcgctcatctgctggagcccgagcgggaacagcttccacgtgttcgaccagggccagtttgccaaggaggtgctgcccaagtacttcaagcacaacaacatggccagcttcgtgcggcagctcaacatgtatggcttccggaaagtggtccacatcgagcagggcggcctggtcaagccagagagagacgacacggagttccagcacccatgcttcctgcgtggccaggagcagctccttgagaacatcaagaggaaagtgaccagtgtgtccaccctgaagagtgaagacataaagatccgccaggacagcgtcaccaagctgctgacggacgtgcagctgatgaaggggaagcaggagtgcatggactccaagctcctggccatgaagcatgagaatgaggctctgtggcgggaggtggccagccttcggcagaagcatgcccagcaacagaaagtcgtcaacaaggtgggggcagggccagagggccggcgggggccccacaagggccggggtaactgtgtcctctctctccacactcattcagttcctgatctcactggtgcagtcaaaccggatcctgggggtgaagagaaagatccccctgatgctgaacgacagtggctcagcacattccatgcccaagtatagccggcagttctccctggagcacgtccacggctcgggcccctactcggccccctccccagcctacagcagctccagcctctacgcccctgatgctgtggccagctctggacccatcatctccgacatcaccgagctggctcctgccagccccatggcctcccccggcgggagcatagacgagaggcccctatccagcagccccctggtgcgtgtcaaggaggagccccccagcccgcctcagagcccccgggtagaggaggcgagtcccgggcgcccatcttccgtggacaccctcttgtccccgaccgccctcattgactccatcctgcgggagagtgaacctgcccccgcctccgtcacagccctcacggacgccaggggccacacggacaccgagggccggcctccctcccccccgcccacctccacccctgaaaagtgcctcagcgtagcctgcctggacaagaatgagctcagtgaccacttggatgctatggactccaacctggataacctgcagaccatgctgagcagccacggcttcagcgtggacaccagtgccctgctggacctgttcagcccctcggtgaccgtgcccgacatgagcctgcctgaccttgacagcagcctggccagtatccaagagctcctgtctccccaggagccccccaggcctcccgaggcagagaacagcagcccggattcagggaagcagctggtgcactacacagcgcagccgctgttcctgctggaccccggctccgtggacaccgggagcaacgacctgccggtgctgtttgagctgggagagggctcctacttctccgaaggggacggcttcgccgaggaccccaccatctccctgctgacaggctcggagcctcccaaagccaaggaccccactgtctcctagaggccccggaggagctgggccagccgcccacccccacccccagtgcagggctggtcttggggaggcagggcagcctcgcggtcttgggcactggtgggtcggccgccatagccccagtaggacaaacgggctcgggtctgggcagcacctctggtcaggagggtcaccctggcctgccagtctgccttcccccaaccccgtgtcctgtggtttggttggggcttcacagccacacctggactgaccctgcaggttgttcatagtcagaattgtattttggatttttacacaactgtcccgttccccgctccacagagatacacagatatatacacacagtggatggacggacaagacaggcagagatctataaacagacaggctctatg

SEQ ID NO: 286990 - DNA, 2082 bp, Homo sapiens
  misc_feature (195)..(196): n is a, c, g, or t
cgggcccgttgcaagatggcggcggccatgctgggccccggggctgtgtgtgcgcagcgggcggcggcgcggcccggaaggctggcgcggcgacggcgttagcccggccctcggcccctctttgcggccgctccctccgcctattccctccttgctcgagatggatctgcccgtgggccccggcgcggcagccannacgtcccggccttcctggagcccgagcgggaacagcttccacgtgttcgaccagggccagtttgccaaggaggtgctgcccaagtacttcaagcacaacaacatggccagcttcgtgcggcagctcaacatgtatggcttccggaaagtggtccacatcgagcagggcggcctggtcaagccagagagagacgacacggagttccagcacccatgcttcctgcgtggccaggagcagctccttgagaacatcaagaggaaagtgaccagtgtgtccaccctgaagagtgaagacataaagatccgccaggacagcgtcaccaagctgctgacggacgtgcagctgatgaaggggaagcaggagtgcatggactccaagctcctggccatgaagcatgagaatgaggctctgtggcgggaggtggccagccttcggcagaagcatgcccagcaacagaaagtcgtcaacaagctcattcagttcctgatctcactggtgcagtcaaaccggatcctgggggtgaagagaaagatccccctgatgctgaacgacagtggctcagcacattccatgcccaagtatagccggcagttctccctggagcacgtccacggctcgggcccctactcggccccctccccagcctacagcagctccagcctctacgcccctgatgctgtggccagctctggacccatcatctccgacatcaccgagctggctcctgccagccccatggcctcccccggcgggagcatagacgagaggcccctatccagcagccccctggtgcgtgtcaaggaggagccccccagcccgcctcagagcccccgggtagaggaggcgagtcccgggcgcccatcttccgtggacaccctcttgtccccgaccgccctcattgactccatcctgcgggagagtgaacctgcccccgcctccgtcacagccctcacggacgccaggggccacacggacaccgagggccggcctccctcccccccgcccacctccacccctgaaaagtgcctcagcgtagcctgcctggacaagaatgagctcagtgaccacttggatgctatggactccaacctggataacctgcagaccatgctgagcagccacggcttcagcgtggacaccagtgccctgctggacctgttcagcccctcggtgaccgtgcccgacatgagcctgcctgaccttgacagcagcctggccagtatccaagagctcctgtctccccaggagccccccaggcctcccgaggcagagaacagcagcccggattcagggaagcagctggtgcactacacagcgcagccgctgttcctgctggaccccggctccgtggacaccgggagcaacgacctgccggtgctgtttgagctgggagagggctcctacttctccgaaggggacggcttcgccgaggaccccaccatctccctgctgacaggctcggagcctcccaaagccaaggaccccactgtctcctagaggccccggaggagctgggccagccgcccacccccacccccagtgcagggctggtcttggggaggcagggcagcctcgcggtcttgggcactggtgggtcggccgccatagccccagtaggacaaacgggctcgggtctgggcagcacctctggtcaggagggtcaccctggcctgccagtctgccttcccccaaccccgtgtcctgtggtttggttggggcttcacagccacacctggactgaccctgcaggttgttcatagtcagaattgtattttggatttttacacaactgtcccgttccccgctccacagagatacacagatatatacacacagtggatggacggacaagacaggcagagatctataaacagacaggctctatg

SEQ ID NO: 286991 - DNA, 2063 bp, Homo sapiens
cgggcccgttgcaagatggcggcggccatgctgggccccggggctgtgtgtgcgcagcgggcggcggcgcggcccggaaggctggcgcggcgacggcgttagcccggccctcggcccctctttgcggccgctccctccgcctattccctccttgctcgagatggatctgcccgtgggccccggcgcggcggggcccagcaacgtcccggccttcctgaccaagctgtggaccctcgtgagcgacccggacaccgacgcgctcatctgctggagcccgagcgggaacagcttccacgtgttcgaccagggccagtttgccaaggaggtgctgcccaagtacttcaagcacaacaacatggccagcttcgtgcggcagctcaacatgtatggcttccggaaagtggtccacatcgagcagggcggcctggtcaagccagagagagacgacacggagttccagcacccatgcttcctgcgtggccaggagcagctccttgagaacatcaagaggaaagtgaccagtgtgtccaccctgaagagtgaagacataaagatccgccaggacagcgtcaccaagctgctgacggacgtgcagctgatgaaggggaagcaggagtgcatggactccaagctcctggccatgaagcactcattcagttcctgatctcactggtgcagtcaaaccggatcctgggggtgaagagaaagatccccctgatgctgaacgacagtggctcagcacattccatgcccaagtatagccggcagttctccctggagcacgtccacggctcgggcccctactcggccccctccccagcctacagcagctccagcctctacgcccctgatgctgtggccagctctggacccatcatctccgacatcaccgagctggctcctgccagccccatggcctcccccggcgggagcatagacgagaggcccctatccagcagccccctggtgcgtgtcaaggaggagccccccagcccgcctcagagcccccgggtagaggaggcgagtcccgggcgcccatcttccgtggacaccctcttgtccccgaccgccctcattgactccatcctgcgggagagtgaacctgcccccgcctccgtcacagccctcacggacgccaggggccacacggacaccgagggccggcctccctcccccccgcccacctccacccctgaaaagtgcctcagcgtagcctgcctggacaagaatgagctcagtgaccacttggatgctatggactccaacctggataacctgcagaccatgctgagcagccacggcttcagcgtggacaccagtgccctgctggacctgttcagcccctcggtgaccgtgcccgacatgagcctgcctgaccttgacagcagcctggccagtatccaagagctcctgtctccccaggagccccccaggcctcccgaggcagagaacagcagcccggattcagggaagcagctggtgcactacacagcgcagccgctgttcctgctggaccccggctccgtggacaccgggagcaacgacctgccggtgctgtttgagctgggagagggctcctacttctccgaaggggacggcttcgccgaggaccccaccatctccctgctgacaggctcggagcctcccaaagccaaggaccccactgtctcctagaggccccggaggagctgggccagccgcccacccccacccccagtgcagggctggtcttggggaggcagggcagcctcgcggtcttgggcactggtgggtcggccgccatagccccagtaggacaaacgggctcgggtctgggcagcacctctggtcaggagggtcaccctggcctgccagtctgccttcccccaaccccgtgtcctgtggtttggttggggcttcacagccacacctggactgaccctgcaggttgttcatagtcagaattgtattttggatttttacacaactgtcccgttccccgctccacagagatacacagatatatacacacagtggatggacggacaagacaggcagagatctataaacagacaggctctatg

SEQ ID NO: 286992 - DNA, 1679 bp, Homo sapiens
ggctaggtagcgaggccgggtggttggagcgcccttgagaacatcaagaggaaagtgaccagtgtgtccaccctgaagagtgaagacataaagatccgccaggacagcgtcaccaagctgctgacggacgtgcagctgatgaaggggaagcaggagtgcatggactccaagctcctggccatgaagcatgagaatgaggctctgtggcgggaggtggccagccttcggcagaagcatgcccagcaacagaaagtcgtcaacaagctcattcagttcctgatctcactggtgcagtcaaaccggatcctgggggtgaagagaaagatccccctgatgctgaacgacagtggctcagcacattccatgcccaagtatagccggcagttctccctggagcacgtccacggctcgggcccctactcggccccctccccagcctacagcagctccagcctctacgcccctgatgctgtggccagctctggacccatcatctccgacatcaccgagctggctcctgccagccccatggcctcccccggcgggagcatagacgagaggcccctatccagcagccccctggtgcgtgtcaaggaggagccccccagcccgcctcagagcccccgggtagaggaggcgagtcccgggcgcccatcttccgtggacaccctcttgtccccgaccgccctcattgactccatcctgcgggagagtgaacctgcccccgcctccgtcacagccctcacggacgccaggggccacacggacaccgagggccggcctccctcccccccgcccacctccacccctgaaaagtgcctcagcgtagcctgcctggacaagaatgagctcagtgaccacttggatgctatggactccaacctggataacctgcagaccatgctgagcagccacggcttcagcgtggacaccagtgccctgctggacctgttcagcccctcggtgaccgtgcccgacatgagcctgcctgaccttgacagcagcctggccagtatccaagagctcctgtctccccaggagccccccaggcctcccgaggcagagaacagcagcccggattcagggaagcagctggtgcactacacagcgcagccgctgttcctgctggaccccggctccgtggacaccgggagcaacgacctgccggtgctgtttgagctgggagagggctcctacttctccgaaggggacggcttcgccgaggaccccaccatctccctgctgacaggctcggagcctcccaaagccaaggaccccactgtctcctagaggccccggaggagctgggccagccgcccacccccacccccagtgcagggctggtcttggggaggcagggcagcctcgcggtcttgggcactggtgggtcggccgccatagccccagtaggacaaacgggctcgggtctgggcagcacctctggtcaggagggtcaccctggcctgccagtctgccttcccccaaccccgtgtcctgtggtttggttggggcttcacagccacacctggactgaccctgcaggttgttcatagtcagaattgtattttggatttttacacaactgtcccgttccccgctccacagagatacacagatatatacacacagtggatggacggacaagacaggcagagatctataaacagacaggctctatg

SEQ ID NO: 286993 - DNA, 2066 bp, Homo sapiens
cgggcccgttgcaagatggcggcggccatgctgggccccggggctgtgtgtgcgcagcgggcggcggcgcggcccggaaggctggcgcggcgacggcgttagcccggccctcggcccctctttgcggccgctccctccgcctattccctccttgctcgagatggatctgcccgtgggccccggcgcggcggggcccagcaacgtcccggccttcctgaccaagctgtggaccctcgtgagcgacccggacaccgacgcgctcatctgctggagcccgagcgggaacagcttccacgtgttcgaccagggccagtttgccaaggaggtgctgcccaagtacttcaagcacaacaacatggccagcttcgtgcggcagctcaacatgtatggcttccggaaagtggtccacatcgacagctccttgagaacatcaagaggaaagtgaccagtgtgtccaccctgaagagtgaagacataaagatccgccaggacagcgtcaccaagctgctgacggacgtgcagctgatgaaggggaagcaggagtgcatggactccaagctcctggccatgaagcatgagaatgaggctctgtggcgggaggtggccagccttcggcagaagcatgcccagcaacagaaagtcgtcaacaagctcattcagttcctgatctcactggtgcagtcaaaccggatcctgggggtgaagagaaagatccccctgatgctgaacgacagtggctcagcacattccatgcccaagtatagccggcagttctccctggagcacgtccacggctcgggcccctactcggccccctccccagcctacagcagctccagcctctacgcccctgatgctgtggccagctctggacccatcatctccgacatcaccgagctggctcctgccagccccatggcctcccccggcgggagcatagacgagaggcccctatccagcagccccctggtgcgtgtcaaggaggagccccccagcccgcctcagagcccccgggtagaggaggcgagtcccgggcgcccatcttccgtggacaccctcttgtccccgaccgccctcattgactccatcctgcgggagagtgaacctgcccccgcctccgtcacagccctcacggacgccaggggccacacggacaccgagggccggcctccctcccccccgcccacctccacccctgaaaagtgcctcagcgtagcctgcctggacaagaatgagctcagtgaccacttggatgctatggactccaacctggataacctgcagaccatgctgagcagccacggcttcagcgtggacaccagtgccctgctggacctgttcagcccctcggtgaccgtgcccgacatgagcctgcctgaccttgacagcagcctggccagtatccaagagctcctgtctccccaggagccccccaggcctcccgaggcagagaacagcagcccggattcagggaagcagctggtgcactacacagcgcagccgctgttcctgctggaccccggctccgtggacaccgggagcaacgacctgccggtgctgtttgagctgggagagggctcctacttctccgaaggggacggcttcgccgaggaccccaccatctccctgctgacaggctcggagcctcccaaagccaaggaccccactgtctcctagaggccccggaggagctgggccagccgcccacccccacccccagtgcagggctggtcttggggaggcagggcagcctcgcggtcttgggcactggtgggtcggccgccatagccccagtaggacaaacgggctcgggtctgggcagcacctctggtcaggagggtcaccctggcctgccagtctgccttcccccaaccccgtgtcctgtggtttggttggggcttcacagccacacctggactgaccctgcaggttgttcatagtcagaattgtattttggatttttacacaactgtcccgttccccgctccacagagatacacagatatatacacacagtggatggacggacaagacaggcagagatctataaacagacaggctctatg

SEQ ID NO: 286994 - DNA, 1565 bp, Homo sapiens
gattcctagagcatcccatgtctggaaaaggggaagcaggagtgcatggactccaagctcctggccatgaagcatgagaatgaggctctgtggcgggaggtggccagccttcggcagaagcatgcccagcaacagaaagtcgtcaacaagctcattcagttcctgatctcactggtgcagtcaaaccggatcctgggggtgaagagaaagatccccctgatgctgaacgacagtggctcagcacattccatgcccaagtatagccggcagttctccctggagcacgtccacggctcgggcccctactcggccccctccccagcctacagcagctccagcctctacgcccctgatgctgtggccagctctggacccatcatctccgacatcaccgagctggctcctgccagccccatggcctcccccggcgggagcatagacgagaggcccctatccagcagccccctggtgcgtgtcaaggaggagccccccagcccgcctcagagcccccgggtagaggaggcgagtcccgggcgcccatcttccgtggacaccctcttgtccccgaccgccctcattgactccatcctgcgggagagtgaacctgcccccgcctccgtcacagccctcacggacgccaggggccacacggacaccgagggccggcctccctcccccccgcccacctccacccctgaaaagtgcctcagcgtagcctgcctggacaagaatgagctcagtgaccacttggatgctatggactccaacctggataacctgcagaccatgctgagcagccacggcttcagcgtggacaccagtgccctgctggacctgttcagcccctcggtgaccgtgcccgacatgagcctgcctgaccttgacagcagcctggccagtatccaagagctcctgtctccccaggagccccccaggcctcccgaggcagagaacagcagcccggattcagggaagcagctggtgcactacacagcgcagccgctgttcctgctggaccccggctccgtggacaccgggagcaacgacctgccggtgctgtttgagctgggagagggctcctacttctccgaaggggacggcttcgccgaggaccccaccatctccctgctgacaggctcggagcctcccaaagccaaggaccccactgtctcctagaggccccggaggagctgggccagccgcccacccccacccccagtgcagggctggtcttggggaggcagggcagcctcgcggtcttgggcactggtgggtcggccgccatagccccagtaggacaaacgggctcgggtctgggcagcacctctggtcaggagggtcaccctggcctgccagtctgccttcccccaaccccgtgtcctgtggtttggttggggcttcacagccacacctggactgaccctgcaggttgttcatagtcagaattgtattttggatttttacacaactgtcccgttccccgctccacagagatacacagatatatacacacagtggatggacggacaagacaggcagagatctataaacagacaggctctatg

SEQ ID NO: 286995 - DNA, 1611 bp, Homo sapiens
ggccagacatggtcacacttacccctgctcctgcatgggggacagggagggtctgtggggctccctcagccctggggctcatgggattgggccccactgacccagcctggtctgttgcagtgagaatgaggctctgtggcgggaggtggccagccttcggcagaagcatgcccagcaacagaaagtcgtcaacaagctcattcagttcctgatctcactggtgcagtcaaaccggatcctgggggtgaagagaaagatccccctgatgctgaacgacagtggctcagcacattccatgcccaagtatagccggcagttctccctggagcacgtccacggctcgggcccctactcggccccctccccagcctacagcagctccagcctctacgcccctgatgctgtggccagctctggacccatcatctccgacatcaccgagctggctcctgccagccccatggcctcccccggcgggagcatagacgagaggcccctatccagcagccccctggtgcgtgtcaaggaggagccccccagcccgcctcagagcccccgggtagaggaggcgagtcccgggcgcccatcttccgtggacaccctcttgtccccgaccgccctcattgactccatcctgcgggagagtgaacctgcccccgcctccgtcacagccctcacggacgccaggggccacacggacaccgagggccggcctccctcccccccgcccacctccacccctgaaaagtgcctcagcgtagcctgcctggacaagaatgagctcagtgaccacttggatgctatggactccaacctggataacctgcagaccatgctgagcagccacggcttcagcgtggacaccagtgccctgctggacctgttcagcccctcggtgaccgtgcccgacatgagcctgcctgaccttgacagcagcctggccagtatccaagagctcctgtctccccaggagccccccaggcctcccgaggcagagaacagcagcccggattcagggaagcagctggtgcactacacagcgcagccgctgttcctgctggaccccggctccgtggacaccgggagcaacgacctgccggtgctgtttgagctgggagagggctcctacttctccgaaggggacggcttcgccgaggaccccaccatctccctgctgacaggctcggagcctcccaaagccaaggaccccactgtctcctagaggccccggaggagctgggccagccgcccacccccacccccagtgcagggctggtcttggggaggcagggcagcctcgcggtcttgggcactggtgggtcggccgccatagccccagtaggacaaacgggctcgggtctgggcagcacctctggtcaggagggtcaccctggcctgccagtctgccttcccccaaccccgtgtcctgtggtttggttggggcttcacagccacacctggactgaccctgcaggttgttcatagtcagaattgtattttggatttttacacaactgtcccgttccccgctccacagagatacacagatatatacacacagtggatggacggacaagacaggcagagatctataaacagacaggctctatg

SEQ ID NO: 286996 - DNA, 1511 bp, Homo sapiens
attgctgctagttgactctagagtatcccagctctggaaaagggggtggccagccttcggcagaagcatgcccagcaacagaaagtcgtcaacaagctcattcagttcctgatctcactggtgcagtcaaaccggatcctgggggtgaagagaaagatccccctgatgctgaacgacagtggctcagcacattccatgcccaagtatagccggcagttctccctggagcacgtccacggctcgggcccctactcggccccctccccagcctacagcagctccagcctctacgcccctgatgctgtggccagctctggacccatcatctccgacatcaccgagctggctcctgccagccccatggcctcccccggcgggagcatagacgagaggcccctatccagcagccccctggtgcgtgtcaaggaggagccccccagcccgcctcagagcccccgggtagaggaggcgagtcccgggcgcccatcttccgtggacaccctcttgtccccgaccgccctcattgactccatcctgcgggagagtgaacctgcccccgcctccgtcacagccctcacggacgccaggggccacacggacaccgagggccggcctccctcccccccgcccacctccacccctgaaaagtgcctcagcgtagcctgcctggacaagaatgagctcagtgaccacttggatgctatggactccaacctggataacctgcagaccatgctgagcagccacggcttcagcgtggacaccagtgccctgctggacctgttcagcccctcggtgaccgtgcccgacatgagcctgcctgaccttgacagcagcctggccagtatccaagagctcctgtctccccaggagccccccaggcctcccgaggcagagaacagcagcccggattcagggaagcagctggtgcactacacagcgcagccgctgttcctgctggaccccggctccgtggacaccgggagcaacgacctgccggtgctgtttgagctgggagagggctcctacttctccgaaggggacggcttcgccgaggaccccaccatctccctgctgacaggctcggagcctcccaaagccaaggaccccactgtctcctagaggccccggaggagctgggccagccgcccacccccacccccagtgcagggctggtcttggggaggcagggcagcctcgcggtcttgggcactggtgggtcggccgccatagccccagtaggacaaacgggctcgggtctgggcagcacctctggtcaggagggtcaccctggcctgccagtctgccttcccccaaccccgtgtcctgtggtttggttggggcttcacagccacacctggactgaccctgcaggttgttcatagtcagaattgtattttggatttttacacaactgtcccgttccccgctccacagagatacacagatatatacacacagtggatggacggacaagacaggcagagatctataaacagacaggctctatg

SEQ ID NO: 286997 - DNA, 1553 bp, Homo sapiens
attgctgctagttgactctagagtatcccagctctggaaaagggggtggccagccttcggcagaagcatgcccagcaacagaaagtcgtcaacaagctcattcagttcctgatctcactggtgcagtcaaaccggatcctgggggtgaagagaaagatccccctgatgctgaacgacagtggctcagcacattccatgcccaagtatagccggcagttctccctggagcacgtccacggctcgggcccctactcggccccctccccagcctacagcagctccagcctctacgcccctgatgctgtggccagctctggacccatcatctccgacatcaccgagctggctcctgccagccccatggcctcccccggcgggagcatagacgagagggtgggggccgcatcagcccagccatcctgtcccccaatgaggcccctatccagcagccccctggtgcgtgtcaaggaggagccccccagcccgcctcagagcccccgggtagaggaggcgagtcccgggcgcccatcttccgtggacaccctcttgtccccgaccgccctcattgactccatcctgcgggagagtgaacctgcccccgcctccgtcacagccctcacggacgccaggggccacacggacaccgagggccggcctccctcccccccgcccacctccacccctgaaaagtgcctcagcgtagcctgcctggacaagaatgagctcagtgaccacttggatgctatggactccaacctggataacctgcagaccatgctgagcagccacggcttcagcgtggacaccagtgccctgctggacctgttcagcccctcggtgaccgtgcccgacatgagcctgcctgaccttgacagcagcctggccagtatccaagagctcctgtctccccaggagccccccaggcctcccgaggcagagaacagcagcccggattcagggaagcagctggtgcactacacagcgcagccgctgttcctgctggaccccggctccgtggacaccgggagcaacgacctgccggtgctgtttgagctgggagagggctcctacttctccgaaggggacggcttcgccgaggaccccaccatctccctgctgacaggctcggagcctcccaaagccaaggaccccactgtctcctagaggccccggaggagctgggccagccgcccacccccacccccagtgcagggctggtcttggggaggcagggcagcctcgcggtcttgggcactggtgggtcggccgccatagccccagtaggacaaacgggctcgggtctgggcagcacctctggtcaggagggtcaccctggcctgccagtctgccttcccccaaccccgtgtcctgtggtttggttggggcttcacagccacacctggactgaccctgcaggttgttcatagtcagaattgtattttggatttttacacaactgtcccgttccccgctccacagagatacacagatatatacacacagtggatggacggacaagacaggcagagatctataaacagacaggctctatg

SEQ ID NO: 286998 - DNA, 424 bp, Homo sapiens
accccgagtgccgcgagaggcccgggtgccgctagaggccccggaggagctgggccagccgcccacccccacccccagtgcagggctggtcttggggaggcagggcagcctcgcggtcttgggcactggtgggtcggccgccatagccccagtaggacaaacgggctcgggtctgggcagcacctctggtcaggagggtcaccctggcctgccagtctgccttcccccaaccccgtgtcctgtggtttggttggggcttcacagccacacctggactgaccctgcaggttgttcatagtcagaattgtattttggatttttacacaactgtcccgttccccgctccacagagatacacagatatatacacacagtggatggacggacaagacaggcagagatctataaacagacaggctctatg

SEQ ID NO: 286999 - DNA, 2139 bp, Homo sapiens
cgggcccgttgcaagatggcggcggccatgctgggccccggggctgtgtgtgcgcagcgggcggcggcgcggcccggaaggctggcgcggcgacggcgttagcccggccctcggcccctctttgcggccgctccctccgcctattccctccttgctcgagatggatctgcccgtgggccccggcgcggcggggcccagcaacgtcccggccttcctgaccaagctgtggaccctcgtgagcgacccggacaccgacgcgctcatctgctggagcccgagcgggaacagcttccacgtgttcgaccagggccagtttgccaaggaggtgctgcccaagtacttcaagcacaacaacatggccagcttcgtgcggcagctcaacatgtatggcttccggaaagtggtccacatcgagcagggcggcctggtcaagccagagagagacgacacggagttccagcacccatgcttcctgcgtggccaggagcagctccttgagaacatcaagaggaaagtgaccagtgtgtccaccctgaagagtgaagacataaagatccgccaggacagcgtcaccaagctgctgacggacgtgcagctgatgaaggggaagcaggagtgcatggactccaagctcctggccatgaagcatgagaatgaggctctgtggcgggaggtggccagccttcggcagaagcatgcccagcaacagaaagtcgtcaacaagctcattcagttcctgatctcactggtgcagtcaaaccggatcctgggggtgaagagaaagatccccctgatgctgaacgacagtggctcagcacattccatgcccaagtatagccggcagttctccctggagcacgtccacggctcgggcccctactcggccccctccccagcctacagcagctccagcctctacgcccctgatgctgtggccagctctggacccatcatctccgacatcaccgagctggctcctgccagccccatggcctcccccggcgggagcatagacgagaggcccctatccagcagccccctggtgcgtgtcaaggaggagccccccagcccgcctcagagcccccgggtagaggaggcgagtcccgggcgcccatcttccgtggacaccctcttgtccccgaccgccctcattgactccatcctgcgggagagtgaacctgcccccgcctccgtcacagccctcacggacgccaggggccacacggacaccgagggccggcctccctcccccccgcccacctccacccctgaaaagtgcctcagcgtagcctgcctggacaagaatgagctcagtgaccacttggatgctatggactccaacctggataacctgcagaccatgctgagcagccacggcttcagcgtggacaccagtgccctgctggacctgttcagcccctcggtgaccgtgcccgacatgagcctgcctgaccttgacagcagcctggccagtatccaagagctcctgtctccccaggagccccccaggcctcccgaggcagagaacagcagcccggattcagggaagcagctggtgcactacacagcgcagccgctgttcctgctggaccccggctccgtggacaccgggagcaacgacctgccggtgctgtttgagctgggagagggctcctacttctccgaaggggacggcttcgccgaggaccccaccatctccctgctgacaggctcggagcctcccaaagccaaggaccccactgtctcctagaggccccggaggagctgggccagccgcccacccccacccccagtgcagggctggtcttggggaggcagggcagcctcgcggtcttgggcactggtgggtcggccgccatagccccagtaggacaaacgggctcgggtctgggcagcacctctggtcaggagggtcaccctggcctgccagtctgccttcccccaaccccgtgtcctgtggtttggttggggcttcacagccacacctggactgaccctgcaggttgttcatagtcagaattgtattttggatttttacacaactgtcccgttccccgctccacagagatacacagatatatacacacagtggatggacggacaagacaggcagagatctataaacagacaggctctatg

SEQ ID NO: 287000 - DNA, 1611 bp, Homo sapiens
  misc_feature (631)..(631): n is a, c, g, or t
ggtttattagtggttgccgcgtgattctgtgacttctcgctcgttagcgcacgcctcctcatcgtgcttttttttctgtcgccgcctcgcctgctttcatttatcttatctgcctgtctgcgtgtttgtttctccccgcccgcctcttctgtacctccctctctggtgagtgtcttggcgtttgttttgttcctccctgcgcggaggccgtggtgttgtcatgagtatcggcctctcgtgtgcggggtgagtgtgtgggtgttgcgtgcctcatattgtgttggctgccgccccctccccggtgggggtgggtggtcctgtgttcatcacgtgtggtttctgcctctgttgggctgttgttgtctcccgctcgccgcccgtggtttgtgttaaaggtggcgtgccgcgcgtgccgcgctgtttattttatcatcccctccttctgtgggccccgctggttcgcaaaaaacgctggtcgtggtatattgggggccctcctgcgggtgggatctttttggtgccgccccccctccttttttttttttttttgtttttttttttgtcttttttttttttttttttttttttttttttttttttttttttttttttttttttttttttttttttnttttgttgttcatagtcagaattgtattttggatttttacacaactgtcccgttccccgctccacagagatacacagatatatacacacagtggatggacggacaagacaggcagagatctataaacagacaggctctatggctatggcctccatgtgtttcctctgtcccagggtggtgcggtgggtggtgctgcaatgaggaggggcccagggcacagaagggccgggctgcagtggcctcctgggggaagacggatgcttgcagctagctccgtgcctgcccgactccccaggaccagcatgtgcttgcagttctttattgagggaccaggggtgggcgcctcaccttggccctgggggtctctggttgtcacaggaccaccaggaacccccttcccaaggtgttcgcactcggacaggtgatgcggggcgggcacactgtctttctgccagagccagcaccctgtgtaggcacggggaacgggagcctgtcccgtagctttagggttctccactcagcctggtggaggaagggaagggggcctgcgctgggcagtggagcaggctttgctgctttatctggcagcaacagtttgttctcgagctccactggccaactgatagggagaggcacaggagcccatgtgggatggaggagtcggccccacacccatccccccaccaggagctcacccactactgccatcctcagcagggcccaaggagatgcctccatctcagggcccaccagcccccactggggtagagggaggataccaccaagggagcccaccctcccctcacaccaccagttcagcaggttgctgatgaggcccctggtgcagtcctgggaccctgtgcagggcctcctcaaacacctgccttgttgggccatagctgcaggtctggggacaccagggcctggtccagtcttggggtctttaatcaagcagtcaccccagcaaggtaaggcagcag

SEQ ID NO: 287001 - DNA, 2181 bp, Homo sapiens
cgggcccgttgcaagatggcggcggccatgctgggccccggggctgtgtgtgcgcagcgggcggcggcgcggcccggaaggctggcgcggcgacggcgttagcccggccctcggcccctctttgcggccgctccctccgcctattccctccttgctcgagatggatctgcccgtgggccccggcgcggcggggcccagcaacgtcccggccttcctgaccaagctgtggaccctcgtgagcgacccggacaccgacgcgctcatctgctggagcccgagcgggaacagcttccacgtgttcgaccagggccagtttgccaaggaggtgctgcccaagtacttcaagcacaacaacatggccagcttcgtgcggcagctcaacatgtatggcttccggaaagtggtccacatcgagcagggcggcctggtcaagccagagagagacgacacggagttccagcacccatgcttcctgcgtggccaggagcagctccttgagaacatcaagaggaaagtgaccagtgtgtccaccctgaagagtgaagacataaagatccgccaggacagcgtcaccaagctgctgacggacgtgcagctgatgaaggggaagcaggagtgcatggactccaagctcctggccatgaagcatgagaatgaggctctgtggcgggaggtggccagccttcggcagaagcatgcccagcaacagaaagtcgtcaacaagctcattcagttcctgatctcactggtgcagtcaaaccggatcctgggggtgaagagaaagatccccctgatgctgaacgacagtggctcagcacattccatgcccaagtatagccggcagttctccctggagcacgtccacggctcgggcccctactcggccccctccccagcctacagcagctccagcctctacgcccctgatgctgtggccagctctggacccatcatctccgacatcaccgagctggctcctgccagccccatggcctcccccggcgggagcatagacgagagggtgggggccgcatcagcccagccatcctgtcccccaatgaggcccctatccagcagccccctggtgcgtgtcaaggaggagccccccagcccgcctcagagcccccgggtagaggaggcgagtcccgggcgcccatcttccgtggacaccctcttgtccccgaccgccctcattgactccatcctgcgggagagtgaacctgcccccgcctccgtcacagccctcacggacgccaggggccacacggacaccgagggccggcctccctcccccccgcccacctccacccctgaaaagtgcctcagcgtagcctgcctggacaagaatgagctcagtgaccacttggatgctatggactccaacctggataacctgcagaccatgctgagcagccacggcttcagcgtggacaccagtgccctgctggacctgttcagcccctcggtgaccgtgcccgacatgagcctgcctgaccttgacagcagcctggccagtatccaagagctcctgtctccccaggagccccccaggcctcccgaggcagagaacagcagcccggattcagggaagcagctggtgcactacacagcgcagccgctgttcctgctggaccccggctccgtggacaccgggagcaacgacctgccggtgctgtttgagctgggagagggctcctacttctccgaaggggacggcttcgccgaggaccccaccatctccctgctgacaggctcggagcctcccaaagccaaggaccccactgtctcctagaggccccggaggagctgggccagccgcccacccccacccccagtgcagggctggtcttggggaggcagggcagcctcgcggtcttgggcactggtgggtcggccgccatagccccagtaggacaaacgggctcgggtctgggcagcacctctggtcaggagggtcaccctggcctgccagtctgccttcccccaaccccgtgtcctgtggtttggttggggcttcacagccacacctggactgaccctgcaggttgttcatagtcagaattgtattttggatttttacacaactgtcccgttccccgctccacagagatacacagatatatacacacagtggatggacggacaagacaggcagagatctataaacagacaggctctatg

SEQ ID NO: 287002 - DNA, 1973 bp, Homo sapiens
cgggcccgttgcaagatggcggcggccatgctgggccccggggctgtgtgtgcgcagcgggcggcggcgcggcccggaaggctggcgcggcgacggcgttagcccggccctcggcccctctttgcggccgctccctccgcctattccctccttgctcgagatggatctgcccgtgggccccggcgcggcggggcccagcaacgtcccggccttcctgaccaagctgtggaccctcgtgagcgacccggacaccgacgcgctcatctgctggagcccgagcgggaacagcttccacgtgttcgaccagggccagtttgccaaggaggtgctgcccaagtacttcaagcacaacaacatggccagcttcgtgcggcagctcaacatgtatggcttccggaaagtggtccacatcgagcagggcggcctggtcaagccagagagagacgacacggagttccagcacccatgcttcctgcgtggccaggagcagctccttgagaacatcaagaggaaagtgaccagtgtgtccaccctgaagagtgaagacataaagatccgccaggacagcgtcaccaagctgctgacggacgtgcagctgatgaaggggaagcaggagtgcatggactccaagctcctggccatgaagcatgagaatgaggctctgtggcgggaggtggccagccttcggcagaagcatgcccagcaacagaaagtcgtcaacaagctcattcagttcctgatctcactggtgcagtcaaaccggatcctgggggtgaagagaaagatccccctgatgctgaacgacagtggctcagcacattccatgcccaagtatagccggcagttctccctggagcacgtccacggctcgggcccctactcggccccctccccagcctacagcagctccagcctctacgcccctgatgctgtggccagctctggacccatcatctccgacatcaccgagctggctcctgccagccccatggcctcccccggcgggagcatagacgagaggcctccgtcacagccctcacggacgccaggggccacacggacaccgagggccggcctccctcccccccgcccacctccacccctgaaaagtgcctcagcgtagcctgcctggacaagaatgagctcagtgaccacttggatgctatggactccaacctggataacctgcagaccatgctgagcagccacggcttcagcgtggacaccagtgccctgctggacctgttcagcccctcggtgaccgtgcccgacatgagcctgcctgaccttgacagcagcctggccagtatccaagagctcctgtctccccaggagccccccaggcctcccgaggcagagaacagcagcccggattcagggaagcagctggtgcactacacagcgcagccgctgttcctgctggaccccggctccgtggacaccgggagcaacgacctgccggtgctgtttgagctgggagagggctcctacttctccgaaggggacggcttcgccgaggaccccaccatctccctgctgacaggctcggagcctcccaaagccaaggaccccactgtctcctagaggccccggaggagctgggccagccgcccacccccacccccagtgcagggctggtcttggggaggcagggcagcctcgcggtcttgggcactggtgggtcggccgccatagccccagtaggacaaacgggctcgggtctgggcagcacctctggtcaggagggtcaccctggcctgccagtctgccttcccccaaccccgtgtcctgtggtttggttggggcttcacagccacacctggactgaccctgcaggttgttcatagtcagaattgtattttggatttttacacaactgtcccgttccccgctccacagagatacacagatatatacacacagtggatggacggacaagacaggcagagatctataaacagacaggctctatg

SEQ ID NO: 287003 - DNA, 2978 bp, Homo sapiens
cgggcccgttgcaagatggcggcggccatgctgggccccggggctgtgtgtgcgcagcgggcggcggcgcggcccggaaggctggcgcggcgacggcgttagcccggccctcggcccctctttgcggccgctccctccgcctattccctccttgctcgagatggatctgcccgtgggccccggcgcggcggggcccagcaacgtcccggccttcctgaccaagctgtggaccctcgtgagcgacccggacaccgacgcgctcatctgctggagcccgagcgggaacagcttccacgtgttcgaccagggccagtttgccaaggaggtgctgcccaagtacttcaagcacaacaacatggccagcttcgtgcggcagctcaacatgtatggcttccggaaagtggtccacatcgagcagggcggcctggtcaagccagagagagacgacacggagttccagcacccatgcttcctgcgtggccaggagcagctccttgagaacatcaagaggaaagtgaccagtgtgtccaccctgaagagtgaagacataaagatccgccaggacagcgtcaccaagctgctgacggacgtgcagctgatgaaggggaagcaggagtgcatggactccaagctcctggccatgaagcatgagaatgaggctctgtggcgggaggtggccagccttcggcagaagcatgcccagcaacagaaagtcgtcaacaagctcattcagttcctgatctcactggtgcagtcaaaccggatcctgggggtgaagagaaagatccccctgatgctgaacgacagtggctcagcacattccatgcccaagtatagccggcagttctccctggagcacgtccacggctcgggcccctactcggccccctccccagcctacagcagctccagcctctacgcccctgatgctgtggccagctctggacccatcatctccgacatcaccgagctggctcctgccagccccatggcctcccccggcgggagcatagacgagaggcccctatccagcagccccctggtgcgtgtcaaggaggagccccccagcccgcctcagagcccccgggtagaggaggcgagtcccgggcgcccatcttccgtggacaccctcttgtccccgaccgccctcattgactccatcctgcgggagagtgaacctgcccccgcctccgtcacagccctcacggacgccaggggccacacggacaccgagggccggcctccctcccccccgcccacctccacccctgaaaagtgcctcagcgtagcctgcctggacaagaatgagctcagtgaccacttggatgctatggactccaacctggataacctgcagaccatgctgagcagccacggcttcagcgtggacaccagtgccctgctggacctgttcagcccctcggtgaccgtgcccgacatgagcctgcctgaccttgacagcagcctggccagtatccaagagctcctgtctccccaggagccccccaggcctcccgaggcagagaacagcagcccggattcagggaagcagctggtgcactacacagcgcagccgctgttcctgctggaccccggctccgtggacaccgggagcaacgacctgccggtgctgtttgagctgggagagggctcctacttctccgaaggggacggcttcgccgaggaccccaccatctccctgctgacaggctcggagcctcccaaagccaaggaccccactgtctcctagaggccccggaggagctgggccagccgcccacccccacccccagtgcagggctggtcttggggaggcagggcagcctcgcggtcttgggcactggtgggtcggccgccatagccccagtaggacaaacgggctcgggtctgggcagcacctctggtcaggagggtcaccctggcctgccagtctgccttcccccaaccccgtgtcctgtggtttggttggggcttcacagccacacctggactgaccctgcaggttgttcatagtcagaattgtattttggatttttacacaactgtcccgttccccgctccacagagatacacagatatatacacacagtggatggacggacaagacaggcagagatctataaacagacaggctctatggctatggcctccatgtgtttcctctgtcccagggtggtgcggtgggtggtgctgcaatgaggaggggcccagggcacagaagggccgggctgcagtggcctcctgggggaagacggatgcttgcagctagctccgtgcctgcccgactccccaggaccagcatgtgcttgcagttctttattgagggaccaggggtgggcgcctcaccttggccctgggggtctctggttgtcacaggaccaccaggaacccccttcccaaggtgttcgcactcggacaggtgatgcggggcgggcacactgtctttctgccagagccagcaccctgtgtaggcacggggaacgggagcctgtcccgtagctttagggttctccactcagcctggtggaggaagggaagggggcctgcgctgggcagtggagcaggctttgctgctttatctggcagcaacagtttgttctcgagctccactggccaactgatagggagaggcacaggagcccatgtgggatggaggagtcggccccacacccatccccccaccaggagctcacccactactgccatcctcagcagggcccaaggagatgcctccatctcagggcccaccagcccccactggggtagagggaggataccaccaagggagcccaccctcccctcacaccaccagttcagcaggttgctgatgaggcccctggtgcagtcctgggaccctgtgcagggcctcctcaaacacctgccttgttgggccatagctgcaggtctggggacaccagggcctggtccagtcttggggtctttaatcaagcagtcaccccagcaaggtaaggcagcag

SEQ ID NO: 287004 - DNA, 2043 bp, Homo sapiens
tgcggccgcaaagaggggccgagggccgggctaacgccgtcgccgcgccagccttccgggccgcgccgccgcccgctgcgcacacacagccccggggcccagcaacgtcccggccttcctgaccaagctgtggaccctcgtgagcgacccggacaccgacgcgctcatctgctggagcccgagcgggaacagcttccacgtgttcgaccagggccagtttgccaaggaggtgctgcccaagtacttcaagcacaacaacatggccagcttcgtgcggcagctcaacatgtatggcttccggaaagtggtccacatcgagcagggcggcctggtcaagccagagagagacgacacggagttccagcacccatgcttcctgcgtggccaggagcagctccttgagaacatcaagaggaaagtgaccagtgtgtccaccctgaagagtgaagacataaagatccgccaggacagcgtcaccaagctgctgacggacgtgcagctgatgaaggggaagcaggagtgcatggactccaagctcctggccatgaagcatgagaatgaggctctgtggcgggaggtggccagccttcggcagaagcatgcccagcaacagaaagtcgtcaacaagctcattcagttcctgatctcactggtgcagtcaaaccggatcctgggggtgaagagaaagatccccctgatgctgaacgacagtggctcagcacattccatgcccaagtatagccggcagttctccctggagcacgtccacggctcgggcccctactcggccccctccccagcctacagcagctccagcctctacgcccctgatgctgtggccagctctggacccatcatctccgacatcaccgagctggctcctgccagccccatggcctcccccggcgggagcatagacgagaggcccctatccagcagccccctggtgcgtgtcaaggaggagccccccagcccgcctcagagcccccgggtagaggaggcgagtcccgggcgcccatcttccgtggacaccctcttgtccccgaccgccctcattgactccatcctgcgggagagtgaacctgcccccgcctccgtcacagccctcacggacgccaggggccacacggacaccgagggccggcctccctcccccccgcccacctccacccctgaaaagtgcctcagcgtagcctgcctggacaagaatgagctcagtgaccacttggatgctatggactccaacctggataacctgcagaccatgctgagcagccacggcttcagcgtggacaccagtgccctgctggacctgttcagcccctcggtgaccgtgcccgacatgagcctgcctgaccttgacagcagcctggccagtatccaagagctcctgtctccccaggagccccccaggcctcccgaggcagagaacagcagcccggattcagggaagcagctggtgcactacacagcgcagccgctgttcctgctggaccccggctccgtggacaccgggagcaacgacctgccggtgctgtttgagctgggagagggctcctacttctccgaaggggacggcttcgccgaggaccccaccatctccctgctgacaggctcggagcctcccaaagccaaggaccccactgtctcctagaggccccggaggagctgggccagccgcccacccccacccccagtgcagggctggtcttggggaggcagggcagcctcgcggtcttgggcactggtgggtcggccgccatagccccagtaggacaaacgggctcgggtctgggcagcacctctggtcaggagggtcaccctggcctgccagtctgccttcccccaaccccgtgtcctgtggtttggttggggcttcacagccacacctggactgaccctgcaggttgttcatagtcagaattgtattttggatttttacacaactgtcccgttccccgctccacagagatacacagatatatacacacagtggatggacggacaagacaggcagagatctataaacagacaggctctatg

SEQ ID NO: 287005 - DNA, 2395 bp, Homo sapiens
cgggcccgttgcaagatggcggcggccatgctgggccccggggctgtgtgtgcgcagcgggcggcggcgcggcccggaaggctggcgcggcgacggcgttagcccggccctcggcccctctttgcggccgctccctccgcctattccctccttgctcgagatggatctgcccgtgggccccggcgcggcggggcccagcaacgtcccggccttcctgaccaagctgtggaccctcgtgagcgacccggacaccgacgcgctcatctgctggagcccgttgcctggcagcaggcttgtttacatggtccgaccctgcaagaccggacagctccggtttgcagaagtaaatcagtgattgtctggagttggagatcagaatctgctgttcacatcccggctgtgacgtcgtgtccgaccgagtcttgctctgtcacccaggttggagtgcagtggtgcgatctcggctcactgcgacctccacctcccgggttcaagcaattctgcctcagcctcccgagtagccaggactacagagcgggaacagcttccacgtgttcgaccagggccagtttgccaaggaggtgctgcccaagtacttcaagcacaacaacatggccagcttcgtgcggcagctcaacatgtatggcttccggaaagtggtccacatcgagcagggcggcctggtcaagccagagagagacgacacggagttccagcacccatgcttcctgcgtggccaggagcagctccttgagaacatcaagaggaaagtgaccagtgtgtccaccctgaagagtgaagacataaagatccgccaggacagcgtcaccaagctgctgacggacgtgcagctgatgaaggggaagcaggagtgcatggactccaagctcctggccatgaagcatgagaatgaggctctgtggcgggaggtggccagccttcggcagaagcatgcccagcaacagaaagtcgtcaacaagctcattcagttcctgatctcactggtgcagtcaaaccggatcctgggggtgaagagaaagatccccctgatgctgaacgacagtggctcagcacattccatgcccaagtatagccggcagttctccctggagcacgtccacggctcgggcccctactcggccccctccccagcctacagcagctccagcctctacgcccctgatgctgtggccagctctggacccatcatctccgacatcaccgagctggctcctgccagccccatggcctcccccggcgggagcatagacgagaggcccctatccagcagccccctggtgcgtgtcaaggaggagccccccagcccgcctcagagcccccgggtagaggaggcgagtcccgggcgcccatcttccgtggacaccctcttgtccccgaccgccctcattgactccatcctgcgggagagtgaacctgcccccgcctccgtcacagccctcacggacgccaggggccacacggacaccgagggccggcctccctcccccccgcccacctccacccctgaaaagtgcctcagcgtagcctgcctggacaagaatgagctcagtgaccacttggatgctatggactccaacctggataacctgcagaccatgctgagcagccacggcttcagcgtggacaccagtgccctgctggacctgttcagcccctcggtgaccgtgcccgacatgagcctgcctgaccttgacagcagcctggccagtatccaagagctcctgtctccccaggagccccccaggcctcccgaggcagagaacagcagcccggattcagggaagcagctggtgcactacacagcgcagccgctgttcctgctggaccccggctccgtggacaccgggagcaacgacctgccggtgctgtttgagctgggagagggctcctacttctccgaaggggacggcttcgccgaggaccccaccatctccctgctgacaggctcggagcctcccaaagccaaggaccccactgtctcctagaggccccggaggagctgggccagccgcccacccccacccccagtgcagggctggtcttggggaggcagggcagcctcgcggtcttgggcactggtgggtcggccgccatagccccagtaggacaaacgggctcgggtctgggcagcacctctggtcaggagggtcaccctggcctgccagtctgccttcccccaaccccgtgtcctgtggtttggttggggcttcacagccacacctggactgaccctgcaggttgttcatagtcagaattgtattttggatttttacacaactgtcccgttccccgctccacagagatacacagatatatacacacagtggatggacggacaagacaggcagagatctataaacagacaggctctatg

SEQ ID NO: 287006 - DNA, 1307 bp, Homo sapiens
cgggcccgttgcaagatggcggcggccatgctgggccccggggctgtgtgtgcgcagcgggcggcggcgcggcccggaaggctggcgcggcgacggcgttagcccggccctcggcccctctttgcggccgctccctccgcctattccctccttgctcgagatggatctgcccgtgggccccggcgcggcggggcccagcaacgtcccggccttcctgaccaagctgtggaccctcgtgagcgacccggacaccgacgcgctcatctgctggagcccgagcgggaacagcttccacgtgttcgaccagggccagtttgccaaggaggtgctgcccaagtacttcaagcacaacaacatggccagcttcgtgcggcagctcaacatgtatggcttccggaaagtggtccacatcgagcagggcggcctggtcaagccagagagagacgacacggagttccagcacccatgcttcctgcgtggccaggagcagctccttgagaacatcaagaggaaagtgaccagtgtgtccaccctgaagagtgaagacataaagatccgccaggacagcgtcaccaagctgctgacggacgtgcagctgatgaaggggaagcaggagtgcatggactccaagctcctggccatgaagcatgagaatgaggctctgtggcgggaggtggccagccttcggcagaagcatgcccagcaacagaaagtcgtcaacaagctcattcagttcctgatctcactggtgcagtcaaaccggatcctgggggtgaagagaaagatccccctgatgctgaacgacagtggctcagcacattccatgcccaagtatagccggcagttctccctggagcacgtccacggctcgggcccctactcggccccctccccagcctacagcagctccagcctctacgcccctgatgctgtggccagctctggacccatcatctccgacatcaccgagctggctcctgccagccccatggcctcccccggcgggagcatagacgagaggcccctatccagcagccccctggtgcgtgtcaaggaggagcctgaccagcaccatggcggttggcaagaacaagcgccttacgaaaggcggcaaaaagggagccaagaagaaacgtggttgatccatttttctaagaaagatgggtatgatgtgaaagcacctgctatgttcaatataagaaatattgggaaagacgctcgtcaacaggacccaaggaaccaaaattggatctgatggtctcaagggtcgtgtgttcgaagtgagtcttgctgatttggcagaactc

SEQ ID NO: 287007 - DNA, 1052 bp, Homo sapiens
cgggcccgttgcaagatggcggcggccatgctgggccccggggctgtgtgtgcgcagcgggcggcggcgcggcccggaaggctggcgcggcgacggcgttagcccggccctcggcccctctttgcggccgctccctccgcctattccctccttgctcgagatggatctgcccgtgggccccggcgcggcggggcccagcaacgtcccggccttcctgaccaagctgtggaccctcgtgagcgacccggacaccgacgcgctcatctgctggagcccgagcgggaacagcttccacgtgttcgaccagggccagtttgccaaggaggtgctgcccaagtacttcaagcacaacaacatggccagcttcgtgcggcagctcaacatgtatggcttccggaaagtggtccacatcgagcagggcggcctggtcaagccagagagagacgacacggagttccagcacccatgcttcctgcgtggccaggagcagctccttgagaacatcaagaggaaagtgaccagtgtgtccaccctgaagagtgaagacataaagatccgccaggacagcgtcaccaagctgctgacggacgtgcagctgatgaaggggaagcaggagtgcatggactccaagctcctggccatgaagcatgagaatgaggctctgtggcgggaggtggccagccttcggcagaagcatgcccagcaacagaaagtcgtcaacaagctcattcagttcctgatctcactggtgcagtcaaaccggatcctgggggtgaagagaaagatccccctgatgctgaacgacagtggctcagcacattccatgcccaagtatagccggcagttctccctggagcacgtccacggctcgggcccctactcggccccctccccagcctacagcagctccagcctctacgcccctgatgctgtggccagctctggacccatcatctccgacatcaccgagctggctcctgccagccccatggcctcccccggcgggagcatagacgagagacgcgcctaatgggatcctctagatcgcctca

SEQ ID NO: 287008 - DNA, 1645 bp, Homo sapiens
gcgtggtcggcgggaattttgggatcagtgtgtccaccctgaagagtgaagacataaagatccgccaggacagcgtcaccaagctgctgacggacgtgcagctgatgaaggggaagcaggagtgcatggactccaagctcctggccatgaagcatgagaatgaggctctgtggcgggaggtggccagccttcggcagaagcatgcccagcaacagaaagtcgtcaacaagctcattcagttcctgatctcactggtgcagtcaaaccggatcctgggggtgaagagaaagatccccctgatgctgaacgacagtggctcagcacattccatgcccaagtatagccggcagttctccctggagcacgtccacggctcgggcccctactcggccccctccccagcctacagcagctccagcctctacgcccctgatgctgtggccagctctggacccatcatctccgacatcaccgagctggctcctgccagccccatggcctcccccggcgggagcatagacgagaggcccctatccagcagccccctggtgcgtgtcaaggaggagccccccagcccgcctcagagcccccgggtagaggaggcgagtcccgggcgcccatcttccgtggacaccctcttgtccccgaccgccctcattgactccatcctgcgggagagtgaacctgcccccgcctccgtcacagccctcacggacgccaggggccacacggacaccgagggccggcctccctcccccccgcccacctccacccctgaaaagtgcctcagcgtagcctgcctggacaagaatgagctcagtgaccacttggatgctatggactccaacctggataacctgcagaccatgctgagcagccacggcttcagcgtggacaccagtgccctgctggacctgttcagcccctcggtgaccgtgcccgacatgagcctgcctgaccttgacagcagcctggccagtatccaagagctcctgtctccccaggagccccccaggcctcccgaggcagagaacagcagcccggattcagggaagcagctggtgcactacacagcgcagccgctgttcctgctggaccccggctccgtggacaccgggagcaacgacctgccggtgctgtttgagctgggagagggctcctacttctccgaaggggacggcttcgccgaggaccccaccatctccctgctgacaggctcggagcctcccaaagccaaggaccccactgtctcctagaggccccggaggagctgggccagccgcccacccccacccccagtgcagggctggtcttggggaggcagggcagcctcgcggtcttgggcactggtgggtcggccgccatagccccagtaggacaaacgggctcgggtctgggcagcacctctggtcaggagggtcaccctggcctgccagtctgccttcccccaaccccgtgtcctgtggtttggttggggcttcacagccacacctggactgaccctgcaggttgttcatagtcagaattgtattttggatttttacacaactgtcccgttccccgctccacagagatacacagatatatacacacagtggatggacggacaagacaggcagagatctataaacagacaggctctatg

SEQ ID NO: 287009 - DNA, 1692 bp, Homo sapiens
ctcctgtcctctcggaaatcccagttgtccaccccctgctcctgcatgggggacagggagggtctgtggggctccctcagccctggggctcatgggattgggccccactgacccagcctggtctgttgcagtgagaatgaggctctgtggcgggaggtggccagccttcggcagaagcatgcccagcaacagaaagtcgtcaacaaggtgggggcagggccagagggccggcgggggccccacaagggccggggtaactgtgtcctctctctccacactcattcagttcctgatctcactggtgcagtcaaaccggatcctgggggtgaagagaaagatccccctgatgctgaacgacagtggctcagcacattccatgcccaagtatagccggcagttctccctggagcacgtccacggctcgggcccctactcggccccctccccagcctacagcagctccagcctctacgcccctgatgctgtggccagctctggacccatcatctccgacatcaccgagctggctcctgccagccccatggcctcccccggcgggagcatagacgagaggcccctatccagcagccccctggtgcgtgtcaaggaggagccccccagcccgcctcagagcccccgggtagaggaggcgagtcccgggcgcccatcttccgtggacaccctcttgtccccgaccgccctcattgactccatcctgcgggagagtgaacctgcccccgcctccgtcacagccctcacggacgccaggggccacacggacaccgagggccggcctccctcccccccgcccacctccacccctgaaaagtgcctcagcgtagcctgcctggacaagaatgagctcagtgaccacttggatgctatggactccaacctggataacctgcagaccatgctgagcagccacggcttcagcgtggacaccagtgccctgctggacctgttcagcccctcggtgaccgtgcccgacatgagcctgcctgaccttgacagcagcctggccagtatccaagagctcctgtctccccaggagccccccaggcctcccgaggcagagaacagcagcccggattcagggaagcagctggtgcactacacagcgcagccgctgttcctgctggaccccggctccgtggacaccgggagcaacgacctgccggtgctgtttgagctgggagagggctcctacttctccgaaggggacggcttcgccgaggaccccaccatctccctgctgacaggctcggagcctcccaaagccaaggaccccactgtctcctagaggccccggaggagctgggccagccgcccacccccacccccagtgcagggctggtcttggggaggcagggcagcctcgcggtcttgggcactggtgggtcggccgccatagccccagtaggacaaacgggctcgggtctgggcagcacctctggtcaggagggtcaccctggcctgccagtctgccttcccccaaccccgtgtcctgtggtttggttggggcttcacagccacacctggactgaccctgcaggttgttcatagtcagaattgtattttggatttttacacaactgtcccgttccccgctccacagagatacacagatatatacacacagtggatggacggacaagacaggcagagatctataaacagacaggctctatg

SEQ ID NO: 287010 - DNA, 1523 bp, Homo sapiens
ctggcggtgatggtcagctctgtcatgaagcatgagaatgaggctctgtggcgggaggtggccagccttcggcagaagcatgcccagcaacagaaagtcgtcaacaagctcattcagttcctgatctcactggtgcagtcaaaccggatcctgggggtgaagagaaagatccccctgatgctgaacgacagtggctcagcacattccatgcccaagtatagccggcagttctccctggagcacgtccacggctcgggcccctactcggccccctccccagcctacagcagctccagcctctacgcccctgatgctgtggccagctctggacccatcatctccgacatcaccgagctggctcctgccagccccatggcctcccccggcgggagcatagacgagaggcccctatccagcagccccctggtgcgtgtcaaggaggagccccccagcccgcctcagagcccccgggtagaggaggcgagtcccgggcgcccatcttccgtggacaccctcttgtccccgaccgccctcattgactccatcctgcgggagagtgaacctgcccccgcctccgtcacagccctcacggacgccaggggccacacggacaccgagggccggcctccctcccccccgcccacctccacccctgaaaagtgcctcagcgtagcctgcctggacaagaatgagctcagtgaccacttggatgctatggactccaacctggataacctgcagaccatgctgagcagccacggcttcagcgtggacaccagtgccctgctggacctgttcagcccctcggtgaccgtgcccgacatgagcctgcctgaccttgacagcagcctggccagtatccaagagctcctgtctccccaggagccccccaggcctcccgaggcagagaacagcagcccggattcagggaagcagctggtgcactacacagcgcagccgctgttcctgctggaccccggctccgtggacaccgggagcaacgacctgccggtgctgtttgagctgggagagggctcctacttctccgaaggggacggcttcgccgaggaccccaccatctccctgctgacaggctcggagcctcccaaagccaaggaccccactgtctcctagaggccccggaggagctgggccagccgcccacccccacccccagtgcagggctggtcttggggaggcagggcagcctcgcggtcttgggcactggtgggtcggccgccatagccccagtaggacaaacgggctcgggtctgggcagcacctctggtcaggagggtcaccctggcctgccagtctgccttcccccaaccccgtgtcctgtggtttggttggggcttcacagccacacctggactgaccctgcaggttgttcatagtcagaattgtattttggatttttacacaactgtcccgttccccgctccacagagatacacagatatatacacacagtggatggacggacaagacaggcagagatctataaacagacaggctctatg

SEQ ID NO: 287011 - DNA, 1664 bp, Homo sapiens
  misc_feature (200)..(200): n is a, c, g, or t
gcaggcggcgaagatggcggagaacagcggtcgcgccggcaagagcagcgggagggcgcgggggagggggcggtgtccgcagagcaggtgattgctggcttcaaccgccttcggcaggaacagcgaggcctggcatccaaagcagctgagttggagatggagttgaatgagcacagcctagtgatcgatacactgaaggnggtagatgaaactcgtaagtgctaccgcatggttgggggggtgctggtggagcgaactgtcaaagaggtgctgcccgctttggagaacaacaaggagcagatacagaagatccccctgatgctgaacgacagtggctcagcacattccatgcccaagtatagccggcagttctccctggagcacgtccacggctcgggcccctactcggccccctccccagcctacagcagctccagcctctacgcccctgatgctgtggccagctctggacccatcatctccgacatcaccgagctggctcctgccagccccatggcctcccccggcgggagcatagacgagaggcccctatccagcagccccctggtgcgtgtcaaggaggagccccccagcccgcctcagagcccccgggtagaggaggcgagtcccgggcgcccatcttccgtggacaccctcttgtccccgaccgccctcattgactccatcctgcgggagagtgaacctgcccccgcctccgtcacagccctcacggacgccaggggccacacggacaccgagggccggcctccctcccccccgcccacctccacccctgaaaagtgcctcagcgtagcctgcctggacaagaatgagctcagtgaccacttggatgctatggactccaacctggataacctgcagaccatgctgagcagccacggcttcagcgtggacaccagtgccctgctggacctgttcagcccctcggtgaccgtgcccgacatgagcctgcctgaccttgacagcagcctggccagtatccaagagctcctgtctccccaggagccccccaggcctcccgaggcagagaacagcagcccggattcagggaagcagctggtgcactacacagcgcagccgctgttcctgctggaccccggctccgtggacaccgggagcaacgacctgccggtgctgtttgagctgggagagggctcctacttctccgaaggggacggcttcgccgaggaccccaccatctccctgctgacaggctcggagcctcccaaagccaaggaccccactgtctcctagaggccccggaggagctgggccagccgcccacccccacccccagtgcagggctggtcttggggaggcagggcagcctcgcggtcttgggcactggtgggtcggccgccatagccccagtaggacaaacgggctcgggtctgggcagcacctctggtcaggagggtcaccctggcctgccagtctgccttcccccaaccccgtgtcctgtggtttggttggggcttcacagccacacctggactgaccctgcaggttgttcatagtcagaattgtattttggatttttacacaactgtcccgttccccgctccacagagatacacagatatatacacacagtggatggacggacaagacaggcagagatctataaacagacaggctctatg

SEQ ID NO: 287012 - DNA, 753 bp, Homo sapiens
cgggcccgttgcaagatggcggcggccatgctgggccccggggctgtgtgtgcgcagcgggcggcggcgcggcccggaaggctggcgcggcgacggcgttagcccggccctcggcccctctttgcggccgctccctccgcctattccctccttgctcgagatggatctgcccgtgggccccggcgcggcggggcccagcaacgtcccggccttcctgaccaagctgtggaccctcgtgagcgacccggacaccgacgcgctcatctgctggagcccgagcgggaacagcttccacgtgttcgaccagggccagtttgccaaggaggtgctgcccaagtacttcaagcacaacaacatggccagcttcgtgcggcagctcaacatgtatggcttccggaaagtggtccacatcgagcagggcggcctggtcaagccagagagagacgacacggagttccagcacccatgcttcctgcgtggccaggagcagctccttgagaacatcaagaggaaagtgaccagtgtgtccaccctgaagagtgaagacataaagatccgccaggacagcgtcaccaagctgctgacggacgtgcagctgatgaaggggaagcaggagtgcatggactccaagctcctggccatgaagcagtaggtcccacaccagcattatgggccacagcgggtcctggcgcccaccaagaggccccgggtgctgtgggggcagggccctgaccggggccaggtgctcagctc

SEQ ID NO: 287013 - DNA, 903 bp, Homo sapiens
cgcctggatctgcatccgggtccgtgggattcgcgctccactggtcagctggggtcgctctcgggtggttgggtgttgcttgttcccgctgttccagcgtcgaagaaccattgggtctgccgggagtacacctttaggatgctataaaaaactaatagaatatcataagaatggacacctttcttttaaatatgtgaagacctttaatatggatgaatatgtaggacttccaagaaatcatcctgaaagctaccattcttatatgtggaataatttttttaagcatatcgatatagatcctaataatgcacatatccttgacgggaatgctgcagatttacaagcagaatgtgatgcttttgaaaacaaaataaaagaagctggaggaatagatctttttgttggaggaattggtccagatggtcatatcgctttcaatgagcctggatccagtttagtgtcaaggacaagattaaagactctagcaatggataccatcttggcaaatgccaaatattttgatggagatttatcaaaagtgccaactatggctctaactgttggtgtggggacagtgatggatgctagagaagtaatgatccttataacaggggcacacaaggcatttgccctgtacaaagcaatagaagaaggagtcaatcacatgtggactgtttccgctttccagcagcatccccggactatttttgtatgcgatgaagatgctactttagaattaagagttaaaactgtgaaatactttaaagctaatgcatgtgccaataacttgtgggttcctattcgttgagatgggacggagggccagggcaaacatcctgttgacacggcttttcaaggggcaaacatcccgcgctcggcacacggcgcgagaggcgtttcagg

SEQ ID NO: 287014 - DNA, 3003 bp, Homo sapiens
gctagcctgccttaaaccaacccaccctggttccaacccgtcccccccttttatgtaaaaccaaccatcgcccggttcctggaccctagccattcacttaaccacgggccccccccacacaaatgtttaaaaactctttccaaagcccaagcccccaacaaatttttttttttttttttttttgcagtacgtggggatttgttttattcattctcgcttttcatttttgctttttaaatagaacagctttgatttttagtatatgacatcatcatcatgaatttttttctcttactttgtatttaggctccacctcagtagtttgacaaaggtagaatgagttcattttgagtcaaaaccataaaagttactttgtatagacattggttagaatctgtgacatttaacctttcttctggtaacgtttcaggaagtctggtgcatttttatcagaagaattatttctgtttgacttaagtagcaattatttatttatataaaattcgtatgtagaaagttgtcagtttttacctaaagtcacagtaaatatttgacttaatatctaaaaagcaattaatagaattttcaaaataattatttctagtttggaagcagtcctatttgatgtataaaagatatatccaatgtaaagaaaaaaattttataaaggagttgaatttttaatatttactgatattttaatttgcatgtattttaaagctctgtgtattctttccgtaatcaaagttgttagcaaatgacagatgaatactatttaagtagaaaaatgatcctctacaaagtgatactctggaaaatgttgcatcttctaaatcatacagctgatattacccttatctttgttgtcccctctcctactggacatgaagtttcaggtgaccttcaagtaggctgttgagcagttgcaggactagtgaatggaatgcttcccccttccctcctttagagtcccattcttatggttagaatttctcctactacacaaacacttcccagtactctttgcttgtcccttaaaagtgggtctttctcaaagctgggattttagagtcctttttgcagcctttctgacaaggaacatctgtttactaacaagcaacctatctctccaatccagtaatcccatttcctgcaaaaccgcattaagtgcctttccccaccctcccatgttcttaatacctggaaaacttaactcatttctttaccctccaaaatataaaatctctggttcattaactgggtcagtctttttagaacttttttctccccaaagaaatatagtactgaggcattaaaacaggagtaactggaagatcagctatttcccaagcagcttccatagctaagagcagtctgcaagtatatgtaccaattacaaaatgaaagttataatctaccggatttaaaatcgtaatttctattctgaattaaatgatttaatacaggttgttttctgtcttgttttagtaaccctccctcagtgtagaatttgtaatcaacctttgtcataaatacacatgccaaactattggaaagtaatttaccagacgaatggatagggtaatgtattaagagtgagacagcagttctgagcccctggctggagtctagtagaggaactgccagaggatcaatatcaacatagacttttagatataattaaaacctattatctaagtcagtattcaaatttgtcatgcttaatctctttgaagacaagaaatgctcttctggttactcccaaagtacctgtacacattctagatctgcactgttacataattataaattggtatttgctaggtagataaaacttaagacattctgaaacatttctatttgtactttttcaataaacttgactatatcaagatgggaactaaacaggcttactgtgtcttataaaaaatactttgttgtctaaagtaaatgagatagttcaaaattaataaaaacaactagaactgtgctttttttctttaaggtctaatgcatgtgcacaataaacttgtggatccactattcagtatgaaagatggaaactgaaggagactggagcaaaattcagcttgaatgaacagagcactttttactaagtagtagatgaattttcagctatgcaatatgacaaaacatggggaattttgaagattgtcattttttcattcgagtctctatgttaaacattccatattttgaatatttatatcttgtacttgggtttaagagaagtagctggctctcaagattgactggctatttattataaagtactgaagtcacatagccacctataaaacagcatagaaatgtctgcctgtttaaaaagtcattttaaaggtagagtgtccacatcaggcaccatttgtgatatgactccagtggcatatatttcattttttaatgacaagacactccaaacctttcagataacaaactatcattgcagaccttcacttttggaatgcaatctttatattttctgtgcatcacacacatgcttttctgcacgtggttgccttagtcatcttcctacagcaccatctagacatcaaaaattgtgctatatatcattggtaaaggaaatttgaagagatgacagtgcctaaaagtacagtttacatccttttggaaagtatgtgtaagtgcatgttttttgtgcaccttcttctatagcacttttttacaaatatcttatttttatttaacgacttgggttcatgtccctaatataagtatcttgacaattatgagctttatacctagcaagccacttcaggaaattcttttggagaatattttctgattattgttaaacttaatatacaattagctttattccttataaaatgtctaaaagaataatacgaagtatatataaaaggaattactgtaaactacattgccatagcaatttacataaaagtatattgttttctatctttaactcaaataaagcgtgtaataaataagttatctaaa

SEQ ID NO: 287015 - DNA, 2420 bp, Homo sapiens
cgcctggatctgcatccgggtccgtgggattcgcgctccactggtcagctggggtcgctctcgggtggttgggtgttgcttgttcccgctgttccagcgtcgaagaaccattgggtctgccggtttgaacttgttctggaagctgtgcgtcaccgtaatgaggcttgtaattcttgataactatgacttggctagtgaatgggcagccaaatacatctgtaatcgcatcattcagttcaaacctggacaggacagatattttacactgggtttaccaacagggagtacacctttaggatgctataaaaaactaatagaatatcataagaatggacacctttcttttaaatatgtgaagacctttaatatggatgaatatgtaggacttccaagaaatcatcctgaaagctaccattcttatatgtggaataatttttttaagcatatcgatatagatcctaataatgcacatatccttgacgggaatgctgcagatttacaagcagaatgtgatgcttttgaaaacaaaataaaagaagctggaggaatagatctttttgttggaggaattggtccagatggtcatatcgctttcaatgagcctggatccagtttagtgtcaaggacaagattaaagactctagcaatggataccatcttggcaaatgccaaatattttgatggagatttatcaaaagtgccaactatggctctaactgttggtgtggggacagtgatggatgctagagaagtaatgatccttataacaggggcacacaaggcatttgccctgtacaaagcaatagaagaaggagtcaatcacatgtggactgtttccgctttccagcagcatccccggactatttttgtatgcgatgaagatgctactttagaattaagagttaaaactgtgaaatactttaaaggtctaatgcatgtgcacaataaacttgtggatccactattcagtatgaaagatggaaactgaaggagactggagcaaaattcagcttgaatgaacagagcactttttactaagtagtagatgaattttcagctatgcaatatgacaaaacatggggaattttgaagattgtcattttttcattcgagtctctatgttaaacattccatattttgaatatttatatcttgtacttgggtttaagagaagtagctggctctcaagattgactggctatttattataaagtactgaagtcacatagccacctataaaacagcatagaaatgtctgcctgtttaaaaagtcattttaaaggtagagtgtccacatcaggcaccatttgtgatatgactccagtggcatatatttcattttttaatgacaagacactccaaacctttcagataacaaactatcattgcagaccttcacttttggaatgcaatctttatattttctgtgcatcacacacatgcttttctgcacgtggttgccttagtcatcttcctacagcaccatctagacatcaaaaattgtgctatatatcattggtaaaggaaatttgaagagatgacagtgcctaaaagtacagtttacatccttttggaaagtatgtgtaagtgcatgttttttgtgcaccttcttctatagcacttttttacaaatatcttatttttatttaacgacttgggttcatgtccctaatataagtatcttgacaattatgagctttatacctagcaagccacttcaggaaattcttttggagaatattttctgattattgttaaacttaatatacaattagctttattccttataaaatgtctaaaagaataatacgaagtatatataaaaggaattactgtaaactacattgccatagcaatttacataaaagtatattgttttctatctttaactcaaataaagcgtgtaataaataagttatctaaatttccagaagtgaacctgaagaatacatgcattcgactcccaacaattatagtacatgtgaacctgcattcattttgggtttgttaccatcatgcattaggagagttaggttaaaagatgtctttgcctctgtggggagcaaaaaaatgctccttttgcttattttgcatttcataagcccacctggtagaagaagccttacttatctgcttgtctatgtgattaaaatgtagtttcttaaaatattaaaatagcaaataaattaatgaaataaaattggtaatagggttttatggttaaaagtgggggatggggtaaattatgctgctttaattccagatgatgttttaatagccttataaatgttttttaaataactagtgagtaacactccacttacacttccagtaataagaatcatttactacaaactatgctgactaccttagaaagtcatacagcatcacagtgaaaaagctaaaggtacctgttgtgc

SEQ ID NO: 287016 - DNA, 1765 bp, Homo sapiens
cgcctggatctgcatccgggtccgtgggattcgcgctccactggtcagctggggtcgctctcgggtggttgggtgttgcttgttcccgctgttccagcgtcgaagaaccattgggtctgccgggagtacacctttaggatgctataaaaaactaatagaatatcataagaatggacacctttcttttaaatatgtgaagacctttaatatggatgaatatgtaggacttccaagaaatcatcctgaaagctaccattcttatatgtggaataatttttttaagcatatcgatatagatcctaataatgcacatatccttgacgggaatgctgcagatttacaagcagaatgtgatgcttttgaaaacaaaataaaagaagctggaggaatagatctttttgttggaggaattggtccagatggtcatatcgctttcaatgagcctggatccagtttagtgtcaaggacaagattaaagactctagcaatggataccatcttggcaaatgccaaatattttgatggagatttatcaaaagtgccaactatggctctaactgttggtgtggggacagtgatggatgctagagaagtaatgatccttataacaggggcacacaaggcatttgccctgtacaaagcaatagaagaaggagtcaatcacatgtggactgtttccgctttccagcagcatccccggactatttttgtatgcgatgaagatgctactttagaattaagagttaaaactgtgaaatactttaaaggtctaatgcatgtgcacaataaacttgtggatccactattcagtatgaaagatggaaactgaaggagactggagcaaaattcagcttgaatgaacagagcactttttactaagtagtagatgaattttcagctatgcaatatgacaaaacatggggaattttgaagattgtcattttttcattcgagtctctatgttaaacattccatattttgaatatttatatcttgtacttgggtttaagagaagtagctggctctcaagattgactggctatttattataaagtactgaagtcacatagccacctataaaacagcatagaaatgtctgcctgtttaaaaagtcattttaaaggtagagtgtccacatcaggcaccatttgtgatatgactccagtggcatatatttcattttttaatgacaagacactccaaacctttcagataacaaactatcattgcagaccttcacttttggaatgcaatctttatattttctgtgcatcacacacatgcttttctgcacgtggttgccttagtcatcttcctacagcaccatctagacatcaaaaattgtgctatatatcattggtaaaggaaatttgaagagatgacagtgcctaaaagtacagtttacatccttttggaaagtatgtgtaagtgcatgttttttgtgcaccttcttctatagcacttttttacaaatatcttatttttatttaacgacttgggttcatgtccctaatataagtatcttgacaattatgagctttatacctagcaagccacttcaggaaattcttttggagaatattttctgattattgttaaacttaatatacaattagctttattccttataaaatgtctaaaagaataatacgaagtatatataaaaggaattactgtaaactacattgccatagcaatttacataaaagtatattgttttctatctttaactcaaataaagcgtgtaataaataagttatctaaa

SEQ ID NO: 287017 - DNA, 1009 bp, Homo sapiens
  misc_feature (79)..(80): n is a, c, g, or t
aaatttaacttccctaaagggataaaccttcggccggtccattttttttttgaataaaaattagtatgtaaaatatatnntattttttttttcagcttgaatgaacagagcactttttactaagtagtagatgaattttcagctatgcaatatgacaaaacatggggaattttgaagattgtcattttttcattcgagtctctatgttaaacattccatattttgaatatttatatcttgtacttgggtttaagagaagtagctggctctcaagattgactggctatttattataaagtactgaagtcacatagccacctataaaacagcatagaaatgtctgcctgtttaaaaagtcattttaaaggtagagtgtccacatcaggcaccatttgtgatatgactccagtggcatatatttcattttttaatgacaagacactccaaacctttcagataacaaactatcattgcagaccttcacttttggaatgcaatctttatattttctgtgcatcacacacatgcttttctgcacgtggttgccttagtcatcttcctacagcaccatctagacatcaaaaattgtgctatatatcattggtaaaggaaatttgaagagatgacagtgcctaaaagtacagtttacatccttttggaaagtatgtgtaagtgcatgttttttgtgcaccttcttctatagcacttttttacaaatatcttatttttatttaacgacttgggttcatgtccctaatataagtatcttgacaattatgagctttatacctagcaagccacttcaggaaattcttttggagaatattttctgattattgttaaacttaatatacaattagctttattccttataaaatgtctaaaagaataatacgaagtatatataaaaggaattactgtaaactacattgccatagcaatttacataaaagtatattgttttctatctttaactcaaataaagcgtgtaataaataagttatctaaa

SEQ ID NO: 287018 - DNA, 1176 bp, Homo sapiens
cgcctggatctgcatccgggtccgtgggattcgcgctccactggtcagctggggtcgctctcgggtggttgggtgttgcttgttcccgctgttccagcgtcgaagaaccattgggtctgccggtttgaacttgttctggaagctgtgcgtcaccgtaatgaggcttgtaattcttgataactatgacttggctagtgaatgggcagccaaatacatctgtaatcgcatcattcagttcaaacctggacaggacagatattttacactgggtttaccaacagggagtacacctttaggatgctataaaaaactaatagaatatcataagaatggacacctttcttttaaatatgtgaagacctttaatatggatgaatatgtaggacttccaagaaatcatcctgaaagctaccattcttatatgtggaataatttttttaagcatatcgatatagatcctaataatgcacatatccttgacgggaatgctgcagatttacaagcagaatgtgatgcttttgaaaacaaaataaaagaagctggaggaatagatctttttgttggaggaattggtccagatggtcatatcgctttcaatgagcctggatccagtttagtgtcaaggacaagattaaagactctagcaatggataccatcttggcaaatgccaaatattttgatggagatttatcaaaagtgccaactatggctctaactgttggtgtggggacagtgatggatgctagagaagtaatgatccttataacaggggcacacaaggcatttgccctgtacaaagcaatagaagaaggagtcaatcacatgtggactgtttccgctttccagcagcatccccggactatttttgtatgcgatgaagatgctactttagaattaagagttaaaactgtgaaatactttaaagaaatggccctcagctaccacaagttaattcaggagaactaccttctcaattctgtgcaaggctgtgcttcgaaggcaagaaagaagtttgctacagtttgggcttgaattccctgaaaatatcaagatacaagatactgagatgaccattctattatatatcacaaaacttgtaatttaagaccattctatacatcttcatcaagagattttgcgttatgctaataataaaattaaacaaaatgccatgt

SEQ ID NO: 287019 - DNA, 392 bp, Homo sapiens
caaagcaatagaagaaggagtcaatcacatgtggactgtttccgctttccagcagcatccccggactatttttgtatgcgatgaagatgctactttagaattaagagttaaaactgtgaaatactttaaaggtgagcactgaatttcaaaagccgactgagataatctgttgtgagtgacaattaaaacttactgtgactgtggggttaaatctcacactgtgacctattgaaaagtggcaacacatagctagttctttcaagtaatggaaagttctcacctcagataatagtatcttcaaagtagtacctttttttttttttcatgaagagaatctcttcagtctctattttcagtaaacaatttttcttgaaatccaaggtttaataatt

SEQ ID NO: 287020 - DNA, 1924 bp, Homo sapiens
cgcctggatctgcatccgggtccgtgggattcgcgctccactggtcagctggggtcgctctcgggtggttgggtgttgcttgttcccgctgttccagcgtcgaagaaccattgggtctgccggtttgaacttgttctggaagctgtgcgtcaccgtaatgaggcttgtaattcttgataactatgacttggctagtgaatgggcagccaaatacatctgtaatcgcatcattcagttcaaacctggacaggacagatattttacactgggtttaccaacagggagtacacctttaggatgctataaaaaactaatagaatatcataagaatggacacctttcttttaaatatgtgaagacctttaatatggatgaatatgtaggacttccaagaaatcatcctgaaagctaccattcttatatgtggaataatttttttaagcatatcgatatagatcctaataatgcacatatccttgacgggaatgctgcagatttacaagcagaatgtgatgcttttgaaaacaaaataaaagaagctggaggaatagatctttttgttggaggaattggtccagatggtcatatcgctttcaatgagcctggatccagtttagtgtcaaggacaagattaaagactctagcaatggataccatcttggcaaatgccaaatattttgatggagatttatcaaaagtgccaactatggctctaactgttggtgtggggacagtgatggatgctagagaagtaatgatccttataacaggggcacacaaggcatttgccctgtacaaagcaatagaagaaggagtcaatcacatgtggactgtttccgctttccagcagcatccccggactatttttgtatgcgatgaagatgctactttagaattaagagttaaaactgtgaaatactttaaaggtctaatgcatgtgcacaataaacttgtggatccactattcagtatgaaagatggaaactgaaggagactggagcaaaattcagcttgaatgaacagagcactttttactaagtagtagatgaattttcagctatgcaatatgacaaaacatggggaattttgaagattgtcattttttcattcgagtctctatgttaaacattccatattttgaatatttatatcttgtacttgggtttaagagaagtagctggctctcaagattgactggctatttattataaagtactgaagtcacatagccacctataaaacagcatagaaatgtctgcctgtttaaaaagtcattttaaaggtagagtgtccacatcaggcaccatttgtgatatgactccagtggcatatatttcattttttaatgacaagacactccaaacctttcagataacaaactatcattgcagaccttcacttttggaatgcaatctttatattttctgtgcatcacacacatgcttttctgcacgtggttgccttagtcatcttcctacagcaccatctagacatcaaaaattgtgctatatatcattggtaaaggaaatttgaagagatgacagtgcctaaaagtacagtttacatccttttggaaagtatgtgtaagtgcatgttttttgtgcaccttcttctatagcacttttttacaaatatcttatttttatttaacgacttgggttcatgtccctaatataagtatcttgacaattatgagctttatacctagcaagccacttcaggaaattcttttggagaatattttctgattattgttaaacttaatatacaattagctttattccttataaaatgtctaaaagaataatacgaagtatatataaaaggaattactgtaaactacattgccatagcaatttacataaaagtatattgttttctatctttaactcaaataaagcgtgtaataaataagttatctaaa

SEQ ID NO: 287021 - DNA, 1480 bp, Homo sapiens
cgcctggatctgcatccgggtccgtgggattcgcgctccactggtcagctggggtcgctctcgggtggttgggtgttgcttgttcccgctgttccagcgtcgaagaaccattgggtctgccggaattggtccagatggtcatatcgctttcaatgagcctggatccagtttagtgtcaaggacaagattaaagactctagcaatggataccatcttggcaaatgccaaatattttgatggagatttatcaaaagtgccaactatggctctaactgttggtgtggggacagtgatggatgctagagaagtaatgatccttataacaggggcacacaaggcatttgccctgtacaaagcaatagaagaaggagtcaatcacatgtggactgtttccgctttccagcagcatccccggactatttttgtatgcgatgaagatgctactttagaattaagagttaaaactgtgaaatactttaaaggtctaatgcatgtgcacaataaacttgtggatccactattcagtatgaaagatggaaactgaaggagactggagcaaaattcagcttgaatgaacagagcactttttactaagtagtagatgaattttcagctatgcaatatgacaaaacatggggaattttgaagattgtcattttttcattcgagtctctatgttaaacattccatattttgaatatttatatcttgtacttgggtttaagagaagtagctggctctcaagattgactggctatttattataaagtactgaagtcacatagccacctataaaacagcatagaaatgtctgcctgtttaaaaagtcattttaaaggtagagtgtccacatcaggcaccatttgtgatatgactccagtggcatatatttcattttttaatgacaagacactccaaacctttcagataacaaactatcattgcagaccttcacttttggaatgcaatctttatattttctgtgcatcacacacatgcttttctgcacgtggttgccttagtcatcttcctacagcaccatctagacatcaaaaattgtgctatatatcattggtaaaggaaatttgaagagatgacagtgcctaaaagtacagtttacatccttttggaaagtatgtgtaagtgcatgttttttgtgcaccttcttctatagcacttttttacaaatatcttatttttatttaacgacttgggttcatgtccctaatataagtatcttgacaattatgagctttatacctagcaagccacttcaggaaattcttttggagaatattttctgattattgttaaacttaatatacaattagctttattccttataaaatgtctaaaagaataatacgaagtatatataaaaggaattactgtaaactacattgccatagcaatttacataaaagtatattgttttctatctttaactcaaataaagcgtgtaataaataagttatctaaa

SEQ ID NO: 287022 - DNA, 1373 bp, Homo sapiens
cgcctggatctgcatccgggtccgtgggattcgcgctccactggtcagctggggtcgctctcgggtggttgggtgttgcttgttcccgctgttccagcgtcgaagaaccattgggtctgccggtttgaacttgttctggaagctgtgcgtcaccgtaatgaggcttgtaattcttgataactatgacttggctagtgaatgggcagccaaatacatctgtaatcgcatcattcagttcaaacctggacaggacagatattttacactgggtttaccaacagggagtacacctttaggatgctataaaaaactaatagaatatcataagaatggacacctttcttttaaatatgtgaagacctttaatatggatgaatatgtaggacttccaagaaatcatcctgaaagctaccattcttatatgtggaataatttttttaagcatatcgatatagatcctaataatgcacatatccttgacgggaatgctgcagatttacaagcagaatgtgatgcttttgaaaacaaaataaaagaagctggaggaatagatctttttgttggaggaattggtccagatggtcatatcgctttcaatgagcctggatccagtttagtgtcaaggacaagattaaagactctagcaatggataccatcttggcaaatgccaaatattttgatggagatttatcaaaagtgccaactatggctctaactgttggtgtggggacagtgatggatgctagagaagtaatgatccttataacaggggcacacaaggcatttgccctgtacaaagcaatagaagaaggagtcaatcacatgtggactgtttccgctttccagcagcatccccggactatttttgtatgcgatgaagatgctactttagaattaagagttaaaactgtgaaatactttaaagaaatggccctcagctaccacaagttaattcaggagaactaccttctcaattctgtgcaagggtgagtttcagttgcacttctgttatatacaattcaaagagataaatcccaccaatatatttaataaatagctggtgatccctcatataatgaatagtacaactgacatttaaacattaattgtacttttagaaagtgaaatagcaacactgttgtctcattgtaattaccttatttataactggaattaccgatagctgtgcttcgaaggcaagaaagaagtttgctacagtttgggcttgaattccctgaaaatatcaagatacaagatactgagatgaccattctattatatatcacaaaacttgtaatttaagaccattctatacatcttcatcaagagattttgcgttatgctaataataaaattaaacaaaatgccatgt

SEQ ID NO: 287023 - DNA, 627 bp, Homo sapiens
catcaggaaacaactcatacctaaccacaggaagttgacttaccatggttggacttccattaaattcaagaaaaatacaaatgtttgtcactattggtagatcagaattttcaaaagaaaatgctacatagtggatgaattcaatgcaattaaggagtcaagtgtcctcgactggcaaccagaagactacatctggcagttgtaccatttagactgtggtcaagtcccaagctcttttctctatgtaaagaaaacaaaacgcagcacattcacattttcccgaggaactgtaaagatgatctctacagggataaacgttgtaaagcctgaagctcaatcaactgatgttggaaactctcaaagggagtaaaggcttgatctcaatggtctagaacatgtactgtaatttaatagaagagatggtcgtcttaatatttaatgatttaaaagaacttcccagtccatgcgaagagtacagtccaagaataaatcaaatttctgaacgcattttatgctacatatgtgtatactttgcgatcctcaggtgttcgtgccaaatattctctctcaataagtccttcaatacgtttcttaataacaactggacttggtaagaatcgcgccttc

SEQ ID NO: 287024 - DNA, 900 bp, Homo sapiens
acgcccggcttccgccccgcagccccgaggggtctgggcgcgctgaagaccccttcggctgctgggccaacgcccccacccttggtcacctactcctgccgccgagcggttcgcgggaggtggcctcgggggtcgtagctactcaccggcggggcgctccgagtccatctgccccgtagcccggcagccggggcgggagggctgcgagcccggggcgcggtccgcctgaggcctgagacccggggccgcctgcgctcagggccgcggtgccggccgcgcgggagcctggcggggacggcgcggtcagtgttcggctcctccgcagtgactcaccagcgtcctgaagcttttgatcaccattggctgggaaggaaaaacagaatcagctgttccctgcgaaaggtatcatatgtttcttacaaagtggaggtttgtggcagccctgcatggagcaagtctgtcagcaccatctttctaacagtatgtgctcacttcatgtctctctcacattttggtaattcttggaatgtttccgttattaaatcagttatagtgatctgtgattagtgatctttgatattactgtcataattgcttggggggcaccatgaaccacccctatataagacagcaaactgagtcgataaatgttttatgtgttctgaccactgcactgaccagctgcctccctatctctctccttctgctcagacctccctatccttgagacacagcaatactgaaattaggggccaggcatggtggtggctcatgcctgtagtcccagctacttgggagactgaagcaggaggattgcttgagcctaggagttcgaggctgcagtgagctgtgatcacgccactgcacttcagcatgggcagcaaagcaagaccctgactc

SEQ ID NO: 287025 - DNA, 985 bp, Homo sapiens
aaaaaagttttcctgtggtttaaaaaaaatctttcatgaaaagaattgtcaatcaacgtgacaaatttcattattgtcttattttaagaaactgcaacagccaccccaactttcaagcaccaccttgatcaacagccatcaacattgaggcaaaaccctccaccagcaaaaagattatgactcattgaaggctcagctgatggttagcagtaaaaaatattaactttaatcatctcgaccattcagtactcatctaatattctctataacaaaatgggaaatgcacataaagcacttctgctacatgctgaattatgattgttgtctccaggaaaagaacttgtgggaacgtttgagttgtaagctgaactaactagctgcttttttcatgaaataccgcttttactggaaagaactgacagataaactgaggtattcaaacctagatatttggcagacattttcgtgaaaataaatatgttcgtgccacttcaaggaacataattctcagtacttgttgccaataatgttggaattttcatgcaaaaattcaaataaaaaacaaacttaaaaccatcaagaacttggtgactttatgtggaagccagtgctacaatactttagcttcccaatacttaaaaacttttctgatgagattactagtgatattaacaatgtgattgatattgaataatgaaatgttttagcatttggaagatctgtttaattcagtaaatcagtattttccaaatgaccaatgcatgacatttcaacatcacgcacaggaaaataggcattcgaggtacagtcaaaaataatgagttttaatgtaacaagtacaaaatgtccattgaagtggtttcaaattccaaatagtaattggaaaatccaccactcgtgttttggggtagtagtatcgaaaaagaataaccaagataatttgaaaaggctattaaaaaatacttctcaattttcaaactgcata

SEQ ID NO: 287026 - DNA, 397 bp, Homo sapiens
gtcaggaaatattgtagggcagtggtcctcagttgggggttgactctgtcccctaggggcatctggcaacatccggcataactgtgggtgtcacatgagagggacgctgctcaccatcctgcaatgcacagcacagaccccaccacaggggttttatccagcccaaagtcaggaaatattgtagggagaaaaaaataacaacaacaaaggcctgtgttaatgttaaatagatgagattatggaatgtgtatattaatgttaaaaattgtaccttgatcaatgtactttttataaacttgccatagatatctcagatttgaaacctcaagacagatttattattcttaaatgctgtatgataatgaagaaaaataaaaatttatttcttgcaaagtta

SEQ ID NO: 287027 - DNA, 775 bp, Homo sapiens
cattctgaattcttggagccaaggtcacaaagggaaatcctgtgaatggcataattttatattctgcataaagtgagtttacacaatgagtgcaacctaatacaacagcaagaaaaaataagaactagtaagcaattgggcaatatgtataatttacatatttatctttaatctgtattatctacactttgatcttttttggttaaagaagtattaataaggaacctacctacaaatgtagtctgtttcacaacataattactgatagcccattataaccaattttaaaatccttaaaataattactgatagcccattataaccaattttaaaatccttaaaataattactgatagcccattataactgattttaaaatccttaaaaatcatttcatttttcagttacttataaaactttttcttgatctttcagacctactttgaagaaaagttgatctgtctctgtattaccattttccaggttgttttacgaatacgtgttgtagtcatccattaagcaatccagccgagcttgaggaaagtgacgcccttggagtgaggcgagcagcacagagacggctgaaagctgagctaggaattcccttggaagaggtaaccagctctcctacacaaccatacaagctgaaacctaaacatactataaaaaggtttttaataaaatttttaaattcaaatgtagttctctgcttggtaacctccggagttatgagttagccccacaaaccatcttgaataaagattatttaaatttt

SEQ ID NO: 287028 - DNA, 6432 bp, Homo sapiens
acgcccggcttccgccccgcagccccgaggggtctgggcgcgctgaagaccccttcggctgctgggccaacgcccccacccttggtcacctactcctgccgccgagcggttcgcgggaggtggcctcgggggtcgtagctactcaccggcggggcgctccgagtccatctgccccgtagcccggcagccggggcgggagggctgcgagcccggggcgcggtccgcctgaggcctgagacccggggccgcctgcgctcagggccgcggtgccggccgcgcgggagcctggcggggacggcgcggtcagtgttcggctcctccgcagtgactcaccagcgtcctgaagcttttgatcaccattggctgggaaggaaaaacagaatcagctgttccctgcgaaaggtgggacttgggccgcttttttcttagaatctaggttggaaacgtcgcatgatggtctttacgtaaacagccgtctcaacgctctacagaaagcgctaaccgcgcatttgaagcccacctagagtaaatcaagagcgtgaaagcattttttttttctgtgtaggttaacattcctgctccttcctttaaaaaggaagctcaaggccaggcgcggtggctcacgcctgtaatcccaacactttgggaggccgaggccgacgtatcacgagattaggaggtcgagaccagcctggccaacatggtgaaaccctgtctttactaaaaatacaaaaactagccgggcgtggcggcgcgcgcctgtaacccatgctactcggaaggctgaggcaggagaatcgcttgaacccgggaggcggaggttgcagtgagccgagatcgcgcctctgcactccagcctgggacagagcgagcctccgtctccaaaaaaaaataaggaagctcaagatgaagagtcagaagtggtaacttgtttgttgcacaagaaacaaatttagcattctatttaggggatccagattaccaaaaaaaaaaaagaagtgaagttatttctgcattaagtatattaataaaactttatcactaaaaacaattctgtaagaggaacgccaaggaaaaaaatatttgagtttttagagaagtcattttttaaacttttagaggttgtgacatttaagtaacataattttatttagtacctagtatgcaaagacattgtactgggcatggcagcaaatagaaagctttgtaaatcgcagtgtcccatctaattaacccgcattctaacaggtggttttattttgctggaccgcaccacagtcaggtaacaccaagaatatcgctaatgtaattttttaagttgatatatttaggattccataaaagtcactgaaaataactgagagcatgacatgtcacaaaacaagggaaagaaatcattttgaggatcagtcgctttacatcttttgtaactaatttaatccccaaaggaatccaataaagtaaaagttattctaaattgaattttaagcatgagaatgtggaaattactcgtcaaaagtcaaaaataatcgtgcagcagggcaaagactaaaggctggcatcagaatccatattcttttcactgttgatgtgctagggctgcaggaacaaaatactgcaaactaggcagcttaaacaaatttattgtcagaggtctgactggaagtcccaaatcaaggtattggcagggttgattccttctgagagctgtgatgggagcctgttaatgcatctcagcgtctaggcattccttggcttgtggcagcatgcccccgccagtcttcacatgacgttttccatgtccgtgtctgtctgcacacttagcgttctttttatgaggacatcagtcatattggagtacagtagacgctactttaatatgacctcatgttaactaatcatatccacaacaaccctgtttccaaataaggtcacattataaaatactggaagtgaggtctttaacacatgaatttgaaagggggacacaatttaacccataacacactgtatcctgaaataactatccaatgtaatttttttaaaagacacaaaactagccgaaattataaaaggttatgattgcaatcctggtatccagttacattctccctcctgcagaagctgtggagaatcctgtctcagaaaaccaatttctattttgtcacatgtccatctatgcaaaatacatgtactttgtccctgacatagggcaacaatgctgaatttactaagactcatttttgcgcatggtttgatagggaattaagatttactaggtattctgtcattgtcctcattactgattattttaactgtgtctcaaacacttggatagtacactatagtgttataagctgtttgacatgtcgcttcctaaattctcaagttatatatatgtgtgtatatatgtcatgtaacaggcacaactgttttcatgtgtatcactttattgcacttcacaggtatcatatgtttcttacaaagtggaggtttgtggcagccctgcatggagcaagtctgtcagcaccatctttctaacaaaactgcaacagccaccccaactttcaagcactgtctttgtggtgtttacgtgttctcgccacacctgcataggttttctctgggtgctgcagttcttgccacatcccagaggtgtgcacgtgaggtgaactggtgtgtcttcactgtcccagtctgagtgtgggtgtgtgagtggccctgtgatggaatggcgtcctgtccagggctggttccctctttgtgccctgagctactgaaacaggcttcagctacacatgacccagaactggaataattaagtaataattatctttttattcatctttcttaaatgtatgtatagctcacatttatttcaatgtttaatattagaatactttggcctttagaagcttagtgattttttttttccttggccagaagtatgctttaggaacttaatccttattttttagcctctggtaaaattggttttgctatacgttgtttcacttaaaagtcctgattcccaagaacgcactgacagcagtgaggacttgctgcgcatgcgggaggccagattttcttatctgtgtgaagccagacatgaaagagatctgtcaacacataaaacaaaatcaaagtctgttttttgtctggaaaagatttttaataaaaatataacttatgttagtgtcgtgtgttttttaagtgaatattttaatatgtttaatttctatgttagtaaatagcagtagtaaacaacagtgagcaaaagcttttaggtgtcctcagtacattttaagagagtgcaagcgtcctgtgaccaagaagtttgagaactggtgcccaccaggttcatctcacaagttcagtattttaaattccacacaaaaggtagaggaaatagctgaattcgcttcagctgcgcatacatttcacgattatttaaaagtttagagggctaggcgcggtggctcacacccggaatctcagcacttcggtaagctgagccaggtggatcacttgaggtcaggagttccagaccagcctgaccaacatgcggaaacccgtctctactaaaaatacgaaataagcccgggcgtggtggcgcatgcctgtaattccagctacttgggaggctgagacgggaccattgcctgaacccggtcggcggaggtttctgtgagtggagactgcaccattgcactcaagcctgggcaacacagaatgaaactgtctccaaaataaaaatttagaacgtagtcatgtacctcgaaagcgaacactcccaacatagcgtggaacaccccacacccccggcgactttgctccgccttggtcccggtcgcagacaccgcagaaaggccatcgttctagacatacgagaactccccgtgcagccaaacgctgtagtcccagcggcggaactcgggggggggaggggggggagtgcccaaccagccagtcagcagtgacgtcccgcctttcctccgtttccattggtccagccatgcggaggtcgctcccatgggacgccgagcttccggctgcagggcttggcgcccgggcgctttcggattgggagggcttcctccatggaacgcgagcctcgagacgtctgacgttaggcaccgttcgcagcgcctcgggctcgcacggcaggatcgaaagcgtgattggctggcggcgtctgtggtctcgggcaccgcccagtcgcgggacgctgcctctgcggaactgggggtggggcgtgttgacccccttaaaggcgccagagcccgcggtcacggctcaggttcccggtgcttcgcgcgtctgccgttgtcacaggccagggaggtggcaccaccaggcgaagcttggcgagattgtgtcgtcaagcgcgtacgggcgccaattggccgggcgatgtggcgtggactggcgctggcgcgagcgattggctgcgcggcccgggggcggggccagtgggcggtgcgcgccgcagactgtgctcaaagcgggcgccatccgggaccggcggttgtctgtggccggaggctgatcagtgttctagaacagatcagacattttgtaatgatgcctgaaataaacactaaccacctcgacaagcaacaggttcaactcctggcagagatgtgtatccttattgatgaaaatgacaataaaattggagctgagaccaagaagaattgtcacctgaacgagaacattgagaaaggattattgcatcgagcttttagtgtcttcttattcaacaccgaaaataagcttctgctacagcaaagatcagatgctaagattacctttccaggttgttttacgaatacgtgttgtagtcatccattaagcaatccagccgagcttgaggaaagtgacgcccttggagtgaggcgagcagcacagagacggctgaaagctgagctaggaattcccttggaagaggttcctccagaagaaattaattatttaacacgaattcactacaaagctcagtctgatggtatctggggtgaacatgaaattgattacattttgttggtgaggaagaatgtaactttgaatccagatcccaatgagattaaaagctattgttatgtgtcaaaggaagaactaaaagaacttctgaaaaaagcagccagtggtgaaattaagataacgccatggtttaaaattattgcagcgacttttctctttaaatggtgggataacttaaatcatttgaatcagtttgttgaccatgagaaaatatacagaatgtgaatatgtaggtaaatgattacagaaaaatttatctgcttaacaaacttagaatgactttttccttttaaatttagttctatcattaatttatcattaaatttagttctatcatttggtactatcattaatgtattatatacactgatactttaaaacttgtgtggaaaaaactaacttataattttgtatcacacaccctggatatgtgttctgtttctaagcgacatttgtgagagattattgtaaaatgagagcgagcaaataaaacttaatttaatctttgcagatacatacttatgggaaatttgaacaaatgagtgaaactctgtgtttttagtaggctgtgataaacatttccggagcacttgcagaggacttgctatttgccaggtgctttatgtatcattaaatttttctcatagttcagaaaaatgtgcaaaggaaactattgtctcgctccttcaaaacagtcttaattaactttcatattagcagattaaactagcagagcaggttcaagggaaattaaatgatatggaccctaatttgtatcattctgagttgattgtgtggtttattcattctggaaacatgttgatacttacagtcagccactgcttttgataagtgatattgattaggttgaatcttcttgtaaatagtatttaccagttagcaaagtctgtgttttcagaattacagtgagcacagaggtgttcataaaatgggaattgagtcccactcggtaagagttgcttaaacttgacactgttgacatttgggctggataaaacccctgtggtggggtctgtgctgtgcattgcaggatggtgagcagcgtccctctcatgtgacacccacagttatgccggatgttgccagatgcccctaggggacagagtcaacccccaactgaggaccactgtcctacagagtcaggaaatattgtagggagaaaaaaataacaacaacaaaggcctgtgttaatgttaaatagatgagattatggaatgtgtatattaatgttaaaaattgtaccttgatcaatgtactttttataaacttgccatagatatctcagatttgaaacctcaagacagatttattattcttaaatgctgtatgataatgaagaaaaataaaaatttatttcttgcaaagtta

SEQ ID NO: 287029 - DNA, 4369 bp, Homo sapiens
acgcccggcttccgccccgcagccccgaggggtctgggcgcgctgaagaccccttcggctgctgggccaacgcccccacccttggtcacctactcctgccgccgagcggttcgcgggaggtggcctcgggggtcgtagctactcaccggcggggcgctccgagtccatctgccccgtagcccggcagccggggcgggagggctgcgagcccggggcgcggtccgcctgaggcctgagacccggggccgcctgcgctcagggccgcggtgccggccgcgcgggagcctggcggggacggcgcggtcagtgttcggctcctccgcagtgactcaccagcgtcctgaagcttttgatcaccattggctgggaaggaaaaacagaatcagctgttccctgcgaaaggtatcatatgtttcttacaaagtggaggtttgtggcagccctgcatggagcaagtctgtcagcaccatctttctaacaaaactgcaacagccaccccaactttcaagcactgtctttgtggtgtttacgtgttctcgccacacctgcataggttttctctgggtgctgcagttcttgccacatcccagaggtgtgcacgtgaggtgaactggtgtgtcttcactgtcccagtctgagtgtgggtgtgtgagtggccctgtgatggaatggcgtcctgtccagggctggttccctctttgtgccctgagctactgaaacaggcttcagctacacatgacccagaactggaataattaagtaataattatctttttattcatctttcttaaatgtatgtatagctcacatttatttcaatgtttaatattagaatactttggcctttagaagcttagtgattttttttttccttggccagaagtatgctttaggaacttaatccttattttttagcctctggtaaaattggttttgctatacgttgtttcacttaaaagtcctgattcccaagaacgcactgacagcagtgaggacttgctgcgcatgcgggaggccagattttcttatctgtgtgaagccagacatgaaagagatctgtcaacacataaaacaaaatcaaagtctgttttttgtctggaaaagatttttaataaaaatataacttatgttagtgtcgtgtgttttttaagtgaatattttaatatgtttaatttctatgttagtaaatagcagtagtaaacaacagtgagcaaaagcttttaggtgtcctcagtacattttaagagagtgcaagcgtcctgtgaccaagaagtttgagaactggtgcccaccaggttcatctcacaagttcagtattttaaattccacacaaaaggtagaggaaatagctgaattcgcttcagctgcgcatacatttcacgattatttaaaagtttagagggctaggcgcggtggctcacacccggaatctcagcacttcggtaagctgagccaggtggatcacttgaggtcaggagttccagaccagcctgaccaacatgcggaaacccgtctctactaaaaatacgaaataagcccgggcgtggtggcgcatgcctgtaattccagctacttgggaggctgagacgggaccattgcctgaacccggtcggcggaggtttctgtgagtggagactgcaccattgcactcaagcctgggcaacacagaatgaaactgtctccaaaataaaaatttagaacgtagtcatgtacctcgaaagcgaacactcccaacatagcgtggaacaccccacacccccggcgactttgctccgccttggtcccggtcgcagacaccgcagaaaggccatcgttctagacatacgagaactccccgtgcagccaaacgctgtagtcccagcggcggaactcgggggggggaggggggggagtgcccaaccagccagtcagcagtgacgtcccgcctttcctccgtttccattggtccagccatgcggaggtcgctcccatgggacgccgagcttccggctgcagggcttggcgcccgggcgctttcggattgggagggcttcctccatggaacgcgagcctcgagacgtctgacgttaggcaccgttcgcagcgcctcgggctcgcacggcaggatcgaaagcgtgattggctggcggcgtctgtggtctcgggcaccgcccagtcgcgggacgctgcctctgcggaactgggggtggggcgtgttgacccccttaaaggcgccagagcccgcggtcacggctcaggttcccggtgcttcgcgcgtctgccgttgtcacaggccagggaggtggcaccaccaggcgaagcttggcgagattgtgtcgtcaagcgcgtacgggcgccaattggccgggcgatgtggcgtggactggcgctggcgcgagcgattggctgcgcggcccgggggcggggccagtgggcggtgcgcgccgcagactgtgctcaaagcgggcgccatccgggaccggcggttgtctgtggccggaggctgatcagtgttctagaacagatcagacattttgtaatgatgcctgaaataaacactaaccacctcgacaagcaacaggttcaactcctggcagagatgtgtatccttattgatgaaaatgacaataaaattggagctgagaccaagaagaattgtcacctgaacgagaacattgagaaaggattattgcatcgagcttttagtgtcttcttattcaacaccgaaaataagcttctgctacagcaaagatcagatgctaagattacctttccaggttgttttacgaatacgtgttgtagtcatccattaagcaatccagccgagcttgaggaaagtgacgcccttggagtgaggcgagcagcacagagacggctgaaagctgagctaggaattcccttggaagaggttcctccagaagaaattaattatttaacacgaattcactacaaagctcagtctgatggtatctggggtgaacatgaaattgattacattttgttggtgaggaagaatgtaactttgaatccagatcccaatgagattaaaagctattgttatgtgtcaaaggaagaactaaaagaacttctgaaaaaagcagccagtggtgaaattaagataacgccatggtttaaaattattgcagcgacttttctctttaaatggtgggataacttaaatcatttgaatcagtttgttgaccatgagaaaatatacagaatgtgaatatgtaggtaaatgattacagaaaaatttatctgcttaacaaacttagaatgactttttccttttaaatttagttctatcattaatttatcattaaatttagttctatcatttggtactatcattaatgtattatatacactgatactttaaaacttgtgtggaaaaaactaacttataattttgtatcacacaccctggatatgtgttctgtttctaagcgacatttgtgagagattattgtaaaatgagagcgagcaaataaaacttaatttaatctttgcagatacatacttatgggaaatttgaacaaatgagtgaaactctgtgtttttagtaggctgtgataaacatttccggagcacttgcagaggacttgctatttgccaggtgctttatgtatcattaaatttttctcatagttcagaaaaatgtgcaaaggaaactattgtctcgctccttcaaaacagtcttaattaactttcatattagcagattaaactagcagagcaggttcaagggaaattaaatgatatggaccctaatttgtatcattctgagttgattgtgtggtttattcattctggaaacatgttgatacttacagtcagccactgcttttgataagtgatattgattaggttgaatcttcttgtaaatagtatttaccagttagcaaagtctgtgttttcagaattacagtgagcacagaggtgttcataaaatgggaattgagtcccactcggtaagagttgcttaaacttgacactgttgacatttgggctggataaaacccctgtggtggggtctgtgctgtgcattgcaggatggtgagcagcgtccctctcatgtgacacccacagttatgccggatgttgccagatgcccctaggggacagagtcaacccccaactgaggaccactgtcctacagagtcaggaaatattgtagggagaaaaaaataacaacaacaaaggcctgtgttaatgttaaatagatgagattatggaatgtgtatattaatgttaaaaattgtaccttgatcaatgtactttttataaacttgccatagatatctcagatttgaaacctcaagacagatttattattcttaaatgctgtatgataatgaagaaaaataaaaatttatttcttgcaaagtta

SEQ ID NO: 287030 - DNA, 6555 bp, Homo sapiens
acgcccggcttccgccccgcagccccgaggggtctgggcgcgctgaagaccccttcggctgctgggccaacgcccccacccttggtcacctactcctgccgccgagcggttcgcgggaggtggcctcgggggtcgtagctactcaccggcggggcgctccgagtccatctgccccgtagcccggcagccggggcgggagggctgcgagcccggggcgcggtccgcctgaggcctgagacccggggccgcctgcgctcagggccgcggtgccggccgcgcgggagcctggcggggacggcgcggtcagtgttcggctcctccgcagtgactcaccagcgtcctgaagcttttgatcaccattggctgggaaggaaaaacagaatcagctgttccctgcgaaaggtgggacttgggccgcttttttcttagaatctaggttggaaacgtcgcatgatggtctttacgtaaacagccgtctcaacgctctacagaaagcgctaaccgcgcatttgaagcccacctagagtaaatcaagagcgtgaaagcattttttttttctgtgtaggttaacattcctgctccttcctttaaaaaggaagctcaaggccaggcgcggtggctcacgcctgtaatcccaacactttgggaggccgaggccgacgtatcacgagattaggaggtcgagaccagcctggccaacatggtgaaaccctgtctttactaaaaatacaaaaactagccgggcgtggcggcgcgcgcctgtaacccatgctactcggaaggctgaggcaggagaatcgcttgaacccgggaggcggaggttgcagtgagccgagatcgcgcctctgcactccagcctgggacagagcgagcctccgtctccaaaaaaaaataaggaagctcaagatgaagagtcagaagtggtaacttgtttgttgcacaagaaacaaatttagcattctatttaggggatccagattaccaaaaaaaaaaaagaagtgaagttatttctgcattaagtatattaataaaactttatcactaaaaacaattctgtaagaggaacgccaaggaaaaaaatatttgagtttttagagaagtcattttttaaacttttagaggttgtgacatttaagtaacataattttatttagtacctagtatgcaaagacattgtactgggcatggcagcaaatagaaagctttgtaaatcgcagtgtcccatctaattaacccgcattctaacaggtggttttattttgctggaccgcaccacagtcaggtaacaccaagaatatcgctaatgtaattttttaagttgatatatttaggattccataaaagtcactgaaaataactgagagcatgacatgtcacaaaacaagggaaagaaatcattttgaggatcagtcgctttacatcttttgtaactaatttaatccccaaaggaatccaataaagtaaaagttattctaaattgaattttaagcatgagaatgtggaaattactcgtcaaaagtcaaaaataatcgtgcagcagggcaaagactaaaggctggcatcagaatccatattcttttcactgttgatgtgctagggctgcaggaacaaaatactgcaaactaggcagcttaaacaaatttattgtcagaggtctgactggaagtcccaaatcaaggtattggcagggttgattccttctgagagctgtgatgggagcctgttaatgcatctcagcgtctaggcattccttggcttgtggcagcatgcccccgccagtcttcacatgacgttttccatgtccgtgtctgtctgcacacttagcgttctttttatgaggacatcagtcatattggagtacagtagacgctactttaatatgacctcatgttaactaatcatatccacaacaaccctgtttccaaataaggtcacattataaaatactggaagtgaggtctttaacacatgaatttgaaagggggacacaatttaacccataacacactgtatcctgaaataactatccaatgtaatttttttaaaagacacaaaactagccgaaattataaaaggttatgattgcaatcctggtatccagttacattctccctcctgcagaagctgtggagaatcctgtctcagaaaaccaatttctattttgtcacatgtccatctatgcaaaatacatgtactttgtccctgacatagggcaacaatgctgaatttactaagactcatttttgcgcatggtttgatagggaattaagatttactaggtattctgtcattgtcctcattactgattattttaactgtgtctcaaacacttggatagtacactatagtgttataagctgtttgacatgtcgcttcctaaattctcaagttatatatatgtgtgtatatatgtcatgtaacaggcacaactgttttcatgtgtatcactttattgcacttcacaggtatcatatgtttcttacaaagtggaggtttgtggcagccctgcatggagcaagtctgtcagcaccatctttctaacaaaactgcaacagccaccccaactttcaagcactgtctttgtggtgtttacgtgttctcgccacacctgcataggttttctctgggtgctgcagttcttgccacatcccagaggtgtgcacgtgaggtgaactggtgtgtcttcactgtcccagtctgagtgtgggtgtgtgagtggccctgtgatggaatggcgtcctgtccagggctggttccctctttgtgccctgagctactgaaacaggcttcagctacacatgacccagaactggaataattaagtaataattatctttttattcatctttcttaaatgtatgtatagctcacatttatttcaatgtttaatattagaatactttggcctttagaagcttagtgattttttttttccttggccagaagtatgctttaggaacttaatccttattttttagcctctggtaaaattggttttgctatacgttgtttcacttaaaagtcctgattcccaagaacgcactgacagcagtgaggacttgctgcgcatgcgggaggccagattttcttatctgtgtgaagccagacatgaaagagatctgtcaacacataaaacaaaatcaaagtctgttttttgtctggaaaagatttttaataaaaatataacttatgttagtgtcgtgtgttttttaagtgaatattttaatatgtttaatttctatgttagtaaatagcagtagtaaacaacagtgagcaaaagcttttaggtgtcctcagtacattttaagagagtgcaagcgtcctgtgaccaagaagtttgagaactggtgcccaccaggttcatctcacaagttcagtattttaaattccacacaaaaggtagaggaaatagctgaattcgcttcagctgcgcatacatttcacgattatttaaaagtttagagggctaggcgcggtggctcacacccggaatctcagcacttcggtaagctgagccaggtggatcacttgaggtcaggagttccagaccagcctgaccaacatgcggaaacccgtctctactaaaaatacgaaataagcccgggcgtggtggcgcatgcctgtaattccagctacttgggaggctgagacgggaccattgcctgaacccggtcggcggaggtttctgtgagtggagactgcaccattgcactcaagcctgggcaacacagaatgaaactgtctccaaaataaaaatttagaacgtagtcatgtacctcgaaagcgaacactcccaacatagcgtggaacaccccacacccccggcgactttgctccgccttggtcccggtcgcagacaccgcagaaaggccatcgttctagacatacgagaactccccgtgcagccaaacgctgtagtcccagcggcggaactcgggggggggaggggggggagtgcccaaccagccagtcagcagtgacgtcccgcctttcctccgtttccattggtccagccatgcggaggtcgctcccatgggacgccgagcttccggctgcagggcttggcgcccgggcgctttcggattgggagggcttcctccatggaacgcgagcctcgagacgtctgacgttaggcaccgttcgcagcgcctcgggctcgcacggcaggatcgaaagcgtgattggctggcggcgtctgtggtctcgggcaccgcccagtcgcgggacgctgcctctgcggaactgggggtggggcgtgttgacccccttaaaggcgccagagcccgcggtcacggctcaggttcccggtgcttcgcgcgtctgccgttgtcacaggccagggaggtggcaccaccaggcgaagcttggcgagattgtgtcgtcaagcgcgtacgggcgccaattggccgggcgatgtggcgtggactggcgctggcgcgagcgattggctgcgcggcccgggggcggggccagtgggcggtgcgcgccgcagactgtgctcaaagcgggcgccatccgggaccggcggttgtctgtggccggaggctgatcagtgttctagaacagatcagacattttgtaatgatgcctgaaataaacactaaccacctcgacaagcaacaggttcaactcctggcagagatgtgtatccttattgatgaaaatgacaataaaattggagctgagaccaagaagaattgtcacctgaacgagaacattgagaaaggattattgcatcgagcttttagtgtcttcttattcaacaccgaaaataagcttctgctacagcaaagatcagatgctaagattacctttccaggttgttttacgaatacgtgttgtagtcatccattaagcaatccagccgagcttgaggaaagtgacgcccttggagtgaggcgagcagcacagagacggctgaaagctgagctaggaattcccttggaagaggttcctccagaagaaattaattatttaacacgaattcactacaaagctcagtctgatggtatctggggtgaacatgaaattgattacattttgttggtgaggaagaatgtaactttgaatccagatcccaatgagattaaaagctattgttatgtgtcaaaggaagaactaaaagaacttctgaaaaaagcagccagtggtgaaattaagataacgccatggtttaaaattattgcagcgacttttctctttaaatggtgggataacttaaatcatttgaatcagtttgttgaccatgagaaaatatacagaatgtgaatatgtaggtaaatgattacagaaaaatttatctgcttaacaaacttagaatgactttttccttttaaatttagttctatcattaatttatcattaaatttagttctatcatttggtactatcattaatgtattatatacactgatactttaaaacttgtgtggaaaaaactaacttataattttgtatcacacaccctggatatgtgttctgtttctaagcgacatttgtgagagattattgtaaaatgagagcgagcaaataaaacttaatttaatctttgcagatacatacttatgggaaatttgaacaaatgagtgaaactctgtgtttttagtaggctgtgataaacatttccggagcacttgcagaggacttgctatttgccaggtgctttatgtatcattaaatttttctcatagttcagaaaaatgtgcaaaggaaactattgtctcgctccttcaaaacagtcttaattaactttcatattagcagattaaactagcagagcaggttcaagggaaattaaatgatatggaccctaatttgtatcattctgagttgattgtgtggtttattcattctggaaacatgttgatacttacagtcagccactgcttttgataagtgatattgattaggttgaatcttcttgtaaatagtatttaccagttagcaaagtctgtgttttcagaattacagtgagcacagaggtgttcataaaatgggaattgagtcccactcggtaagagttgcttaaacttgacactgttgacatttgggctggataaaacccctgtggtggggtctgtgctgtgcattgcaggatggtgagcagcgtccctctcatgtgacacccacagttatgccggatgttgccagatgcccctaggggacagagtcaacccccaactgaggaccactgtcctacagagtcaggaaatattgtagggagaaaaaaataacaacaacaaaggcctgtgttaatgttaaatagatgagattatggaatgtgtatattaatgttaaaaattgtaccttgatcaatgtactttttataaacttgccatagatatctcagatttgaaacctcaagacagatttattattcttaaatgctgtatgataatgaagaaaaataaaaatttatttcttgcaaagttaaatgtttgttaaattcaatagaatgactcatttatggttaactttgggcaatttataatttcagacaagactgtttagcaagtattttattgaaaagtaaaaaaaattgcaatttaatactgt

SEQ ID NO: 287031 - DNA, 6417 bp, Homo sapiens
acgcccggcttccgccccgcagccccgaggggtctgggcgcgctgaagaccccttcggctgctgggccaacgcccccacccttggtcacctactcctgccgccgagcggttcgcgggaggtggcctcgggggtcgtagctactcaccggcggggcgctccgagtccatctgccccgtagcccggcagccggggcgggagggctgcgagcccggggcgcggtccgcctgaggcctgagacccggggccgcctgcgctcagggccgcggtgccggccgcgcgggagcctggcggggacggcgcggtcagtgttcggctcctccgcagtgactcaccagcgtcctgaagcttttgatcaccattggctgggaaggaaaaacagaatcagctgttccctgcgaaaggtgggacttgggccgcttttttcttagaatctaggttggaaacgtcgcatgatggtctttacgtaaacagccgtctcaacgctctacagaaagcgctaaccgcgcatttgaagcccacctagagtaaatcaagagcgtgaaagcattttttttttctgtgtaggttaacattcctgctccttcctttaaaaaggaagctcaaggccaggcgcggtggctcacgcctgtaatcccaacactttgggaggccgaggccgacgtatcacgagattaggaggtcgagaccagcctggccaacatggtgaaaccctgtctttactaaaaatacaaaaactagccgggcgtggcggcgcgcgcctgtaacccatgctactcggaaggctgaggcaggagaatcgcttgaacccgggaggcggaggttgcagtgagccgagatcgcgcctctgcactccagcctgggacagagcgagcctccgtctccaaaaaaaaataaggaagctcaagatgaagagtcagaagtggtaacttgtttgttgcacaagaaacaaatttagcattctatttaggggatccagattaccaaaaaaaaaaaagaagtgaagttatttctgcattaagtatattaataaaactttatcactaaaaacaattctgtaagaggaacgccaaggaaaaaaatatttgagtttttagagaagtcattttttaaacttttagaggttgtgacatttaagtaacataattttatttagtacctagtatgcaaagacattgtactgggcatggcagcaaatagaaagctttgtaaatcgcagtgtcccatctaattaacccgcattctaacaggtggttttattttgctggaccgcaccacagtcaggtaacaccaagaatatcgctaatgtaattttttaagttgatatatttaggattccataaaagtcactgaaaataactgagagcatgacatgtcacaaaacaagggaaagaaatcattttgaggatcagtcgctttacatcttttgtaactaatttaatccccaaaggaatccaataaagtaaaagttattctaaattgaattttaagcatgagaatgtggaaattactcgtcaaaagtcaaaaataatcgtgcagcagggcaaagactaaaggctggcatcagaatccatattcttttcactgttgatgtgctagggctgcaggaacaaaatactgcaaactaggcagcttaaacaaatttattgtcagaggtctgactggaagtcccaaatcaaggtattggcagggttgattccttctgagagctgtgatgggagcctgttaatgcatctcagcgtctaggcattccttggcttgtggcagcatgcccccgccagtcttcacatgacgttttccatgtccgtgtctgtctgcacacttagcgttctttttatgaggacatcagtcatattggagtacagtagacgctactttaatatgacctcatgttaactaatcatatccacaacaaccctgtttccaaataaggtcacattataaaatactggaagtgaggtctttaacacatgaatttgaaagggggacacaatttaacccataacacactgtatcctgaaataactatccaatgtaatttttttaaaagacacaaaactagccgaaattataaaaggttatgattgcaatcctggtatccagttacattctccctcctgcagaagctgtggagaatcctgtctcagaaaaccaatttctattttgtcacatgtccatctatgcaaaatacatgtactttgtccctgacatagggcaacaatgctgaatttactaagactcatttttgcgcatggtttgatagggaattaagatttactaggtattctgtcattgtcctcattactgattattttaactgtgtctcaaacacttggatagtacactatagtgttataagctgtttgacatgtcgcttcctaaattctcaagttatatatatgtgtgtatatatgtcatgtaacaggcacaactgttttcatgtgtatcactttattgcacttcacaggtatcatatgtttcttacaaagtggaggtttgtggcagccctgcatggagcaagtctgtcagcaccatctttctaacaaaactgcaacagccaccccaactttcaagcactgtctttgtggtgtttacgtgttctcgccacacctgcataggttttctctgggtgctgcagttcttgccacatcccagaggtgtgcacgtgaggtgaactggtgtgtcttcactgtcccagtctgagtgtgggtgtgtgagtggccctgtgatggaatggcgtcctgtccagggctggttccctctttgtgccctgagctactgaaacaggcttcagctacacatgacccagaactggaataattaagtaataattatctttttattcatctttcttaaatgtatgtatagctcacatttatttcaatgtttaatattagaatactttggcctttagaagcttagtgattttttttttccttggccagaagtatgctttaggaacttaatccttattttttagcctctggtaaaattggttttgctatacgttgtttcacttaaaagtcctgattcccaagaacgcactgacagcagtgaggacttgctgcgcatgcgggaggccagattttcttatctgtgtgaagccagacatgaaagagatctgtcaacacataaaacaaaatcaaagtctgttttttgtctggaaaagatttttaataaaaatataacttatgttagtgtcgtgtgttttttaagtgaatattttaatatgtttaatttctatgttagtaaatagcagtagtaaacaacagtgagcaaaagcttttaggtgtcctcagtacattttaagagagtgcaagcgtcctgtgaccaagaagtttgagaactggtgcccaccaggttcatctcacaagttcagtattttaaattccacacaaaaggtagaggaaatagctgaattcgcttcagctgcgcatacatttcacgattatttaaaagtttagagggctaggcgcggtggctcacacccggaatctcagcacttcggtaagctgagccaggtggatcacttgaggtcaggagttccagaccagcctgaccaacatgcggaaacccgtctctactaaaaatacgaaataagcccgggcgtggtggcgcatgcctgtaattccagctacttgggaggctgagacgggaccattgcctgaacccggtcggcggaggtttctgtgagtggagactgcaccattgcactcaagcctgggcaacacagaatgaaactgtctccaaaataaaaatttagaacgtagtcatgtacctcgaaagcgaacactcccaacatagcgtggaacaccccacacccccggcgactttgctccgccttggtcccggtcgcagacaccgcagaaaggccatcgttctagacatacgagaactccccgtgcagccaaacgctgtagtcccagcggcggaactcgggggggggaggggggggagtgcccaaccagccagtcagcagtgacgtcccgcctttcctccgtttccattggtccagccatgcggaggtcgctcccatgggacgccgagcttccggctgcagggcttggcgcccgggcgctttcggattgggagggcttcctccatggaacgcgagcctcgagacgtctgacgttaggcaccgttcgcagcgcctcgggctcgcacggcaggatcgaaagcgtgattggctggcggcgtctgtggtctcgggcaccgcccagtcgcgggacgctgcctctgcggaactgggggtggggcgtgttgacccccttaaaggcgccagagcccgcggtcacggctcaggttcccggtgcttcgcgcgtctgccgttgtcacaggccagggaggtggcaccaccaggcgaagcttggcgagattgtgtcgtcaagcgcgtacgggcgccaattggccgggcgatgtggcgtggactggcgctggcgcgagcgattggctgcgcggcccgggggcggggccagtgggcggtgcgcgccgcagactgtgctcaaagcgggcgccatccgggaccggcggttgtctgtggccggaggctgatcagtgttctagaacagatcagacattttgtaatgatgcctgaaataaacactaaccacctcgacaagcaacaggttcaactcctggcagagatgtgtatccttattgatgaaaatgacaataaaattggagctgagaccaagaagaattgtcacctgaacgagaacattgagaaaggattattgcatcgagcttttagtgtcttcttattcaacaccgaaaataagcttctgctacagcaaagatcagatgctaagattacctttccaggttgttttacgaatacgtgttgtagtcatccattaagcaatccagccgagcttgaggaaagtgacgcccttggagtgaggcgagcagcacagagacggctgaaagctgagctaggaattcccttggaagaggttcctccagaagaaattaattatttaacacgaattcactacaaagctcagtctgatggtatctggggtgaacatgaaattgattacattttgttggtgaggaagaatgtaactttgaatccagatcccaatgagattaaaagctattgttatgtgtcaaaggaagaactaaaagaacttctgaaaaaagcagccagtggtgaaattaagataacgccatggtttaaaattattgcagcgacttttctctttaaatggtgggataacttaaatcatttgaatcagtttgttgaccatgagaaaatatacagaatgtgaatatgtaggtaaatgattacagaaaaatttatctgcttaacaaacttagaatgactttttccttttaaatttagttctatcattaatttatcattaaatttagttctatcatttggtactatcattaatgtattttaaaacttgtgtggaaaaaactaacttataattttgtatcacacaccctggatatgtgttctgtttctaagcgacatttgtgagagattattgtaaaatgagagcgagcaaataaaacttaatttaatctttgcagatacatacttatgggaaatttgaacaaatgagtgaaactctgtgtttttagtaggctgtgataaacatttccggagcacttgcagaggacttgctatttgccaggtgctttatgtatcattaaatttttctcatagttcagaaaaatgtgcaaaggaaactattgtctcgctccttcaaaacagtcttaattaactttcatattagcagattaaactagcagagcaggttcaagggaaattaaatgatatggaccctaatttgtatcattctgagttgattgtgtggtttattcattctggaaacatgttgatacttacagtcagccactgcttttgataagtgatattgattaggttgaatcttcttgtaaatagtatttaccagttagcaaagtctgtgttttcagaattacagtgagcacagaggtgttcataaaatgggaattgagtcccactcggtaagagttgcttaaacttgacactgttgacatttgggctggataaaacccctgtggtggggtctgtgctgtgcattgcaggatggtgagcagcgtccctctcatgtgacacccacagttatgccggatgttgccagatgcccctaggggacagagtcaacccccaactgaggaccactgtcctacagagtcaggaaatattgtagggagaaaaaaataacaacaacaaaggcctgtgttaatgttaaatagatgagattatggaatgtgtatattaatgttaaaaattgtaccttgatcaatgtactttttataaacttgccatagatatctcagatttgaaacctcaagacagatttattattcttaaatgctgtatgataatgaagaaaaataaaaatttatttcttgcaaagtta

SEQ ID NO: 287032 - DNA, 6259 bp, Homo sapiens
acgcccggcttccgccccgcagccccgaggggtctgggcgcgctgaagaccccttcggctgctgggccaacgcccccacccttggtcacctactcctgccgccgagcggttcgcgggaggtggcctcgggggtcgtagctactcaccggcggggcgctccgagtccatctgccccgtagcccggcagccggggcgggagggctgcgagcccggggcgcggtccgcctgaggcctgagacccggggccgcctgcgctcagggccgcggtgccggccgcgcgggagcctggcggggacggcgcggtcagtgttcggctcctccgcagtgactcaccagcgtcctgaagcttttgatcaccattggctgggaaggaaaaacagaatcagctgttccctgcgaaaggtgggacttgggccgcttttttcttagaatctaggttggaaacgtcgcatgatggtctttacgtaaacagccgtctcaacgctctacagaaagcgctaaccgcgcatttgaagcccacctagagtaaatcaagagcgtgaaagcattttttttttctgtgtaggttaacattcctgctccttcctttaaaaaggaagctcaaggccaggcgcggtggctcacgcctgtaatcccaacactttgggaggccgaggccgacgtatcacgagattaggaggtcgagaccagcctggccaacatggtgaaaccctgtctttactaaaaatacaaaaactagccgggcgtggcggcgcgcgcctgtaacccatgctactcggaaggctgaggcaggagaatcgcttgaacccgggaggcggaggttgcagtgagccgagatcgcgcctctgcactccagcctgggacagagcgagcctccgtctccaaaaaaaaataaggaagctcaagatgaagagtcagaagtggtaacttgtttgttgcacaagaaacaaatttagcattctatttaggggatccagattaccaaaaaaaaaaaagaagtgaagttatttctgcattaagtatattaataaaactttatcactaaaaacaattctgtaagaggaacgccaaggaaaaaaatatttgagtttttagagaagtcattttttaaacttttagaggttgtgacatttaagtaacataattttatttagtacctagtatgcaaagacattgtactgggcatggcagcaaatagaaagctttgtaaatcgcagtgtcccatctaattaacccgcattctaacaggtggttttattttgctggaccgcaccacagtcaggtaacaccaagaatatcgctaatgtaattttttaagttgatatatttaggattccataaaagtcactgaaaataactgagagcatgacatgtcacaaaacaagggaaagaaatcattttgaggatcagtcgctttacatcttttgtaactaatttaatccccaaaggaatccaataaagtaaaagttattctaaattgaattttaagcatgagaatgtggaaattactcgtcaaaagtcaaaaataatcgtgcagcagggcaaagactaaaggctggcatcagaatccatattcttttcactgttgatgtgctagggctgcaggaacaaaatactgcaaactaggcagcttaaacaaatttattgtcagaggtctgactggaagtcccaaatcaaggtattggcagggttgattccttctgagagctgtgatgggagcctgttaatgcatctcagcgtctaggcattccttggcttgtggcagcatgcccccgccagtcttcacatgacgttttccatgtccgtgtctgtctgcacacttagcgttctttttatgaggacatcagtcatattggagtacagtagacgctactttaatatgacctcatgttaactaatcatatccacaacaaccctgtttccaaataaggtcacattataaaatactggaagtgaggtctttaacacatgaatttgaaagggggacacaatttaacccataacacactgtatcctgaaataactatccaatgtaatttttttaaaagacacaaaactagccgaaattataaaaggttatgattgcaatcctggtatccagttacattctccctcctgcagaagctgtggagaatcctgtctcagaaaaccaatttctattttgtcacatgtccatctatgcaaaatacatgtactttgtccctgacatagggcaacaatgctgaatttactaagactcatttttgcgcatggtttgatagggaattaagatttactaggtattctgtcattgtcctcattactgattattttaactgtgtctcaaacacttggatagtacactatagtgttataagctgtttgacatgtcgcttcctaaattctcaagttatatatatgtgtgtatatatgtcatgtaacaggcacaactgttttcatgtgtatcactttattgcacttcacaggtatcatatgtttcttacaaagtggaggtttgtggcagccctgcatggagcaagtctgtcagcaccatctttctaacaaaactgcaacagccaccccaactttcaagcactgtctttgtggtgtttacgtgttctcgccacacctgcataggttttctctgggtgctgcagttcttgccacatcccagaggtgtgcacgtgaggtgaactggtgtgtcttcactgtcccagtctgagtgtgggtgtgtgagtggccctgtgatggaatggcgtcctgtccagggctggttccctctttgtgccctgagctactgaaacaggcttcagctacacatgacccagaactggaataattaagtaataattatctttttattcatctttcttaaatgtatgtatagctcacatttatttcaatgtttaatattagaatactttggcctttagaagcttagtgattttttttttccttggccagaagtatgctttaggaacttaatccttattttttagcctctggtaaaattggttttgctatacgttgtttcacttaaaagtcctgattcccaagaacgcactgacagcagtgaggacttgctgcgcatgcgggaggccagattttcttatctgtgtgaagccagacatgaaagagatctgtcaacacataaaacaaaatcaaagtctgttttttgtctggaaaagatttttaataaaaatataacttatgttagtgtcgtgtgttttttaagtgaatattttaatatgtttaatttctatgttagtaaatagcagtagtaaacaacagtgagcaaaagcttttaggtgtcctcagtacattttaagagagtgcaagcgtcctgtgaccaagaagtttgagaactggtgcccaccaggttcatctcacaagttcagtattttaaattccacacaaaaggtagaggaaatagctgaattcgcttcagctgcgcatacatttcacgattatttaaaagtttagagggctaggcgcggtggctcacacccggaatctcagcacttcggtaagctgagccaggtggatcacttgaggtcaggagttccagaccagcctgaccaacatgcggaaacccgtctctactaaaaatacgaaataagcccgggcgtggtggcgcatgcctgtaattccagctacttgggaggctgagacgggaccattgcctgaacccggtcggcggaggtttctgtgagtggagactgcaccattgcactcaagcctgggcaacacagaatgaaactgtctccaaaataaaaatttagaacgtagtcatgtacctcgaaagcgaacactcccaacatagcgtggaacaccccacacccccggcgactttgctccgccttggtcccggtcgcagacaccgcagaaaggccatcgttctagacatacgagaactccccgtgcagccaaacgctgtagtcccagcggcggaactcgggggggggaggggggggagtgcccaaccagccagtcagcagtgacgtcccgcctttcctccgtttccattggtccagccatgcggaggtcgctcccatgggacgccgagcttccggctgcagggcttggcgcccgggcgctttcggattgggagggcttcctccatggaacgcgagcctcgagacgtctgacgttaggcaccgttcgcagcgcctcgggctcgcacggcaggatcgaaagcgtgattggctggcggcgtctgtggtctcgggcaccgcccagtcgcgggacgctgcctctgcggaactgggggtggggcgtgttgacccccttaaaggcgccagagcccgcggtcacggctcaggttcccggtgcttcgcgcgtctgccgttgtcacaggccagggaggtggcaccaccaggcgaagcttggcgagattgtgtcgtcaagcgcgtacgggcgccaattggccgggcgatgtggcgtggactggcgctggcgcgagcgattggctgcgcggcccgggggcggggccagtgggcggtgcgcgccgcagactgtgctcaaagcgggcgccatccgggaccggcggttgtctgtggccggaggctgatcaggattattgcatcgagcttttagtgtcttcttattcaacaccgaaaataagcttctgctacagcaaagatcagatgctaagattacctttccaggttgttttacgaatacgtgttgtagtcatccattaagcaatccagccgagcttgaggaaagtgacgcccttggagtgaggcgagcagcacagagacggctgaaagctgagctaggaattcccttggaagaggttcctccagaagaaattaattatttaacacgaattcactacaaagctcagtctgatggtatctggggtgaacatgaaattgattacattttgttggtgaggaagaatgtaactttgaatccagatcccaatgagattaaaagctattgttatgtgtcaaaggaagaactaaaagaacttctgaaaaaagcagccagtggtgaaattaagataacgccatggtttaaaattattgcagcgacttttctctttaaatggtgggataacttaaatcatttgaatcagtttgttgaccatgagaaaatatacagaatgtgaatatgtaggtaaatgattacagaaaaatttatctgcttaacaaacttagaatgactttttccttttaaatttagttctatcattaatttatcattaaatttagttctatcatttggtactatcattaatgtattatatacactgatactttaaaacttgtgtggaaaaaactaacttataattttgtatcacacaccctggatatgtgttctgtttctaagcgacatttgtgagagattattgtaaaatgagagcgagcaaataaaacttaatttaatctttgcagatacatacttatgggaaatttgaacaaatgagtgaaactctgtgtttttagtaggctgtgataaacatttccggagcacttgcagaggacttgctatttgccaggtgctttatgtatcattaaatttttctcatagttcagaaaaatgtgcaaaggaaactattgtctcgctccttcaaaacagtcttaattaactttcatattagcagattaaactagcagagcaggttcaagggaaattaaatgatatggaccctaatttgtatcattctgagttgattgtgtggtttattcattctggaaacatgttgatacttacagtcagccactgcttttgataagtgatattgattaggttgaatcttcttgtaaatagtatttaccagttagcaaagtctgtgttttcagaattacagtgagcacagaggtgttcataaaatgggaattgagtcccactcggtaagagttgcttaaacttgacactgttgacatttgggctggataaaacccctgtggtggggtctgtgctgtgcattgcaggatggtgagcagcgtccctctcatgtgacacccacagttatgccggatgttgccagatgcccctaggggacagagtcaacccccaactgaggaccactgtcctacagagtcaggaaatattgtagggagaaaaaaataacaacaacaaaggcctgtgttaatgttaaatagatgagattatggaatgtgtatattaatgttaaaaattgtaccttgatcaatgtactttttataaacttgccatagatatctcagatttgaaacctcaagacagatttattattcttaaatgctgtatgataatgaagaaaaataaaaatttatttcttgcaaagtta

SEQ ID NO: 287033 - DNA, 6257 bp, Homo sapiens
acgcccggcttccgccccgcagccccgaggggtctgggcgcgctgaagaccccttcggctgctgggccaacgcccccacccttggtcacctactcctgccgccgagcggttcgcgggaggtggcctcgggggtcgtagctactcaccggcggggcgctccgagtccatctgccccgtagcccggcagccggggcgggagggctgcgagcccggggcgcggtccgcctgaggcctgagacccggggccgcctgcgctcagggccgcggtgccggccgcgcgggagcctggcggggacggcgcggtcagtgttcggctcctccgcagtgactcaccagcgtcctgaagcttttgatcaccattggctgggaaggaaaaacagaatcagctgttccctgcgaaaggtgggacttgggccgcttttttcttagaatctaggttggaaacgtcgcatgatggtctttacgtaaacagccgtctcaacgctctacagaaagcgctaaccgcgcatttgaagcccacctagagtaaatcaagagcgtgaaagcattttttttttctgtgtaggttaacattcctgctccttcctttaaaaaggaagctcaaggccaggcgcggtggctcacgcctgtaatcccaacactttgggaggccgaggccgacgtatcacgagattaggaggtcgagaccagcctggccaacatggtgaaaccctgtctttactaaaaatacaaaaactagccgggcgtggcggcgcgcgcctgtaacccatgctactcggaaggctgaggcaggagaatcgcttgaacccgggaggcggaggttgcagtgagccgagatcgcgcctctgcactccagcctgggacagagcgagcctccgtctccaaaaaaaaataaggaagctcaagatgaagagtcagaagtggtaacttgtttgttgcacaagaaacaaatttagcattctatttaggggatccagattaccaaaaaaaaaaaagaagtgaagttatttctgcattaagtatattaataaaactttatcactaaaaacaattctgtaagaggaacgccaaggaaaaaaatatttgagtttttagagaagtcattttttaaacttttagaggttgtgacatttaagtaacataattttatttagtacctagtatgcaaagacattgtactgggcatggcagcaaatagaaagctttgtaaatcgcagtgtcccatctaattaacccgcattctaacaggtggttttattttgctggaccgcaccacagtcaggtaacaccaagaatatcgctaatgtaattttttaagttgatatatttaggattccataaaagtcactgaaaataactgagagcatgacatgtcacaaaacaagggaaagaaatcattttgaggatcagtcgctttacatcttttgtaactaatttaatccccaaaggaatccaataaagtaaaagttattctaaattgaattttaagcatgagaatgtggaaattactcgtcaaaagtcaaaaataatcgtgcagcagggcaaagactaaaggctggcatcagaatccatattcttttcactgttgatgtgctagggctgcaggaacaaaatactgcaaactaggcagcttaaacaaatttattgtcagaggtctgactggaagtcccaaatcaaggtattggcagggttgattccttctgagagctgtgatgggagcctgttaatgcatctcagcgtctaggcattccttggcttgtggcagcatgcccccgccagtcttcacatgacgttttccatgtccgtgtctgtctgcacacttagcgttctttttatgaggacatcagtcatattggagtacagtagacgctactttaatatgacctcatgttaactaatcatatccacaacaaccctgtttccaaataaggtcacattataaaatactggaagtgaggtctttaacacatgaatttgaaagggggacacaatttaacccataacacactgtatcctgaaataactatccaatgtaatttttttaaaagacacaaaactagccgaaattataaaaggttatgattgcaatcctggtatccagttacattctccctcctgcagaagctgtggagaatcctgtctcagaaaaccaatttctattttgtcacatgtccatctatgcaaaatacatgtactttgtccctgacatagggcaacaatgctgaatttactaagactcatttttgcgcatggtttgatagggaattaagatttactaggtattctgtcattgtcctcattactgattattttaactgtgtctcaaacacttggatagtacactatagtgttataagctgtttgacatgtcgcttcctaaattctcaagttatatatatgtgtgtatatatgtcatgtaacaggcacaactgttttcatgtgtatcactttattgcacttcacaggtatcatatgtttcttacaaagtggaggtttgtggcagccctgcatggagcaagtctgtcagcaccatctttctaacaaaactgcaacagccaccccaactttcaagcactgtctttgtggtgtttacgtgttctcgccacacctgcataggttttctctgggtgctgcagttcttgccacatcccagaggtgtgcacgtgaggtgaactggtgtgtcttcactgtcccagtctgagtgtgggtgtgtgagtggccctgtgatggaatggcgtcctgtccagggctggttccctctttgtgccctgagctactgaaacaggcttcagctacacatgacccagaactggaataattaagtaataattatctttttattcatctttcttaaatgtatgtatagctcacatttatttcaatgtttaatattagaatactttggcctttagaagcttagtgattttttttttccttggccagaagtatgctttaggaacttaatccttattttttagcctctggtaaaattggttttgctatacgttgtttcacttaaaagtcctgattcccaagaacgcactgacagcagtgaggacttgctgcgcatgcgggaggccagattttcttatctgtgtgaagccagacatgaaagagatctgtcaacacataaaacaaaatcaaagtctgttttttgtctggaaaagatttttaataaaaatataacttatgttagtgtcgtgtgttttttaagtgaatattttaatatgtttaatttctatgttagtaaatagcagtagtaaacaacagtgagcaaaagcttttaggtgtcctcagtacattttaagagagtgcaagcgtcctgtgaccaagaagtttgagaactggtgcccaccaggttcatctcacaagttcagtattttaaattccacacaaaaggtagaggaaatagctgaattcgcttcagctgcgcatacatttcacgattatttaaaagtttagagggctaggcgcggtggctcacacccggaatctcagcacttcggtaagctgagccaggtggatcacttgaggtcaggagttccagaccagcctgaccaacatgcggaaacccgtctctactaaaaatacgaaataagcccgggcgtggtggcgcatgcctgtaattccagctacttgggaggctgagacgggaccattgcctgaacccggtcggcggaggtttctgtgagtggagactgcaccattgcactcaagcctgggcaacacagaatgaaactgtctccaaaataaaaatttagaacgtagtcatgtacctcgaaagcgaacactcccaacatagcgtggaacaccccacacccccggcgactttgctccgccttggtcccggtcgcagacaccgcagaaaggccatcgttctagacatacgagaactccccgtgcagccaaacgctgtagtcccagcggcggaactcgggggggggaggggggggagtgcccaaccagccagtcagcagtgacgtcccgcctttcctccgtttccattggtccagccatgcggaggtcgctcccatgggacgccgagcttccggctgcagggcttggcgcccgggcgctttcggattgggagggcttcctccatggaacgcgagcctcgagacgtctgacgttaggcaccgttcgcagcgcctcgggctcgcacggcaggatcgaaagcgtgattggctggcggcgtctgtggtctcgggcaccgcccagtcgcgggacgctgcctctgcggaactgggggtggggcgtgttgacccccttaaaggcgccagagcccgcggtcacggctcaggttcccggtgcttcgcgcgtctgccgttgtcacaggccagggaggtggcaccaccaggcgaagcttggcgagattgtgtcgtcaagcgcgtacgggcgccaattggccgggcgatgtggcgtggactggcgctggcgcgagcgattggctgcgcggcccgggggcggggccagtgggcggtgcgcgccgcagactgtgctcaaagcgggcgccatccgggaccggcggttgtctgtggccggaggctgatcagtgttctagaacagatcagacattttgtaatgatgcctgaaataaacactaaccacctcgacaagcaacaggttcaactcctggcagagatgtgtatccttattgatgaaaatgacaataaaattggagctgagaccaagaagaattgtcacctgaacgagaacattgagaaaggattattgcatcgagcttttagtgtcttcttattcaacaccgaaaataagcttctgctacagcaaagatcagatgctaagattacctttccaggttgttttacgaatacgtgttgtagtcatccattaagcaatccagccgagcttgaggaaagtgacgcccttggagtgaggcgagcagcacagagacggctgaaagctgagctaggaattcccttggaagaggttcctccagaagaaattaattatttaacacgaattcactacaaagctcagtctgatggtatctggggtgaacatgaaattgattacattttgttggtgaggaagaatgtaactttgaatccagatcccaatgagattaaaagctattgttatgtgtcaaaggaagaactaaaagaacttctgaaaaaagcagccagtggtgaaattaagataacgccatggtttaaaattattgcagcgacttttctctttaaatggtgggataacttaaatcatttgaatcagtttgttgaccatgagaaaatatacagaatgtgaatatgtaggtaaatgattacagaaaaatttatctgcttaacaaacttagaatgactttttccttttaaatttagttctatcattaatttatcattaaatttagttctatcatttggtactatcattaatgtattatatacactgatactttaaaacttgtgtggaaaaaactaacttataattttgtatcacacaccctggatatgtgttctgtttctaagcgacatttgtgagagattattgtaaaatgagagcgagcaaataaaacttaatttaatctttgcagatacatacttatgggaaatttgaacaaatgagtgaaactctgtgtttttagtaggctgtgataaacatttccggagcacttgcagaggacttgctatttgccaggtgctttatgtatcattaaatttttctcatagttcagaaaaatgtgcaaaggaaactattgtctcgctccttcaaaacagtcttaattaactttcatattagcagattaaactagcagagcaggttcaagggaaattaaatgatatggaccctaatttgtatcattctgagttgattgtgtggtttattcattctggaaacatgttgatacttacagtcagccactgcttttgataagtgatattgattaggttgaatcttcttgtaaatagtatttaccagttagcaaagtctgtgttttcagaattacagtgagcacagaggtgttcataaaatgggaattgagtcccactcggtaagagttgcttaaacttgacactgttgacatttgggctggataaaacccctgtggtggggtctgtgctgtgcattgcaggatggtgagcagcgtccctctcatgtgacacccacagttatgccggatgttgccagatgcccctaggggacagagtcaacccccaactgaggaccactgtcctacagagaaaaaaaatatattattttattataattttgcggcgcaattcgggttaacttgg

SEQ ID NO: 287034 - DNA, 6069 bp, Homo sapiens
  misc_feature (6028)..(6028): n is a, c, g, or t
acgcccggcttccgccccgcagccccgaggggtctgggcgcgctgaagaccccttcggctgctgggccaacgcccccacccttggtcacctactcctgccgccgagcggttcgcgggaggtggcctcgggggtcgtagctactcaccggcggggcgctccgagtccatctgccccgtagcccggcagccggggcgggagggctgcgagcccggggcgcggtccgcctgaggcctgagacccggggccgcctgcgctcagggccgcggtgccggccgcgcgggagcctggcggggacggcgcggtcagtgttcggctcctccgcagtgactcaccagcgtcctgaagcttttgatcaccattggctgggaaggaaaaacagaatcagctgttccctgcgaaaggtgggacttgggccgcttttttcttagaatctaggttggaaacgtcgcatgatggtctttacgtaaacagccgtctcaacgctctacagaaagcgctaaccgcgcatttgaagcccacctagagtaaatcaagagcgtgaaagcattttttttttctgtgtaggttaacattcctgctccttcctttaaaaaggaagctcaaggccaggcgcggtggctcacgcctgtaatcccaacactttgggaggccgaggccgacgtatcacgagattaggaggtcgagaccagcctggccaacatggtgaaaccctgtctttactaaaaatacaaaaactagccgggcgtggcggcgcgcgcctgtaacccatgctactcggaaggctgaggcaggagaatcgcttgaacccgggaggcggaggttgcagtgagccgagatcgcgcctctgcactccagcctgggacagagcgagcctccgtctccaaaaaaaaataaggaagctcaagatgaagagtcagaagtggtaacttgtttgttgcacaagaaacaaatttagcattctatttaggggatccagattaccaaaaaaaaaaaagaagtgaagttatttctgcattaagtatattaataaaactttatcactaaaaacaattctgtaagaggaacgccaaggaaaaaaatatttgagtttttagagaagtcattttttaaacttttagaggttgtgacatttaagtaacataattttatttagtacctagtatgcaaagacattgtactgggcatggcagcaaatagaaagctttgtaaatcgcagtgtcccatctaattaacccgcattctaacaggtggttttattttgctggaccgcaccacagtcaggtaacaccaagaatatcgctaatgtaattttttaagttgatatatttaggattccataaaagtcactgaaaataactgagagcatgacatgtcacaaaacaagggaaagaaatcattttgaggatcagtcgctttacatcttttgtaactaatttaatccccaaaggaatccaataaagtaaaagttattctaaattgaattttaagcatgagaatgtggaaattactcgtcaaaagtcaaaaataatcgtgcagcagggcaaagactaaaggctggcatcagaatccatattcttttcactgttgatgtgctagggctgcaggaacaaaatactgcaaactaggcagcttaaacaaatttattgtcagaggtctgactggaagtcccaaatcaaggtattggcagggttgattccttctgagagctgtgatgggagcctgttaatgcatctcagcgtctaggcattccttggcttgtggcagcatgcccccgccagtcttcacatgacgttttccatgtccgtgtctgtctgcacacttagcgttctttttatgaggacatcagtcatattggagtacagtagacgctactttaatatgacctcatgttaactaatcatatccacaacaaccctgtttccaaataaggtcacattataaaatactggaagtgaggtctttaacacatgaatttgaaagggggacacaatttaacccataacacactgtatcctgaaataactatccaatgtaatttttttaaaagacacaaaactagccgaaattataaaaggttatgattgcaatcctggtatccagttacattctccctcctgcagaagctgtggagaatcctgtctcagaaaaccaatttctattttgtcacatgtccatctatgcaaaatacatgtactttgtccctgacatagggcaacaatgctgaatttactaagactcatttttgcgcatggtttgatagggaattaagatttactaggtattctgtcattgtcctcattactgattattttaactgtgtctcaaacacttggatagtacactatagtgttataagctgtttgacatgtcgcttcctaaattctcaagttatatatatgtgtgtatatatgtcatgtaacaggcacaactgttttcatgtgtatcactttattgcacttcacaggtatcatatgtttcttacaaagtggaggtttgtggcagccctgcatggagcaagtctgtcagcaccatctttctaacaaaactgcaacagccaccccaactttcaagcactgtctttgtggtgtttacgtgttctcgccacacctgcataggttttctctgggtgctgcagttcttgccacatcccagaggtgtgcacgtgaggtgaactggtgtgtcttcactgtcccagtctgagtgtgggtgtgtgagtggccctgtgatggaatggcgtcctgtccagggctggttccctctttgtgccctgagctactgaaacaggcttcagctacacatgacccagaactggaataattaagtaataattatctttttattcatctttcttaaatgtatgtatagctcacatttatttcaatgtttaatattagaatactttggcctttagaagcttagtgattttttttttccttggccagaagtatgctttaggaacttaatccttattttttagcctctggtaaaattggttttgctatacgttgtttcacttaaaagtcctgattcccaagaacgcactgacagcagtgaggacttgctgcgcatgcgggaggccagattttcttatctgtgtgaagccagacatgaaagagatctgtcaacacataaaacaaaatcaaagtctgttttttgtctggaaaagatttttaataaaaatataacttatgttagtgtcgtgtgttttttaagtgaatattttaatatgtttaatttctatgttagtaaatagcagtagtaaacaacagtgagcaaaagcttttaggtgtcctcagtacattttaagagagtgcaagcgtcctgtgaccaagaagtttgagaactggtgcccaccaggttcatctcacaagttcagtattttaaattccacacaaaaggtagaggaaatagctgaattcgcttcagctgcgcatacatttcacgattatttaaaagtttagagggctaggcgcggtggctcacacccggaatctcagcacttcggtaagctgagccaggtggatcacttgaggtcaggagttccagaccagcctgaccaacatgcggaaacccgtctctactaaaaatacgaaataagcccgggcgtggtggcgcatgcctgtaattccagctacttgggaggctgagacgggaccattgcctgaacccggtcggcggaggtttctgtgagtggagactgcaccattgcactcaagcctgggcaacacagaatgaaactgtctccaaaataaaaatttagaacgtagtcatgtacctcgaaagcgaacactcccaacatagcgtggaacaccccacacccccggcgactttgctccgccttggtcccggtcgcagacaccgcagaaaggccatcgttctagacatacgagaactccccgtgcagccaaacgctgtagtcccagcggcggaactcgggggggggaggggggggagtgcccaaccagccagtcagcagtgacgtcccgcctttcctccgtttccattggtccagccatgcggaggtcgctcccatgggacgccgagcttccggctgcagggcttggcgcccgggcgctttcggattgggagggcttcctccatggaacgcgagcctcgagacgtctgacgttaggcaccgttcgcagcgcctcgggctcgcacggcaggatcgaaagcgtgattggctggcggcgtctgtggtctcgggcaccgcccagtcgcgggacgctgcctctgcggaactgggggtggggcgtgttgacccccttaaaggcgccagagcccgcggtcacggctcaggttcccggtgcttcgcgcgtctgccgttgtcacaggccagggaggtggcaccaccaggcgaagcttggcgagattgtgtcgtcaagcgcgtacgggcgccaattggccgggcgatgtggcgtggactggcgctggcgcgagcgattggctgcgcggcccgggggcggggccagtgggcggtgcgcgccgcagactgtgctcaaagcgggcgccatccgggaccggcggttgtctgtggccggaggctgatcagtgttctagaacagatcagacattttgtaatgatgcctgaaataaacactaaccacctcgacaagcaacaggttcaactcctggcagagatgtgtatccttattgatgaaaatgacaataaaattggagctgagaccaagaagaattgtcacctgaacgagaacattgagaaaggattattgcatcgagcttttagtgtcttcttattcaacaccgaaaataagcttctgctacagcaaagatcagatgctaagattacctttccaggttgttttacgaatacgtgttgtagtcatccattaagcaatccagccgagcttgaggaaagtgacgcccttggagtgaggcgagcagcacagagacggctgaaagctgagctaggaattcccttggaagaggttcctccagaagaaattaattatttaacacgaattcactacaaagctcagtctgatggtatctggggtgaacatgaaattgattacattttgttggtgaggaagaatgtaactttgaatccagatcccaatgagattaaaagctattgttatgtgtcaaaggaagaactaaaagaacttctgaaaaaagcagccagtggtgaaattaagataacgccatggtttaaaattattgcagcgacttttctctttaaatggtgggataacttaaatcatttgaatcagtttgttgaccatgagaaaatatacagaatgtgaatatgtaggtaaatgattacagaaaaatttatctgcttaacaaacttagaatgactttttccttttaaatttagttctatcattaatttatcattaaatttagttctatcatttggtactatcattaatgtattatatacactgatactttaaaacttgtgtggaaaaaactaacttataattttgtatcacacaccctggatatgtgttctgtttctaagcgacatttgtgagagattattgtaaaatgagagcgagcaaataaaacttaatttaatctttgcagatacatacttatgggaaatttgaacaaatgagtgaaactctgtgtttttagtaggctgtgataaacatttccggagcacttgcagaggacttgctatttgccaggtgctttatgtatcattaaatttttctcatagttcagaaaaatgtgcaaaggaaactattgtctcgctccttcaaaacagtcttaattaactttcatattagcagattaaactagcagagcaggttcaagggaaattaaatgatatggaccctaatttgtatcattctgagttgattgtgtggtttattcattctggaaacatgttgatacttacagtcagccactgcttttgataagtgatattgattaggttgaatcttcttgtaaatagtatttaccagttagcaaagtctgtgttttcagaattacagtgagcacagaggtgttcataaaatgggaattgagtcccactcggtaagagttgctatngaacttctaactaggggtaccggctcgattcgtatctgtat

SEQ ID NO: 287035 - DNA, 7032 bp, Homo sapiens
acgcccggcttccgccccgcagccccgaggggtctgggcgcgctgaagaccccttcggctgctgggccaacgcccccacccttggtcacctactcctgccgccgagcggttcgcgggaggtggcctcgggggtcgtagctactcaccggcggggcgctccgagtccatctgccccgtagcccggcagccggggcgggagggctgcgagcccggggcgcggtccgcctgaggcctgagacccggggccgcctgcgctcagggccgcggtgccggccgcgcgggagcctggcggggacggcgcggtcagtgttcggctcctccgcagtgactcaccagcgtcctgaagcttttgatcaccattggctgggaaggaaaaacagaatcagctgttccctgcgaaaggtgggacttgggccgcttttttcttagaatctaggttggaaacgtcgcatgatggtctttacgtaaacagccgtctcaacgctctacagaaagcgctaaccgcgcatttgaagcccacctagagtaaatcaagagcgtgaaagcattttttttttctgtgtaggttaacattcctgctccttcctttaaaaaggaagctcaaggccaggcgcggtggctcacgcctgtaatcccaacactttgggaggccgaggccgacgtatcacgagattaggaggtcgagaccagcctggccaacatggtgaaaccctgtctttactaaaaatacaaaaactagccgggcgtggcggcgcgcgcctgtaacccatgctactcggaaggctgaggcaggagaatcgcttgaacccgggaggcggaggttgcagtgagccgagatcgcgcctctgcactccagcctgggacagagcgagcctccgtctccaaaaaaaaataaggaagctcaagatgaagagtcagaagtggtaacttgtttgttgcacaagaaacaaatttagcattctatttaggggatccagattaccaaaaaaaaaaaagaagtgaagttatttctgcattaagtatattaataaaactttatcactaaaaacaattctgtaagaggaacgccaaggaaaaaaatatttgagtttttagagaagtcattttttaaacttttagaggttgtgacatttaagtaacataattttatttagtacctagtatgcaaagacattgtactgggcatggcagcaaatagaaagctttgtaaatcgcagtgtcccatctaattaacccgcattctaacaggtggttttattttgctggaccgcaccacagtcaggtaacaccaagaatatcgctaatgtaattttttaagttgatatatttaggattccataaaagtcactgaaaataactgagagcatgacatgtcacaaaacaagggaaagaaatcattttgaggatcagtcgctttacatcttttgtaactaatttaatccccaaaggaatccaataaagtaaaagttattctaaattgaattttaagcatgagaatgtggaaattactcgtcaaaagtcaaaaataatcgtgcagcagggcaaagactaaaggctggcatcagaatccatattcttttcactgttgatgtgctagggctgcaggaacaaaatactgcaaactaggcagcttaaacaaatttattgtcagaggtctgactggaagtcccaaatcaaggtattggcagggttgattccttctgagagctgtgatgggagcctgttaatgcatctcagcgtctaggcattccttggcttgtggcagcatgcccccgccagtcttcacatgacgttttccatgtccgtgtctgtctgcacacttagcgttctttttatgaggacatcagtcatattggagtacagtagacgctactttaatatgacctcatgttaactaatcatatccacaacaaccctgtttccaaataaggtcacattataaaatactggaagtgaggtctttaacacatgaatttgaaagggggacacaatttaacccataacacactgtatcctgaaataactatccaatgtaatttttttaaaagacacaaaactagccgaaattataaaaggttatgattgcaatcctggtatccagttacattctccctcctgcagaagctgtggagaatcctgtctcagaaaaccaatttctattttgtcacatgtccatctatgcaaaatacatgtactttgtccctgacatagggcaacaatgctgaatttactaagactcatttttgcgcatggtttgatagggaattaagatttactaggtattctgtcattgtcctcattactgattattttaactgtgtctcaaacacttggatagtacactatagtgttataagctgtttgacatgtcgcttcctaaattctcaagttatatatatgtgtgtatatatgtcatgtaacaggcacaactgttttcatgtgtatcactttattgcacttcacaggtatcatatgtttcttacaaagtggaggtttgtggcagccctgcatggagcaagtctgtcagcaccatctttctaacaaaactgcaacagccaccccaactttcaagcactgtctttgtggtgtttacgtgttctcgccacacctgcataggttttctctgggtgctgcagttcttgccacatcccagaggtgtgcacgtgaggtgaactggtgtgtcttcactgtcccagtctgagtgtgggtgtgtgagtggccctgtgatggaatggcgtcctgtccagggctggttccctctttgtgccctgagctactgaaacaggcttcagctacacatgacccagaactggaataattaagtaataattatctttttattcatctttcttaaatgtatgtatagctcacatttatttcaatgtttaatattagaatactttggcctttagaagcttagtgattttttttttccttggccagaagtatgctttaggaacttaatccttattttttagcctctggtaaaattggttttgctatacgttgtttcacttaaaagtcctgattcccaagaacgcactgacagcagtgaggacttgctgcgcatgcgggaggccagattttcttatctgtgtgaagccagacatgaaagagatctgtcaacacataaaacaaaatcaaagtctgttttttgtctggaaaagatttttaataaaaatataacttatgttagtgtcgtgtgttttttaagtgaatattttaatatgtttaatttctatgttagtaaatagcagtagtaaacaacagtgagcaaaagcttttaggtgtcctcagtacattttaagagagtgcaagcgtcctgtgaccaagaagtttgagaactggtgcccaccaggttcatctcacaagttcagtattttaaattccacacaaaaggtagaggaaatagctgaattcgcttcagctgcgcatacatttcacgattatttaaaagtttagagggctaggcgcggtggctcacacccggaatctcagcacttcggtaagctgagccaggtggatcacttgaggtcaggagttccagaccagcctgaccaacatgcggaaacccgtctctactaaaaatacgaaataagcccgggcgtggtggcgcatgcctgtaattccagctacttgggaggctgagacgggaccattgcctgaacccggtcggcggaggtttctgtgagtggagactgcaccattgcactcaagcctgggcaacacagaatgaaactgtctccaaaataaaaatttagaacgtagtcatgtacctcgaaagcgaacactcccaacatagcgtggaacaccccacacccccggcgactttgctccgccttggtcccggtcgcagacaccgcagaaaggccatcgttctagacatacgagaactccccgtgcagccaaacgctgtagtcccagcggcggaactcgggggggggaggggggggagtgcccaaccagccagtcagcagtgacgtcccgcctttcctccgtttccattggtccagccatgcggaggtcgctcccatgggacgccgagcttccggctgcagggcttggcgcccgggcgctttcggattgggagggcttcctccatggaacgcgagcctcgagacgtctgacgttaggcaccgttcgcagcgcctcgggctcgcacggcaggatcgaaagcgtgattggctggcggcgtctgtggtctcgggcaccgcccagtcgcgggacgctgcctctgcggaactgggggtggggcgtgttgacccccttaaaggcgccagagcccgcggtcacggctcaggttcccggtgcttcgcgcgtctgccgttgtcacaggccagggaggtggcaccaccaggcgaagcttggcgagattgtgtcgtcaagcgcgtacgggcgccaattggccgggcgatgtggcgtggactggcgctggcgcgagcgattggctgcgcggcccgggggcggggccagtgggcggtgcgcgccgcagactgtgctcaaagcgggcgccatccgggaccggcggttgtctgtggccggaggctgatcaggtactgtggacgggcggcggagttcgggagacaggggcagggcggcatcggggagctgcgggacggggcggggaggaggcccgaggtctgagccacccgtgaggtctcggcgcggaggcctggacagctgggggtggcggcgttggtctcccgaactggagggaggccgggccttcccgggctgtggtgggcgcccgcgccccgtggaaggcggaggcgtgagtcggggcgtcagagacgttgccattctttgtcagcggaaaagatcgtcgtctgcgcacagtcacctgaggtttaggaactcgtggaactggaaaccgagtcgcaggagactaagagttgcgagtctccccttagagaattcagaaacaagcgtagacagcatcgtcagaaacacgagcgtgacgacaccggcctccccgtgccgagtccacgcgtgtgacgcgggtgcatacacctgcgtccgtgcaagagggtgacagcaacacactcaaggcgcttctcctgggaatggagcaggagaagagatggggagcatcgcatagatggaactagacctttttcttgggttggatgatgtgttcccgcgtctactacatgtgttctagaacagatcagacattttgtaatgatgcctgaaataaacactaaccacctcgacaagcaacaggttcaactcctggcagagatgtgtatccttattgatgaaaatgacaataaaattggagctgagaccaagaagaattgtcacctgaacgagaacattgagaaaggattattgcatcgagcttttagtgtcttcttattcaacaccgaaaataagcttctgctacagcaaagatcagatgctaagattacctttccaggttgttttacgaatacgtgttgtagtcatccattaagcaatccagccgagcttgaggaaagtgacgcccttggagtgaggcgagcagcacagagacggctgaaagctgagctaggaattcccttggaagaggttcctccagaagaaattaattatttaacacgaattcactacaaagctcagtctgatggtatctggggtgaacatgaaattgattacattttgttggtgaggaagaatgtaactttgaatccagatcccaatgagattaaaagctattgttatgtgtcaaaggaagaactaaaagaacttctgaaaaaagcagccagtggtgaaattaagataacgccatggtttaaaattattgcagcgacttttctctttaaatggtgggataacttaaatcatttgaatcagtttgttgaccatgagaaaatatacagaatgtgaatatgtaggtaaatgattacagaaaaatttatctgcttaacaaacttagaatgactttttccttttaaatttagttctatcattaatttatcattaaatttagttctatcatttggtactatcattaatgtattatatacactgatactttaaaacttgtgtggaaaaaactaacttataattttgtatcacacaccctggatatgtgttctgtttctaagcgacatttgtgagagattattgtaaaatgagagcgagcaaataaaacttaatttaatctttgcagatacatacttatgggaaatttgaacaaatgagtgaaactctgtgtttttagtaggctgtgataaacatttccggagcacttgcagaggacttgctatttgccaggtgctttatgtatcattaaatttttctcatagttcagaaaaatgtgcaaaggaaactattgtctcgctccttcaaaacagtcttaattaactttcatattagcagattaaactagcagagcaggttcaagggaaattaaatgatatggaccctaatttgtatcattctgagttgattgtgtggtttattcattctggaaacatgttgatacttacagtcagccactgcttttgataagtgatattgattaggttgaatcttcttgtaaatagtatttaccagttagcaaagtctgtgttttcagaattacagtgagcacagaggtgttcataaaatgggaattgagtcccactcggtaagagttgcttaaacttgacactgttgacatttgggctggataaaacccctgtggtggggtctgtgctgtgcattgcaggatggtgagcagcgtccctctcatgtgacacccacagttatgccggatgttgccagatgcccctaggggacagagtcaacccccaactgaggaccactgtcctacagagtcaggaaatattgtagggagaaaaaaataacaacaacaaaggcctgtgttaatgttaaatagatgagattatggaatgtgtatattaatgttaaaaattgtaccttgatcaatgtactttttataaacttgccatagatatctcagatttgaaacctcaagacagatttattattcttaaatgctgtatgataatgaagaaaaataaaaatttatttcttgcaaagtta

SEQ ID NO: 287036 - DNA, 7038 bp, Homo sapiens
acgcccggcttccgccccgcagccccgaggggtctgggcgcgctgaagaccccttcggctgctgggccaacgcccccacccttggtcacctactcctgccgccgagcggttcgcgggaggtggcctcgggggtcgtagctactcaccggcggggcgctccgagtccatctgccccgtagcccggcagccggggcgggagggctgcgagcccggggcgcggtccgcctgaggcctgagacccggggccgcctgcgctcagggccgcggtgccggccgcgcgggagcctggcggggacggcgcggtcagtgttcggctcctccgcagtgactcaccagcgtcctgaagcttttgatcaccattggctgggaaggaaaaacagaatcagctgttccctgcgaaaggtgggacttgggccgcttttttcttagaatctaggttggaaacgtcgcatgatggtctttacgtaaacagccgtctcaacgctctacagaaagcgctaaccgcgcatttgaagcccacctagagtaaatcaagagcgtgaaagcattttttttttctgtgtaggttaacattcctgctccttcctttaaaaaggaagctcaaggccaggcgcggtggctcacgcctgtaatcccaacactttgggaggccgaggccgacgtatcacgagattaggaggtcgagaccagcctggccaacatggtgaaaccctgtctttactaaaaatacaaaaactagccgggcgtggcggcgcgcgcctgtaacccatgctactcggaaggctgaggcaggagaatcgcttgaacccgggaggcggaggttgcagtgagccgagatcgcgcctctgcactccagcctgggacagagcgagcctccgtctccaaaaaaaaataaggaagctcaagatgaagagtcagaagtggtaacttgtttgttgcacaagaaacaaatttagcattctatttaggggatccagattaccaaaaaaaaaaaagaagtgaagttatttctgcattaagtatattaataaaactttatcactaaaaacaattctgtaagaggaacgccaaggaaaaaaatatttgagtttttagagaagtcattttttaaacttttagaggttgtgacatttaagtaacataattttatttagtacctagtatgcaaagacattgtactgggcatggcagcaaatagaaagctttgtaaatcgcagtgtcccatctaattaacccgcattctaacaggtggttttattttgctggaccgcaccacagtcaggtaacaccaagaatatcgctaatgtaattttttaagttgatatatttaggattccataaaagtcactgaaaataactgagagcatgacatgtcacaaaacaagggaaagaaatcattttgaggatcagtcgctttacatcttttgtaactaatttaatccccaaaggaatccaataaagtaaaagttattctaaattgaattttaagcatgagaatgtggaaattactcgtcaaaagtcaaaaataatcgtgcagcagggcaaagactaaaggctggcatcagaatccatattcttttcactgttgatgtgctagggctgcaggaacaaaatactgcaaactaggcagcttaaacaaatttattgtcagaggtctgactggaagtcccaaatcaaggtattggcagggttgattccttctgagagctgtgatgggagcctgttaatgcatctcagcgtctaggcattccttggcttgtggcagcatgcccccgccagtcttcacatgacgttttccatgtccgtgtctgtctgcacacttagcgttctttttatgaggacatcagtcatattggagtacagtagacgctactttaatatgacctcatgttaactaatcatatccacaacaaccctgtttccaaataaggtcacattataaaatactggaagtgaggtctttaacacatgaatttgaaagggggacacaatttaacccataacacactgtatcctgaaataactatccaatgtaatttttttaaaagacacaaaactagccgaaattataaaaggttatgattgcaatcctggtatccagttacattctccctcctgcagaagctgtggagaatcctgtctcagaaaaccaatttctattttgtcacatgtccatctatgcaaaatacatgtactttgtccctgacatagggcaacaatgctgaatttactaagactcatttttgcgcatggtttgatagggaattaagatttactaggtattctgtcattgtcctcattactgattattttaactgtgtctcaaacacttggatagtacactatagtgttataagctgtttgacatgtcgcttcctaaattctcaagttatatatatgtgtgtatatatgtcatgtaacaggcacaactgttttcatgtgtatcactttattgcacttcacaggtatcatatgtttcttacaaagtggaggtttgtggcagccctgcatggagcaagtctgtcagcaccatctttctaacaaaactgcaacagccaccccaactttcaagcactgtctttgtggtgtttacgtgttctcgccacacctgcataggttttctctgggtgctgcagttcttgccacatcccagaggtgtgcacgtgaggtgaactggtgtgtcttcactgtcccagtctgagtgtgggtgtgtgagtggccctgtgatggaatggcgtcctgtccagggctggttccctctttgtgccctgagctactgaaacaggcttcagctacacatgacccagaactggaataattaagtaataattatctttttattcatctttcttaaatgtatgtatagctcacatttatttcaatgtttaatattagaatactttggcctttagaagcttagtgattttttttttccttggccagaagtatgctttaggaacttaatccttattttttagcctctggtaaaattggttttgctatacgttgtttcacttaaaagtcctgattcccaagaacgcactgacagcagtgaggacttgctgcgcatgcgggaggccagattttcttatctgtgtgaagccagacatgaaagagatctgtcaacacataaaacaaaatcaaagtctgttttttgtctggaaaagatttttaataaaaatataacttatgttagtgtcgtgtgttttttaagtgaatattttaatatgtttaatttctatgttagtaaatagcagtagtaaacaacagtgagcaaaagcttttaggtgtcctcagtacattttaagagagtgcaagcgtcctgtgaccaagaagtttgagaactggtgcccaccaggttcatctcacaagttcagtattttaaattccacacaaaaggtagaggaaatagctgaattcgcttcagctgcgcatacatttcacgattatttaaaagtttagagggctaggcgcggtggctcacacccggaatctcagcacttcggtaagctgagccaggtggatcacttgaggtcaggagttccagaccagcctgaccaacatgcggaaacccgtctctactaaaaatacgaaataagcccgggcgtggtggcgcatgcctgtaattccagctacttgggaggctgagacgggaccattgcctgaacccggtcggcggaggtttctgtgagtggagactgcaccattgcactcaagcctgggcaacacagaatgaaactgtctccaaaataaaaatttagaacgtagtcatgtacctcgaaagcgaacactcccaacatagcgtggaacaccccacacccccggcgactttgctccgccttggtcccggtcgcagacaccgcagaaaggccatcgttctagacatacgagaactccccgtgcagccaaacgctgtagtcccagcggcggaactcgggggggggaggggggggagtgcccaaccagccagtcagcagtgacgtcccgcctttcctccgtttccattggtccagccatgcggaggtcgctcccatgggacgccgagcttccggctgcagggcttggcgcccgggcgctttcggattgggagggcttcctccatggaacgcgagcctcgagacgtctgacgttaggcaccgttcgcagcgcctcgggctcgcacggcaggatcgaaagcgtgattggctggcggcgtctgtggtctcgggcaccgcccagtcgcgggacgctgcctctgcggaactgggggtggggcgtgttgacccccttaaaggcgccagagcccgcggtcacggctcaggttcccggtgcttcgcgcgtctgccgttgtcacaggccagggaggtggcaccaccaggcgaagcttggcgagattgtgtcgtcaagcgcgtacgggcgccaattggccgggcgatgtggcgtggactggcgctggcgcgagcgattggctgcgcggcccgggggcggggccagtgggcggtgcgcgccgcagactgtgctcaaagcgggcgccatccgggaccggcggttgtctgtggccggaggctgatcagtgttctagaacagatcagacattttgtaatgatgcctgaaataaacactaaccacctcgacaagcaacaggttcaactcctggcagagatgtgtatccttattgatgaaaatgacaataaaattggagctgagaccaagaagaattgtcacctgaacgagaacattgagaaagggtgctgctttgaaacagtctttcttgtaaagcgatttgtgtaggcatttccgatttgctgagaagagcactctgttcaaggaagtgcagtcttcagtaataccgtattttctcgttggttccagttcgttaaatagtgtggtcattagcatctgctttgctgtcttcctgttacagcgatttctcttcacttcatgcctgttactcggcttcttcagagttattctggattcatagaagagggactagccctgacatacagcagcagcctagcctctaatatttctagagagtggagagaggcgggcaccatgcagggaagcgtgtgccttcaccactttccgagaactgaatgtccttgatagggaacttgactgccggaaaggggccaccagcatcaccatttccttcactcgacggccaacttccttgcccagtgcagagctcttcctcaccatagccatgcagagactatgcatgtggataaaccatgggaaaaagcaaaagcagcagcaagttactaatgttattctgaactgcagggagagaatttggcaaataactggtacttaaggctaaaataattgttatttcttttgctttcaggattattgcatcgagcttttagtgtcttcttattcaacaccgaaaataagcttctgctacagcaaagatcagatgctaagattacctttccaggttgttttacgaatacgtgttgtagtcatccattaagcaatccagccgagcttgaggaaagtgacgcccttggagtgaggcgagcagcacagagacggctgaaagctgagctaggaattcccttggaagaggttcctccagaagaaattaattatttaacacgaattcactacaaagctcagtctgatggtatctggggtgaacatgaaattgattacattttgttggtgaggaagaatgtaactttgaatccagatcccaatgagattaaaagctattgttatgtgtcaaaggaagaactaaaagaacttctgaaaaaagcagccagtggtgaaattaagataacgccatggtttaaaattattgcagcgacttttctctttaaatggtgggataacttaaatcatttgaatcagtttgttgaccatgagaaaatatacagaatgtgaatatgtaggtaaatgattacagaaaaatttatctgcttaacaaacttagaatgactttttccttttaaatttagttctatcattaatttatcattaaatttagttctatcatttggtactatcattaatgtattatatacactgatactttaaaacttgtgtggaaaaaactaacttataattttgtatcacacaccctggatatgtgttctgtttctaagcgacatttgtgagagattattgtaaaatgagagcgagcaaataaaacttaatttaatctttgcagatacatacttatgggaaatttgaacaaatgagtgaaactctgtgtttttagtaggctgtgataaacatttccggagcacttgcagaggacttgctatttgccaggtgctttatgtatcattaaatttttctcatagttcagaaaaatgtgcaaaggaaactattgtctcgctccttcaaaacagtcttaattaactttcatattagcagattaaactagcagagcaggttcaagggaaattaaatgatatggaccctaatttgtatcattctgagttgattgtgtggtttattcattctggaaacatgttgatacttacagtcagccactgcttttgataagtgatattgattaggttgaatcttcttgtaaatagtatttaccagttagcaaagtctgtgttttcagaattacagtgagcacagaggtgttcataaaatgggaattgagtcccactcggtaagagttgcttaaacttgacactgttgacatttgggctggataaaacccctgtggtggggtctgtgctgtgcattgcaggatggtgagcagcgtccctctcatgtgacacccacagttatgccggatgttgccagatgcccctaggggacagagtcaacccccaactgaggaccactgtcctacagagtcaggaaatattgtagggagaaaaaaataacaacaacaaaggcctgtgttaatgttaaatagatgagattatggaatgtgtatattaatgttaaaaattgtaccttgatcaatgtactttttataaacttgccatagatatctcagatttgaaacctcaagacagatttattattcttaaatgctgtatgataatgaagaaaaataaaaatttatttcttgcaaagtta

SEQ ID NO: 287037 - DNA, 7638 bp, Homo sapiens
acgcccggcttccgccccgcagccccgaggggtctgggcgcgctgaagaccccttcggctgctgggccaacgcccccacccttggtcacctactcctgccgccgagcggttcgcgggaggtggcctcgggggtcgtagctactcaccggcggggcgctccgagtccatctgccccgtagcccggcagccggggcgggagggctgcgagcccggggcgcggtccgcctgaggcctgagacccggggccgcctgcgctcagggccgcggtgccggccgcgcgggagcctggcggggacggcgcggtcagtgttcggctcctccgcagtgactcaccagcgtcctgaagcttttgatcaccattggctgggaaggaaaaacagaatcagctgttccctgcgaaaggtgggacttgggccgcttttttcttagaatctaggttggaaacgtcgcatgatggtctttacgtaaacagccgtctcaacgctctacagaaagcgctaaccgcgcatttgaagcccacctagagtaaatcaagagcgtgaaagcattttttttttctgtgtaggttaacattcctgctccttcctttaaaaaggaagctcaaggccaggcgcggtggctcacgcctgtaatcccaacactttgggaggccgaggccgacgtatcacgagattaggaggtcgagaccagcctggccaacatggtgaaaccctgtctttactaaaaatacaaaaactagccgggcgtggcggcgcgcgcctgtaacccatgctactcggaaggctgaggcaggagaatcgcttgaacccgggaggcggaggttgcagtgagccgagatcgcgcctctgcactccagcctgggacagagcgagcctccgtctccaaaaaaaaataaggaagctcaagatgaagagtcagaagtggtaacttgtttgttgcacaagaaacaaatttagcattctatttaggggatccagattaccaaaaaaaaaaaagaagtgaagttatttctgcattaagtatattaataaaactttatcactaaaaacaattctgtaagaggaacgccaaggaaaaaaatatttgagtttttagagaagtcattttttaaacttttagaggttgtgacatttaagtaacataattttatttagtacctagtatgcaaagacattgtactgggcatggcagcaaatagaaagctttgtaaatcgcagtgtcccatctaattaacccgcattctaacaggtggttttattttgctggaccgcaccacagtcaggtaacaccaagaatatcgctaatgtaattttttaagttgatatatttaggattccataaaagtcactgaaaataactgagagcatgacatgtcacaaaacaagggaaagaaatcattttgaggatcagtcgctttacatcttttgtaactaatttaatccccaaaggaatccaataaagtaaaagttattctaaattgaattttaagcatgagaatgtggaaattactcgtcaaaagtcaaaaataatcgtgcagcagggcaaagactaaaggctggcatcagaatccatattcttttcactgttgatgtgctagggctgcaggaacaaaatactgcaaactaggcagcttaaacaaatttattgtcagaggtctgactggaagtcccaaatcaaggtattggcagggttgattccttctgagagctgtgatgggagcctgttaatgcatctcagcgtctaggcattccttggcttgtggcagcatgcccccgccagtcttcacatgacgttttccatgtccgtgtctgtctgcacacttagcgttctttttatgaggacatcagtcatattggagtacagtagacgctactttaatatgacctcatgttaactaatcatatccacaacaaccctgtttccaaataaggtcacattataaaatactggaagtgaggtctttaacacatgaatttgaaagggggacacaatttaacccataacacactgtatcctgaaataactatccaatgtaatttttttaaaagacacaaaactagccgaaattataaaaggttatgattgcaatcctggtatccagttacattctccctcctgcagaagctgtggagaatcctgtctcagaaaaccaatttctattttgtcacatgtccatctatgcaaaatacatgtactttgtccctgacatagggcaacaatgctgaatttactaagactcatttttgcgcatggtttgatagggaattaagatttactaggtattctgtcattgtcctcattactgattattttaactgtgtctcaaacacttggatagtacactatagtgttataagctgtttgacatgtcgcttcctaaattctcaagttatatatatgtgtgtatatatgtcatgtaacaggcacaactgttttcatgtgtatcactttattgcacttcacaggtatcatatgtttcttacaaagtggaggtttgtggcagccctgcatggagcaagtctgtcagcaccatctttctaacaaaactgcaacagccaccccaactttcaagcactgtctttgtggtgtttacgtgttctcgccacacctgcataggttttctctgggtgctgcagttcttgccacatcccagaggtgtgcacgtgaggtgaactggtgtgtcttcactgtcccagtctgagtgtgggtgtgtgagtggccctgtgatggaatggcgtcctgtccagggctggttccctctttgtgccctgagctactgaaacaggcttcagctacacatgacccagaactggaataattaagtaataattatctttttattcatctttcttaaatgtatgtatagctcacatttatttcaatgtttaatattagaatactttggcctttagaagcttagtgattttttttttccttggccagaagtatgctttaggaacttaatccttattttttagcctctggtaaaattggttttgctatacgttgtttcacttaaaagtcctgattcccaagaacgcactgacagcagtgaggacttgctgcgcatgcgggaggccagattttcttatctgtgtgaagccagacatgaaagagatctgtcaacacataaaacaaaatcaaagtctgttttttgtctggaaaagatttttaataaaaatataacttatgttagtgtcgtgtgttttttaagtgaatattttaatatgtttaatttctatgttagtaaatagcagtagtaaacaacagtgagcaaaagcttttaggtgtcctcagtacattttaagagagtgcaagcgtcctgtgaccaagaagtttgagaactggtgcccaccaggttcatctcacaagttcagtattttaaattccacacaaaaggtagaggaaatagctgaattcgcttcagctgcgcatacatttcacgattatttaaaagtttagagggctaggcgcggtggctcacacccggaatctcagcacttcggtaagctgagccaggtggatcacttgaggtcaggagttccagaccagcctgaccaacatgcggaaacccgtctctactaaaaatacgaaataagcccgggcgtggtggcgcatgcctgtaattccagctacttgggaggctgagacgggaccattgcctgaacccggtcggcggaggtttctgtgagtggagactgcaccattgcactcaagcctgggcaacacagaatgaaactgtctccaaaataaaaatttagaacgtagtcatgtacctcgaaagcgaacactcccaacatagcgtggaacaccccacacccccggcgactttgctccgccttggtcccggtcgcagacaccgcagaaaggccatcgttctagacatacgagaactccccgtgcagccaaacgctgtagtcccagcggcggaactcgggggggggaggggggggagtgcccaaccagccagtcagcagtgacgtcccgcctttcctccgtttccattggtccagccatgcggaggtcgctcccatgggacgccgagcttccggctgcagggcttggcgcccgggcgctttcggattgggagggcttcctccatggaacgcgagcctcgagacgtctgacgttaggcaccgttcgcagcgcctcgggctcgcacggcaggatcgaaagcgtgattggctggcggcgtctgtggtctcgggcaccgcccagtcgcgggacgctgcctctgcggaactgggggtggggcgtgttgacccccttaaaggcgccagagcccgcggtcacggctcaggttcccggtgcttcgcgcgtctgccgttgtcacaggccagggaggtggcaccaccaggcgaagcttggcgagattgtgtcgtcaagcgcgtacgggcgccaattggccgggcgatgtggcgtggactggcgctggcgcgagcgattggctgcgcggcccgggggcggggccagtgggcggtgcgcgccgcagactgtgctcaaagcgggcgccatccgggaccggcggttgtctgtggccggaggctgatcaggtactgtggacgggcggcggagttcgggagacaggggcagggcggcatcggggagctgcgggacggggcggggaggaggcccgaggtctgagccacccgtgaggtctcggcgcggaggcctggacagctgggggtggcggcgttggtctcccgaactggagggaggccgggccttcccgggctgtggtgggcgcccgcgccccgtggaaggcggaggcgtgagtcggggcgtcagagacgttgccattctttgtcagcggaaaagatcgtcgtctgcgcacagtcacctgaggtttaggaactcgtggaactggaaaccgagtcgcaggagactaagagttgcgagtctccccttagagaattcagaaacaagcgtagacagcatcgtcagaaacacgagcgtgacgacaccggcctccccgtgccgagtccacgcgtgtgacgcgggtgcatacacctgcgtccgtgcaagagggtgacagcaacacactcaaggcgcttctcctgggaatggagcaggagaagagatggggagcatcgcatagatggaactagacctttttcttgggttggatgatgtgttcccgcgtctactacatgtgttctagaacagatcagacattttgtaatgatgcctgaaataaacactaaccacctcgacaagcaacaggttcaactcctggcagagatgtgtatccttattgatgaaaatgacaataaaattggagctgagaccaagaagaattgtcacctgaacgagaacattgagaaagggtgctgctttgaaacagtctttcttgtaaagcgatttgtgtaggcatttccgatttgctgagaagagcactctgttcaaggaagtgcagtcttcagtaataccgtattttctcgttggttccagttcgttaaatagtgtggtcattagcatctgctttgctgtcttcctgttacagcgatttctcttcacttcatgcctgttactcggcttcttcagagttattctggattcatagaagagggactagccctgacatacagcagcagcctagcctctaatatttctagagagtggagagaggcgggcaccatgcagggaagcgtgtgccttcaccactttccgagaactgaatgtccttgatagggaacttgactgccggaaaggggccaccagcatcaccatttccttcactcgacggccaacttccttgcccagtgcagagctcttcctcaccatagccatgcagagactatgcatgtggataaaccatgggaaaaagcaaaagcagcagcaagttactaatgttattctgaactgcagggagagaatttggcaaataactggtacttaaggctaaaataattgttatttcttttgctttcaggattattgcatcgagcttttagtgtcttcttattcaacaccgaaaataagcttctgctacagcaaagatcagatgctaagattacctttccaggttgttttacgaatacgtgttgtagtcatccattaagcaatccagccgagcttgaggaaagtgacgcccttggagtgaggcgagcagcacagagacggctgaaagctgagctaggaattcccttggaagaggttcctccagaagaaattaattatttaacacgaattcactacaaagctcagtctgatggtatctggggtgaacatgaaattgattacattttgttggtgaggaagaatgtaactttgaatccagatcccaatgagattaaaagctattgttatgtgtcaaaggaagaactaaaagaacttctgaaaaaagcagccagtggtgaaattaagataacgccatggtttaaaattattgcagcgacttttctctttaaatggtgggataacttaaatcatttgaatcagtttgttgaccatgagaaaatatacagaatgtgaatatgtaggtaaatgattacagaaaaatttatctgcttaacaaacttagaatgactttttccttttaaatttagttctatcattaatttatcattaaatttagttctatcatttggtactatcattaatgtattatatacactgatactttaaaacttgtgtggaaaaaactaacttataattttgtatcacacaccctggatatgtgttctgtttctaagcgacatttgtgagagattattgtaaaatgagagcgagcaaataaaacttaatttaatctttgcagatacatacttatgggaaatttgaacaaatgagtgaaactctgtgtttttagtaggctgtgataaacatttccggagcacttgcagaggacttgctatttgccaggtgctttatgtatcattaaatttttctcatagttcagaaaaatgtgcaaaggaaactattgtctcgctccttcaaaacagtcttaattaactttcatattagcagattaaactagcagagcaggttcaagggaaattaaatgatatggaccctaatttgtatcattctgagttgattgtgtggtttattcattctggaaacatgttgatacttacagtcagccactgcttttgataagtgatattgattaggttgaatcttcttgtaaatagtatttaccagttagcaaagtctgtgttttcagaattacagtgagcacagaggtgttcataaaatgggaattgagtcccactcggtaagagttgcttaaacttgacactgttgacatttgggctggataaaacccctgtggtggggtctgtgctgtgcattgcaggatggtgagcagcgtccctctcatgtgacacccacagttatgccggatgttgccagatgcccctaggggacagagtcaacccccaactgaggaccactgtcctacagagtcaggaaatattgtagggagaaaaaaataacaacaacaaaggcctgtgttaatgttaaatagatgagattatggaatgtgtatattaatgttaaaaattgtaccttgatcaatgtactttttataaacttgccatagatatctcagatttgaaacctcaagacagatttattattcttaaatgctgtatgataatgaagaaaaataaaaatttatttcttgcaaagtta

SEQ ID NO: 287038 - DNA, 1911 bp, Homo sapiens
ctggataagactcgtggccggaggctgatcagtgttctagaacagatcagacattttgtaatgatgcctgaaataaacactaaccacctcgacaagcaacaggttcaactcctggcagagatgtgtatccttattgatgaaaatgacaataaaattggagctgagaccaagaagaattgtcacctgaacgagaacattgagaaaggattattgcatcgagcttttagtgtcttcttattcaacaccgaaaataagcttctgctacagcaaagatcagatgctaagattacctttccaggttgttttacgaatacgtgttgtagtcatccattaagcaatccagccgagcttgaggaaagtgacgcccttggagtgaggcgagcagcacagagacggctgaaagctgagctaggaattcccttggaagaggttcctccagaagaaattaattatttaacacgaattcactacaaagctcagtctgatggtatctggggtgaacatgaaattgattacattttgttggtgaggaagaatgtaactttgaatccagatcccaatgagattaaaagctattgttatgtgtcaaaggaagaactaaaagaacttctgaaaaaagcagccagtggtgaaattaagataacgccatggtttaaaattattgcagcgacttttctctttaaatggtgggataacttaaatcatttgaatcagtttgttgaccatgagaaaatatacagaatgtgaatatgtaggtaaatgattacagaaaaatttatctgcttaacaaacttagaatgactttttccttttaaatttagttctatcattaatttatcattaaatttagttctatcatttggtactatcattaatgtattatatacactgatactttaaaacttgtgtggaaaaaactaacttataattttgtatcacacaccctggatatgtgttctgtttctaagcgacatttgtgagagattattgtaaaatgagagcgagcaaataaaacttaatttaatctttgcagatacatacttatgggaaatttgaacaaatgagtgaaactctgtgtttttagtaggctgtgataaacatttccggagcacttgcagaggacttgctatttgccaggtgctttatgtatcattaaatttttctcatagttcagaaaaatgtgcaaaggaaactattgtctcgctccttcaaaacagtcttaattaactttcatattagcagattaaactagcagagcaggttcaagggaaattaaatgatatggaccctaatttgtatcattctgagttgattgtgtggtttattcattctggaaacatgttgatacttacagtcagccactgcttttgataagtgatattgattaggttgaatcttcttgtaaatagtatttaccagttagcaaagtctgtgttttcagaattacagtgagcacagaggtgttcataaaatgggaattgagtcccactcggtaagagttgcttaaacttgacactgttgacatttgggctggataaaacccctgtggtggggtctgtgctgtgcattgcaggatggtgagcagcgtccctctcatgtgacacccacagttatgccggatgttgccagatgcccctaggggacagagtcaacccccaactgaggaccactgtcctacagagtcaggaaatattgtagggagaaaaaaataacaacaacaaaggcctgtgttaatgttaaatagatgagattatggaatgtgtatattaatgttaaaaattgtaccttgatcaatgtactttttataaacttgccatagatatctcagatttgaaacctcaagacagatttattattcttaaatgctgtatgataatgaagaaaaataaaaatttatttcttgcaaagtta

SEQ ID NO: 287039 - DNA, 2359 bp, Homo sapiens
acgcccggcttccgccccgcagccccgaggggtctgggcgcgctgaagaccccttcggctgctgggccaacgcccccacccttggtcacctactcctgccgccgagcggttcgcgggaggtggcctcgggggtcgtagctactcaccggcggggcgctccgagtccatctgccccgtagcccggcagccggggcgggagggctgcgagcccggggcgcggtccgcctgaggcctgagacccggggccgcctgcgctcagggccgcggtgccggccgcgcgggagcctggcggggacggcgcggtcagtgttcggctcctccgcagtgactcaccagcgtcctgaagcttttgatcaccattggctgggaaggaaaaacagaatcagctgttccctgcgaaaggtatcatatgtttcttacaaagtggaggtttgtggcagccctgcatggagcaagtctgtcagcaccatctttctaacatgttctagaacagatcagacattttgtaatgatgcctgaaataaacactaaccacctcgacaagcaacaggttcaactcctggcagagatgtgtatccttattgatgaaaatgacaataaaattggagctgagaccaagaagaattgtcacctgaacgagaacattgagaaaggattattgcatcgagcttttagtgtcttcttattcaacaccgaaaataagcttctgctacagcaaagatcagatgctaagattacctttccaggttgttttacgaatacgtgttgtagtcatccattaagcaatccagccgagcttgaggaaagtgacgcccttggagtgaggcgagcagcacagagacggctgaaagctgagctaggaattcccttggaagaggttcctccagaagaaattaattatttaacacgaattcactacaaagctcagtctgatggtatctggggtgaacatgaaattgattacattttgttggtgaggaagaatgtaactttgaatccagatcccaatgagattaaaagctattgttatgtgtcaaaggaagaactaaaagaacttctgaaaaaagcagccagtggtgaaattaagataacgccatggtttaaaattattgcagcgacttttctctttaaatggtgggataacttaaatcatttgaatcagtttgttgaccatgagaaaatatacagaatgtgaatatgtaggtaaatgattacagaaaaatttatctgcttaacaaacttagaatgactttttccttttaaatttagttctatcattaatttatcattaaatttagttctatcatttggtactatcattaatgtattatatacactgatactttaaaacttgtgtggaaaaaactaacttataattttgtatcacacaccctggatatgtgttctgtttctaagcgacatttgtgagagattattgtaaaatgagagcgagcaaataaaacttaatttaatctttgcagatacatacttatgggaaatttgaacaaatgagtgaaactctgtgtttttagtaggctgtgataaacatttccggagcacttgcagaggacttgctatttgccaggtgctttatgtatcattaaatttttctcatagttcagaaaaatgtgcaaaggaaactattgtctcgctccttcaaaacagtcttaattaactttcatattagcagattaaactagcagagcaggttcaagggaaattaaatgatatggaccctaatttgtatcattctgagttgattgtgtggtttattcattctggaaacatgttgatacttacagtcagccactgcttttgataagtgatattgattaggttgaatcttcttgtaaatagtatttaccagttagcaaagtctgtgttttcagaattacagtgagcacagaggtgttcataaaatgggaattgagtcccactcggtaagagttgcttaaacttgacactgttgacatttgggctggataaaacccctgtggtggggtctgtgctgtgcattgcaggatggtgagcagcgtccctctcatgtgacacccacagttatgccggatgttgccagatgcccctaggggacagagtcaacccccaactgaggaccactgtcctacagagtcaggaaatattgtagggagaaaaaaataacaacaacaaaggcctgtgttaatgttaaatagatgagattatggaatgtgtatattaatgttaaaaattgtaccttgatcaatgtactttttataaacttgccatagatatctcagatttgaaacctcaagacagatttattattcttaaatgctgtatgataatgaagaaaaataaaaatttatttcttgcaaagtta

SEQ ID NO: 287040 - DNA, 6859 bp, Homo sapiens
acgcccggcttccgccccgcagccccgaggggtctgggcgcgctgaagaccccttcggctgctgggccaacgcccccacccttggtcacctactcctgccgccgagcggttcgcgggaggtggcctcgggggtcgtagctactcaccggcggggcgctccgagtccatctgccccgtagcccggcagccggggcgggagggctgcgagcccggggcgcggtccgcctgaggcctgagacccggggccgcctgcgctcagggccgcggtgccggccgcgcgggagcctggcggggacggcgcggtcagtgttcggctcctccgcagtgactcaccagcgtcctgaagcttttgatcaccattggctgggaaggaaaaacagaatcagctgttccctgcgaaaggtgggacttgggccgcttttttcttagaatctaggttggaaacgtcgcatgatggtctttacgtaaacagccgtctcaacgctctacagaaagcgctaaccgcgcatttgaagcccacctagagtaaatcaagagcgtgaaagcattttttttttctgtgtaggttaacattcctgctccttcctttaaaaaggaagctcaaggccaggcgcggtggctcacgcctgtaatcccaacactttgggaggccgaggccgacgtatcacgagattaggaggtcgagaccagcctggccaacatggtgaaaccctgtctttactaaaaatacaaaaactagccgggcgtggcggcgcgcgcctgtaacccatgctactcggaaggctgaggcaggagaatcgcttgaacccgggaggcggaggttgcagtgagccgagatcgcgcctctgcactccagcctgggacagagcgagcctccgtctccaaaaaaaaataaggaagctcaagatgaagagtcagaagtggtaacttgtttgttgcacaagaaacaaatttagcattctatttaggggatccagattaccaaaaaaaaaaaagaagtgaagttatttctgcattaagtatattaataaaactttatcactaaaaacaattctgtaagaggaacgccaaggaaaaaaatatttgagtttttagagaagtcattttttaaacttttagaggttgtgacatttaagtaacataattttatttagtacctagtatgcaaagacattgtactgggcatggcagcaaatagaaagctttgtaaatcgcagtgtcccatctaattaacccgcattctaacaggtggttttattttgctggaccgcaccacagtcaggtaacaccaagaatatcgctaatgtaattttttaagttgatatatttaggattccataaaagtcactgaaaataactgagagcatgacatgtcacaaaacaagggaaagaaatcattttgaggatcagtcgctttacatcttttgtaactaatttaatccccaaaggaatccaataaagtaaaagttattctaaattgaattttaagcatgagaatgtggaaattactcgtcaaaagtcaaaaataatcgtgcagcagggcaaagactaaaggctggcatcagaatccatattcttttcactgttgatgtgctagggctgcaggaacaaaatactgcaaactaggcagcttaaacaaatttattgtcagaggtctgactggaagtcccaaatcaaggtattggcagggttgattccttctgagagctgtgatgggagcctgttaatgcatctcagcgtctaggcattccttggcttgtggcagcatgcccccgccagtcttcacatgacgttttccatgtccgtgtctgtctgcacacttagcgttctttttatgaggacatcagtcatattggagtacagtagacgctactttaatatgacctcatgttaactaatcatatccacaacaaccctgtttccaaataaggtcacattataaaatactggaagtgaggtctttaacacatgaatttgaaagggggacacaatttaacccataacacactgtatcctgaaataactatccaatgtaatttttttaaaagacacaaaactagccgaaattataaaaggttatgattgcaatcctggtatccagttacattctccctcctgcagaagctgtggagaatcctgtctcagaaaaccaatttctattttgtcacatgtccatctatgcaaaatacatgtactttgtccctgacatagggcaacaatgctgaatttactaagactcatttttgcgcatggtttgatagggaattaagatttactaggtattctgtcattgtcctcattactgattattttaactgtgtctcaaacacttggatagtacactatagtgttataagctgtttgacatgtcgcttcctaaattctcaagttatatatatgtgtgtatatatgtcatgtaacaggcacaactgttttcatgtgtatcactttattgcacttcacaggtatcatatgtttcttacaaagtggaggtttgtggcagccctgcatggagcaagtctgtcagcaccatctttctaacaaaactgcaacagccaccccaactttcaagcactgtctttgtggtgtttacgtgttctcgccacacctgcataggttttctctgggtgctgcagttcttgccacatcccagaggtgtgcacgtgaggtgaactggtgtgtcttcactgtcccagtctgagtgtgggtgtgtgagtggccctgtgatggaatggcgtcctgtccagggctggttccctctttgtgccctgagctactgaaacaggcttcagctacacatgacccagaactggaataattaagtaataattatctttttattcatctttcttaaatgtatgtatagctcacatttatttcaatgtttaatattagaatactttggcctttagaagcttagtgattttttttttccttggccagaagtatgctttaggaacttaatccttattttttagcctctggtaaaattggttttgctatacgttgtttcacttaaaagtcctgattcccaagaacgcactgacagcagtgaggacttgctgcgcatgcgggaggccagattttcttatctgtgtgaagccagacatgaaagagatctgtcaacacataaaacaaaatcaaagtctgttttttgtctggaaaagatttttaataaaaatataacttatgttagtgtcgtgtgttttttaagtgaatattttaatatgtttaatttctatgttagtaaatagcagtagtaaacaacagtgagcaaaagcttttaggtgtcctcagtacattttaagagagtgcaagcgtcctgtgaccaagaagtttgagaactggtgcccaccaggttcatctcacaagttcagtattttaaattccacacaaaaggtagaggaaatagctgaattcgcttcagctgcgcatacatttcacgattatttaaaagtttagagggctaggcgcggtggctcacacccggaatctcagcacttcggtaagctgagccaggtggatcacttgaggtcaggagttccagaccagcctgaccaacatgcggaaacccgtctctactaaaaatacgaaataagcccgggcgtggtggcgcatgcctgtaattccagctacttgggaggctgagacgggaccattgcctgaacccggtcggcggaggtttctgtgagtggagactgcaccattgcactcaagcctgggcaacacagaatgaaactgtctccaaaataaaaatttagaacgtagtcatgtacctcgaaagcgaacactcccaacatagcgtggaacaccccacacccccggcgactttgctccgccttggtcccggtcgcagacaccgcagaaaggccatcgttctagacatacgagaactccccgtgcagccaaacgctgtagtcccagcggcggaactcgggggggggaggggggggagtgcccaaccagccagtcagcagtgacgtcccgcctttcctccgtttccattggtccagccatgcggaggtcgctcccatgggacgccgagcttccggctgcagggcttggcgcccgggcgctttcggattgggagggcttcctccatggaacgcgagcctcgagacgtctgacgttaggcaccgttcgcagcgcctcgggctcgcacggcaggatcgaaagcgtgattggctggcggcgtctgtggtctcgggcaccgcccagtcgcgggacgctgcctctgcggaactgggggtggggcgtgttgacccccttaaaggcgccagagcccgcggtcacggctcaggttcccggtgcttcgcgcgtctgccgttgtcacaggccagggaggtggcaccaccaggcgaagcttggcgagattgtgtcgtcaagcgcgtacgggcgccaattggccgggcgatgtggcgtggactggcgctggcgcgagcgattggctgcgcggcccgggggcggggccagtgggcggtgcgcgccgcagactgtgctcaaagcgggcgccatccgggaccggcggttgtctgtggccggaggctgatcaggtactgtggacgggcggcggagttcgggagacaggggcagggcggcatcggggagctgcgggacggggcggggaggaggcccgaggtctgagccacccgtgaggtctcggcgcggaggcctggacagctgggggtggcggcgttggtctcccgaactggagggaggccgggccttcccgggctgtggtgggcgcccgcgccccgtggaaggcggaggcgtgagtcggggcgtcagagacgttgccattctttgtcagcggaaaagatcgtcgtctgcgcacagtcacctgaggtttaggaactcgtggaactggaaaccgagtcgcaggagactaagagttgcgagtctccccttagagaattcagaaacaagcgtagacagcatcgtcagaaacacgagcgtgacgacaccggcctccccgtgccgagtccacgcgtgtgacgcgggtgcatacacctgcgtccgtgcaagagggtgacagcaacacactcaaggcgcttctcctgggaatggagcaggagaagagatggggagcatcgcatagatggaactagacctttttcttgggttggatgatgtgttcccgcgtctactacatggattattgcatcgagcttttagtgtcttcttattcaacaccgaaaataagcttctgctacagcaaagatcagatgctaagattacctttccaggttgttttacgaatacgtgttgtagtcatccattaagcaatccagccgagcttgaggaaagtgacgcccttggagtgaggcgagcagcacagagacggctgaaagctgagctaggaattcccttggaagaggttcctccagaagaaattaattatttaacacgaattcactacaaagctcagtctgatggtatctggggtgaacatgaaattgattacattttgttggtgaggaagaatgtaactttgaatccagatcccaatgagattaaaagctattgttatgtgtcaaaggaagaactaaaagaacttctgaaaaaagcagccagtggtgaaattaagataacgccatggtttaaaattattgcagcgacttttctctttaaatggtgggataacttaaatcatttgaatcagtttgttgaccatgagaaaatatacagaatgtgaatatgtaggtaaatgattacagaaaaatttatctgcttaacaaacttagaatgactttttccttttaaatttagttctatcattaatttatcattaaatttagttctatcatttggtactatcattaatgtattatatacactgatactttaaaacttgtgtggaaaaaactaacttataattttgtatcacacaccctggatatgtgttctgtttctaagcgacatttgtgagagattattgtaaaatgagagcgagcaaataaaacttaatttaatctttgcagatacatacttatgggaaatttgaacaaatgagtgaaactctgtgtttttagtaggctgtgataaacatttccggagcacttgcagaggacttgctatttgccaggtgctttatgtatcattaaatttttctcatagttcagaaaaatgtgcaaaggaaactattgtctcgctccttcaaaacagtcttaattaactttcatattagcagattaaactagcagagcaggttcaagggaaattaaatgatatggaccctaatttgtatcattctgagttgattgtgtggtttattcattctggaaacatgttgatacttacagtcagccactgcttttgataagtgatattgattaggttgaatcttcttgtaaatagtatttaccagttagcaaagtctgtgttttcagaattacagtgagcacagaggtgttcataaaatgggaattgagtcccactcggtaagagttgcttaaacttgacactgttgacatttgggctggataaaacccctgtggtggggtctgtgctgtgcattgcaggatggtgagcagcgtccctctcatgtgacacccacagttatgccggatgttgccagatgcccctaggggacagagtcaacccccaactgaggaccactgtcctacagagtcaggaaatattgtagggagaaaaaaataacaacaacaaaggcctgtgttaatgttaaatagatgagattatggaatgtgtatattaatgttaaaaattgtaccttgatcaatgtactttttataaacttgccatagatatctcagatttgaaacctcaagacagatttattattcttaaatgctgtatgataatgaagaaaaataaaaatttatttcttgcaaagtta

SEQ ID NO: 287041 - DNA, 7094 bp, Homo sapiens
acgcccggcttccgccccgcagccccgaggggtctgggcgcgctgaagaccccttcggctgctgggccaacgcccccacccttggtcacctactcctgccgccgagcggttcgcgggaggtggcctcgggggtcgtagctactcaccggcggggcgctccgagtccatctgccccgtagcccggcagccggggcgggagggctgcgagcccggggcgcggtccgcctgaggcctgagacccggggccgcctgcgctcagggccgcggtgccggccgcgcgggagcctggcggggacggcgcggtcagtgttcggctcctccgcagtgactcaccagcgtcctgaagcttttgatcaccattggctgggaaggaaaaacagaatcagctgttccctgcgaaaggtgggacttgggccgcttttttcttagaatctaggttggaaacgtcgcatgatggtctttacgtaaacagccgtctcaacgctctacagaaagcgctaaccgcgcatttgaagcccacctagagtaaatcaagagcgtgaaagcattttttttttctgtgtaggttaacattcctgctccttcctttaaaaaggaagctcaaggccaggcgcggtggctcacgcctgtaatcccaacactttgggaggccgaggccgacgtatcacgagattaggaggtcgagaccagcctggccaacatggtgaaaccctgtctttactaaaaatacaaaaactagccgggcgtggcggcgcgcgcctgtaacccatgctactcggaaggctgaggcaggagaatcgcttgaacccgggaggcggaggttgcagtgagccgagatcgcgcctctgcactccagcctgggacagagcgagcctccgtctccaaaaaaaaataaggaagctcaagatgaagagtcagaagtggtaacttgtttgttgcacaagaaacaaatttagcattctatttaggggatccagattaccaaaaaaaaaaaagaagtgaagttatttctgcattaagtatattaataaaactttatcactaaaaacaattctgtaagaggaacgccaaggaaaaaaatatttgagtttttagagaagtcattttttaaacttttagaggttgtgacatttaagtaacataattttatttagtacctagtatgcaaagacattgtactgggcatggcagcaaatagaaagctttgtaaatcgcagtgtcccatctaattaacccgcattctaacaggtggttttattttgctggaccgcaccacagtcaggtaacaccaagaatatcgctaatgtaattttttaagttgatatatttaggattccataaaagtcactgaaaataactgagagcatgacatgtcacaaaacaagggaaagaaatcattttgaggatcagtcgctttacatcttttgtaactaatttaatccccaaaggaatccaataaagtaaaagttattctaaattgaattttaagcatgagaatgtggaaattactcgtcaaaagtcaaaaataatcgtgcagcagggcaaagactaaaggctggcatcagaatccatattcttttcactgttgatgtgctagggctgcaggaacaaaatactgcaaactaggcagcttaaacaaatttattgtcagaggtctgactggaagtcccaaatcaaggtattggcagggttgattccttctgagagctgtgatgggagcctgttaatgcatctcagcgtctaggcattccttggcttgtggcagcatgcccccgccagtcttcacatgacgttttccatgtccgtgtctgtctgcacacttagcgttctttttatgaggacatcagtcatattggagtacagtagacgctactttaatatgacctcatgttaactaatcatatccacaacaaccctgtttccaaataaggtcacattataaaatactggaagtgaggtctttaacacatgaatttgaaagggggacacaatttaacccataacacactgtatcctgaaataactatccaatgtaatttttttaaaagacacaaaactagccgaaattataaaaggttatgattgcaatcctggtatccagttacattctccctcctgcagaagctgtggagaatcctgtctcagaaaaccaatttctattttgtcacatgtccatctatgcaaaatacatgtactttgtccctgacatagggcaacaatgctgaatttactaagactcatttttgcgcatggtttgatagggaattaagatttactaggtattctgtcattgtcctcattactgattattttaactgtgtctcaaacacttggatagtacactatagtgttataagctgtttgacatgtcgcttcctaaattctcaagttatatatatgtgtgtatatatgtcatgtaacaggcacaactgttttcatgtgtatcactttattgcacttcacaggtatcatatgtttcttacaaagtggaggtttgtggcagccctgcatggagcaagtctgtcagcaccatctttctaacaaaactgcaacagccaccccaactttcaagcactgtctttgtggtgtttacgtgttctcgccacacctgcataggttttctctgggtgctgcagttcttgccacatcccagaggtgtgcacgtgaggtgaactggtgtgtcttcactgtcccagtctgagtgtgggtgtgtgagtggccctgtgatggaatggcgtcctgtccagggctggttccctctttgtgccctgagctactgaaacaggcttcagctacacatgacccagaactggaataattaagtaataattatctttttattcatctttcttaaatgtatgtatagctcacatttatttcaatgtttaatattagaatactttggcctttagaagcttagtgattttttttttccttggccagaagtatgctttaggaacttaatccttattttttagcctctggtaaaattggttttgctatacgttgtttcacttaaaagtcctgattcccaagaacgcactgacagcagtgaggacttgctgcgcatgcgggaggccagattttcttatctgtgtgaagccagacatgaaagagatctgtcaacacataaaacaaaatcaaagtctgttttttgtctggaaaagatttttaataaaaatataacttatgttagtgtcgtgtgttttttaagtgaatattttaatatgtttaatttctatgttagtaaatagcagtagtaaacaacagtgagcaaaagcttttaggtgtcctcagtacattttaagagagtgcaagcgtcctgtgaccaagaagtttgagaactggtgcccaccaggttcatctcacaagttcagtattttaaattccacacaaaaggtagaggaaatagctgaattcgcttcagctgcgcatacatttcacgattatttaaaagtttagagggctaggcgcggtggctcacacccggaatctcagcacttcggtaagctgagccaggtggatcacttgaggtcaggagttccagaccagcctgaccaacatgcggaaacccgtctctactaaaaatacgaaataagcccgggcgtggtggcgcatgcctgtaattccagctacttgggaggctgagacgggaccattgcctgaacccggtcggcggaggtttctgtgagtggagactgcaccattgcactcaagcctgggcaacacagaatgaaactgtctccaaaataaaaatttagaacgtagtcatgtacctcgaaagcgaacactcccaacatagcgtggaacaccccacacccccggcgactttgctccgccttggtcccggtcgcagacaccgcagaaaggccatcgttctagacatacgagaactccccgtgcagccaaacgctgtagtcccagcggcggaactcgggggggggaggggggggagtgcccaaccagccagtcagcagtgacgtcccgcctttcctccgtttccattggtccagccatgcggaggtcgctcccatgggacgccgagcttccggctgcagggcttggcgcccgggcgctttcggattgggagggcttcctccatggaacgcgagcctcgagacgtctgacgttaggcaccgttcgcagcgcctcgggctcgcacggcaggatcgaaagcgtgattggctggcggcgtctgtggtctcgggcaccgcccagtcgcgggacgctgcctctgcggaactgggggtggggcgtgttgacccccttaaaggcgccagagcccgcggtcacggctcaggttcccggtgcttcgcgcgtctgccgttgtcacaggccagggaggtggcaccaccaggcgaagcttggcgagattgtgtcgtcaagcgcgtacgggcgccaattggccgggcgatgtggcgtggactggcgctggcgcgagcgattggctgcgcggcccgggggcggggccagtgggcggtgcgcgccgcagactgtgctcaaagcgggcgccatccgggaccggcggttgtctgtggccggaggctgatcagtgttctagaacagatcagacattttgtaatgatgcctgaaataaacactaaccacctcgacaagcaacaggttcaactcctggcagagatgtgtatccttattgatgaaaatgacaataaaattggagctgagaccaagaagaattgtcacctgaacgagaacattgagaaagggtgctgctttgaaacagtctttcttgtaaagcgatttgtgtaggcatttccgatttgctgagaagagcactctgttcaaggaagtgcagtcttcagtaataccgtattttctcgttggttccagttcgttaaatagtgtggtcattagcatctgctttgctgtcttcctgttacagcgatttctcttcacttcatgcctgttactcggcttcttcagagttattctggattcatagaagagggactagccctgacatacagcagcagcctagcctctaatatttctagagagtggagagaggcgggcaccatgcagggaagcgtgtgccttcaccactttccgagaactgaatgtccttgatagggaacttgactgccggaaaggggccaccagcatcaccatttccttcactcgacggccaacttccttgcccagtgcagagctcttcctcaccatagccatgcagagactatgcatgtggataaaccatgggaaaaagcaaaagcagcagcaagttactaatgttattctgaactgcagggagagaatttggcaaataactggtacttaaggctaaaataattgttatttcttttgctttcaggattattgcatcgagcttttagtgtcttcttattcaacaccgaaaataagcttctgctacagcaaagatcagatgctaagattacctttccaggttgttttacgaatacgtgttgtagtcatccattaagcaatccagccgagcttgaggaaagtgacgcccttggagtgaggcgagcagcacagagacggctgaaagctgagctaggaattcccttggaagaggtaaccagctctcctacacaaccatacaagctgaaacctaaacatactataaaaaggttcctccagaagaaattaattatttaacacgaattcactacaaagctcagtctgatggtatctggggtgaacatgaaattgattacattttgttggtgaggaagaatgtaactttgaatccagatcccaatgagattaaaagctattgttatgtgtcaaaggaagaactaaaagaacttctgaaaaaagcagccagtggtgaaattaagataacgccatggtttaaaattattgcagcgacttttctctttaaatggtgggataacttaaatcatttgaatcagtttgttgaccatgagaaaatatacagaatgtgaatatgtaggtaaatgattacagaaaaatttatctgcttaacaaacttagaatgactttttccttttaaatttagttctatcattaatttatcattaaatttagttctatcatttggtactatcattaatgtattatatacactgatactttaaaacttgtgtggaaaaaactaacttataattttgtatcacacaccctggatatgtgttctgtttctaagcgacatttgtgagagattattgtaaaatgagagcgagcaaataaaacttaatttaatctttgcagatacatacttatgggaaatttgaacaaatgagtgaaactctgtgtttttagtaggctgtgataaacatttccggagcacttgcagaggacttgctatttgccaggtgctttatgtatcattaaatttttctcatagttcagaaaaatgtgcaaaggaaactattgtctcgctccttcaaaacagtcttaattaactttcatattagcagattaaactagcagagcaggttcaagggaaattaaatgatatggaccctaatttgtatcattctgagttgattgtgtggtttattcattctggaaacatgttgatacttacagtcagccactgcttttgataagtgatattgattaggttgaatcttcttgtaaatagtatttaccagttagcaaagtctgtgttttcagaattacagtgagcacagaggtgttcataaaatgggaattgagtcccactcggtaagagttgcttaaacttgacactgttgacatttgggctggataaaacccctgtggtggggtctgtgctgtgcattgcaggatggtgagcagcgtccctctcatgtgacacccacagttatgccggatgttgccagatgcccctaggggacagagtcaacccccaactgaggaccactgtcctacagagtcaggaaatattgtagggagaaaaaaataacaacaacaaaggcctgtgttaatgttaaatagatgagattatggaatgtgtatattaatgttaaaaattgtaccttgatcaatgtactttttataaacttgccatagatatctcagatttgaaacctcaagacagatttattattcttaaatgctgtatgataatgaagaaaaataaaaatttatttcttgcaaagtta

SEQ ID NO: 287042 - DNA, 6488 bp, Homo sapiens
acgcccggcttccgccccgcagccccgaggggtctgggcgcgctgaagaccccttcggctgctgggccaacgcccccacccttggtcacctactcctgccgccgagcggttcgcgggaggtggcctcgggggtcgtagctactcaccggcggggcgctccgagtccatctgccccgtagcccggcagccggggcgggagggctgcgagcccggggcgcggtccgcctgaggcctgagacccggggccgcctgcgctcagggccgcggtgccggccgcgcgggagcctggcggggacggcgcggtcagtgttcggctcctccgcagtgactcaccagcgtcctgaagcttttgatcaccattggctgggaaggaaaaacagaatcagctgttccctgcgaaaggtgggacttgggccgcttttttcttagaatctaggttggaaacgtcgcatgatggtctttacgtaaacagccgtctcaacgctctacagaaagcgctaaccgcgcatttgaagcccacctagagtaaatcaagagcgtgaaagcattttttttttctgtgtaggttaacattcctgctccttcctttaaaaaggaagctcaaggccaggcgcggtggctcacgcctgtaatcccaacactttgggaggccgaggccgacgtatcacgagattaggaggtcgagaccagcctggccaacatggtgaaaccctgtctttactaaaaatacaaaaactagccgggcgtggcggcgcgcgcctgtaacccatgctactcggaaggctgaggcaggagaatcgcttgaacccgggaggcggaggttgcagtgagccgagatcgcgcctctgcactccagcctgggacagagcgagcctccgtctccaaaaaaaaataaggaagctcaagatgaagagtcagaagtggtaacttgtttgttgcacaagaaacaaatttagcattctatttaggggatccagattaccaaaaaaaaaaaagaagtgaagttatttctgcattaagtatattaataaaactttatcactaaaaacaattctgtaagaggaacgccaaggaaaaaaatatttgagtttttagagaagtcattttttaaacttttagaggttgtgacatttaagtaacataattttatttagtacctagtatgcaaagacattgtactgggcatggcagcaaatagaaagctttgtaaatcgcagtgtcccatctaattaacccgcattctaacaggtggttttattttgctggaccgcaccacagtcaggtaacaccaagaatatcgctaatgtaattttttaagttgatatatttaggattccataaaagtcactgaaaataactgagagcatgacatgtcacaaaacaagggaaagaaatcattttgaggatcagtcgctttacatcttttgtaactaatttaatccccaaaggaatccaataaagtaaaagttattctaaattgaattttaagcatgagaatgtggaaattactcgtcaaaagtcaaaaataatcgtgcagcagggcaaagactaaaggctggcatcagaatccatattcttttcactgttgatgtgctagggctgcaggaacaaaatactgcaaactaggcagcttaaacaaatttattgtcagaggtctgactggaagtcccaaatcaaggtattggcagggttgattccttctgagagctgtgatgggagcctgttaatgcatctcagcgtctaggcattccttggcttgtggcagcatgcccccgccagtcttcacatgacgttttccatgtccgtgtctgtctgcacacttagcgttctttttatgaggacatcagtcatattggagtacagtagacgctactttaatatgacctcatgttaactaatcatatccacaacaaccctgtttccaaataaggtcacattataaaatactggaagtgaggtctttaacacatgaatttgaaagggggacacaatttaacccataacacactgtatcctgaaataactatccaatgtaatttttttaaaagacacaaaactagccgaaattataaaaggttatgattgcaatcctggtatccagttacattctccctcctgcagaagctgtggagaatcctgtctcagaaaaccaatttctattttgtcacatgtccatctatgcaaaatacatgtactttgtccctgacatagggcaacaatgctgaatttactaagactcatttttgcgcatggtttgatagggaattaagatttactaggtattctgtcattgtcctcattactgattattttaactgtgtctcaaacacttggatagtacactatagtgttataagctgtttgacatgtcgcttcctaaattctcaagttatatatatgtgtgtatatatgtcatgtaacaggcacaactgttttcatgtgtatcactttattgcacttcacaggtatcatatgtttcttacaaagtggaggtttgtggcagccctgcatggagcaagtctgtcagcaccatctttctaacaaaactgcaacagccaccccaactttcaagcactgtctttgtggtgtttacgtgttctcgccacacctgcataggttttctctgggtgctgcagttcttgccacatcccagaggtgtgcacgtgaggtgaactggtgtgtcttcactgtcccagtctgagtgtgggtgtgtgagtggccctgtgatggaatggcgtcctgtccagggctggttccctctttgtgccctgagctactgaaacaggcttcagctacacatgacccagaactggaataattaagtaataattatctttttattcatctttcttaaatgtatgtatagctcacatttatttcaatgtttaatattagaatactttggcctttagaagcttagtgattttttttttccttggccagaagtatgctttaggaacttaatccttattttttagcctctggtaaaattggttttgctatacgttgtttcacttaaaagtcctgattcccaagaacgcactgacagcagtgaggacttgctgcgcatgcgggaggccagattttcttatctgtgtgaagccagacatgaaagagatctgtcaacacataaaacaaaatcaaagtctgttttttgtctggaaaagatttttaataaaaatataacttatgttagtgtcgtgtgttttttaagtgaatattttaatatgtttaatttctatgttagtaaatagcagtagtaaacaacagtgagcaaaagcttttaggtgtcctcagtacattttaagagagtgcaagcgtcctgtgaccaagaagtttgagaactggtgcccaccaggttcatctcacaagttcagtattttaaattccacacaaaaggtagaggaaatagctgaattcgcttcagctgcgcatacatttcacgattatttaaaagtttagagggctaggcgcggtggctcacacccggaatctcagcacttcggtaagctgagccaggtggatcacttgaggtcaggagttccagaccagcctgaccaacatgcggaaacccgtctctactaaaaatacgaaataagcccgggcgtggtggcgcatgcctgtaattccagctacttgggaggctgagacgggaccattgcctgaacccggtcggcggaggtttctgtgagtggagactgcaccattgcactcaagcctgggcaacacagaatgaaactgtctccaaaataaaaatttagaacgtagtcatgtacctcgaaagcgaacactcccaacatagcgtggaacaccccacacccccggcgactttgctccgccttggtcccggtcgcagacaccgcagaaaggccatcgttctagacatacgagaactccccgtgcagccaaacgctgtagtcccagcggcggaactcgggggggggaggggggggagtgcccaaccagccagtcagcagtgacgtcccgcctttcctccgtttccattggtccagccatgcggaggtcgctcccatgggacgccgagcttccggctgcagggcttggcgcccgggcgctttcggattgggagggcttcctccatggaacgcgagcctcgagacgtctgacgttaggcaccgttcgcagcgcctcgggctcgcacggcaggatcgaaagcgtgattggctggcggcgtctgtggtctcgggcaccgcccagtcgcgggacgctgcctctgcggaactgggggtggggcgtgttgacccccttaaaggcgccagagcccgcggtcacggctcaggttcccggtgcttcgcgcgtctgccgttgtcacaggccagggaggtggcaccaccaggcgaagcttggcgagattgtgtcgtcaagcgcgtacgggcgccaattggccgggcgatgtggcgtggactggcgctggcgcgagcgattggctgcgcggcccgggggcggggccagtgggcggtgcgcgccgcagactgtgctcaaagcgggcgccatccgggaccggcggttgtctgtggccggaggctgatcagtgttctagaacagatcagacattttgtaatgatgcctgaaataaacactaaccacctcgacaagcaacaggttcaactcctggcagagatgtgtatccttattgatgaaaatgacaataaaattggagctgagaccaagaagaattgtcacctgaacgagaacattgagaaaggattattgcatcgagcttttagtgtcttcttattcaacaccgaaaataagcttctgctacagcaaagatcagatgctaagattacctttccaggttgttttacgaatacgtgttgtagtcatccattaagcaatccagccgagcttgaggaaagtgacgcccttggagtgaggcgagcagcacagagacggctgaaagctgagctaggaattcccttggaagaggtaaccagctctcctacacaaccatacaagctgaaacctaaacatactataaaaaggttcctccagaagaaattaattatttaacacgaattcactacaaagctcagtctgatggtatctggggtgaacatgaaattgattacattttgttggtgaggaagaatgtaactttgaatccagatcccaatgagattaaaagctattgttatgtgtcaaaggaagaactaaaagaacttctgaaaaaagcagccagtggtgaaattaagataacgccatggtttaaaattattgcagcgacttttctctttaaatggtgggataacttaaatcatttgaatcagtttgttgaccatgagaaaatatacagaatgtgaatatgtaggtaaatgattacagaaaaatttatctgcttaacaaacttagaatgactttttccttttaaatttagttctatcattaatttatcattaaatttagttctatcatttggtactatcattaatgtattatatacactgatactttaaaacttgtgtggaaaaaactaacttataattttgtatcacacaccctggatatgtgttctgtttctaagcgacatttgtgagagattattgtaaaatgagagcgagcaaataaaacttaatttaatctttgcagatacatacttatgggaaatttgaacaaatgagtgaaactctgtgtttttagtaggctgtgataaacatttccggagcacttgcagaggacttgctatttgccaggtgctttatgtatcattaaatttttctcatagttcagaaaaatgtgcaaaggaaactattgtctcgctccttcaaaacagtcttaattaactttcatattagcagattaaactagcagagcaggttcaagggaaattaaatgatatggaccctaatttgtatcattctgagttgattgtgtggtttattcattctggaaacatgttgatacttacagtcagccactgcttttgataagtgatattgattaggttgaatcttcttgtaaatagtatttaccagttagcaaagtctgtgttttcagaattacagtgagcacagaggtgttcataaaatgggaattgagtcccactcggtaagagttgcttaaacttgacactgttgacatttgggctggataaaacccctgtggtggggtctgtgctgtgcattgcaggatggtgagcagcgtccctctcatgtgacacccacagttatgccggatgttgccagatgcccctaggggacagagtcaacccccaactgaggaccactgtcctacagagtcaggaaatattgtagggagaaaaaaataacaacaacaaaggcctgtgttaatgttaaatagatgagattatggaatgtgtatattaatgttaaaaattgtaccttgatcaatgtactttttataaacttgccatagatatctcagatttgaaacctcaagacagatttattattcttaaatgctgtatgataatgaagaaaaataaaaatttatttcttgcaaagtta

SEQ ID NO: 287043 - DNA, 6381 bp, Homo sapiens
acgcccggcttccgccccgcagccccgaggggtctgggcgcgctgaagaccccttcggctgctgggccaacgcccccacccttggtcacctactcctgccgccgagcggttcgcgggaggtggcctcgggggtcgtagctactcaccggcggggcgctccgagtccatctgccccgtagcccggcagccggggcgggagggctgcgagcccggggcgcggtccgcctgaggcctgagacccggggccgcctgcgctcagggccgcggtgccggccgcgcgggagcctggcggggacggcgcggtcagtgttcggctcctccgcagtgactcaccagcgtcctgaagcttttgatcaccattggctgggaaggaaaaacagaatcagctgttccctgcgaaaggtgggacttgggccgcttttttcttagaatctaggttggaaacgtcgcatgatggtctttacgtaaacagccgtctcaacgctctacagaaagcgctaaccgcgcatttgaagcccacctagagtaaatcaagagcgtgaaagcattttttttttctgtgtaggttaacattcctgctccttcctttaaaaaggaagctcaaggccaggcgcggtggctcacgcctgtaatcccaacactttgggaggccgaggccgacgtatcacgagattaggaggtcgagaccagcctggccaacatggtgaaaccctgtctttactaaaaatacaaaaactagccgggcgtggcggcgcgcgcctgtaacccatgctactcggaaggctgaggcaggagaatcgcttgaacccgggaggcggaggttgcagtgagccgagatcgcgcctctgcactccagcctgggacagagcgagcctccgtctccaaaaaaaaataaggaagctcaagatgaagagtcagaagtggtaacttgtttgttgcacaagaaacaaatttagcattctatttaggggatccagattaccaaaaaaaaaaaagaagtgaagttatttctgcattaagtatattaataaaactttatcactaaaaacaattctgtaagaggaacgccaaggaaaaaaatatttgagtttttagagaagtcattttttaaacttttagaggttgtgacatttaagtaacataattttatttagtacctagtatgcaaagacattgtactgggcatggcagcaaatagaaagctttgtaaatcgcagtgtcccatctaattaacccgcattctaacaggtggttttattttgctggaccgcaccacagtcaggtaacaccaagaatatcgctaatgtaattttttaagttgatatatttaggattccataaaagtcactgaaaataactgagagcatgacatgtcacaaaacaagggaaagaaatcattttgaggatcagtcgctttacatcttttgtaactaatttaatccccaaaggaatccaataaagtaaaagttattctaaattgaattttaagcatgagaatgtggaaattactcgtcaaaagtcaaaaataatcgtgcagcagggcaaagactaaaggctggcatcagaatccatattcttttcactgttgatgtgctagggctgcaggaacaaaatactgcaaactaggcagcttaaacaaatttattgtcagaggtctgactggaagtcccaaatcaaggtattggcagggttgattccttctgagagctgtgatgggagcctgttaatgcatctcagcgtctaggcattccttggcttgtggcagcatgcccccgccagtcttcacatgacgttttccatgtccgtgtctgtctgcacacttagcgttctttttatgaggacatcagtcatattggagtacagtagacgctactttaatatgacctcatgttaactaatcatatccacaacaaccctgtttccaaataaggtcacattataaaatactggaagtgaggtctttaacacatgaatttgaaagggggacacaatttaacccataacacactgtatcctgaaataactatccaatgtaatttttttaaaagacacaaaactagccgaaattataaaaggttatgattgcaatcctggtatccagttacattctccctcctgcagaagctgtggagaatcctgtctcagaaaaccaatttctattttgtcacatgtccatctatgcaaaatacatgtactttgtccctgacatagggcaacaatgctgaatttactaagactcatttttgcgcatggtttgatagggaattaagatttactaggtattctgtcattgtcctcattactgattattttaactgtgtctcaaacacttggatagtacactatagtgttataagctgtttgacatgtcgcttcctaaattctcaagttatatatatgtgtgtatatatgtcatgtaacaggcacaactgttttcatgtgtatcactttattgcacttcacaggtatcatatgtttcttacaaagtggaggtttgtggcagccctgcatggagcaagtctgtcagcaccatctttctaacaaaactgcaacagccaccccaactttcaagcactgtctttgtggtgtttacgtgttctcgccacacctgcataggttttctctgggtgctgcagttcttgccacatcccagaggtgtgcacgtgaggtgaactggtgtgtcttcactgtcccagtctgagtgtgggtgtgtgagtggccctgtgatggaatggcgtcctgtccagggctggttccctctttgtgccctgagctactgaaacaggcttcagctacacatgacccagaactggaataattaagtaataattatctttttattcatctttcttaaatgtatgtatagctcacatttatttcaatgtttaatattagaatactttggcctttagaagcttagtgattttttttttccttggccagaagtatgctttaggaacttaatccttattttttagcctctggtaaaattggttttgctatacgttgtttcacttaaaagtcctgattcccaagaacgcactgacagcagtgaggacttgctgcgcatgcgggaggccagattttcttatctgtgtgaagccagacatgaaagagatctgtcaacacataaaacaaaatcaaagtctgttttttgtctggaaaagatttttaataaaaatataacttatgttagtgtcgtgtgttttttaagtgaatattttaatatgtttaatttctatgttagtaaatagcagtagtaaacaacagtgagcaaaagcttttaggtgtcctcagtacattttaagagagtgcaagcgtcctgtgaccaagaagtttgagaactggtgcccaccaggttcatctcacaagttcagtattttaaattccacacaaaaggtagaggaaatagctgaattcgcttcagctgcgcatacatttcacgattatttaaaagtttagagggctaggcgcggtggctcacacccggaatctcagcacttcggtaagctgagccaggtggatcacttgaggtcaggagttccagaccagcctgaccaacatgcggaaacccgtctctactaaaaatacgaaataagcccgggcgtggtggcgcatgcctgtaattccagctacttgggaggctgagacgggaccattgcctgaacccggtcggcggaggtttctgtgagtggagactgcaccattgcactcaagcctgggcaacacagaatgaaactgtctccaaaataaaaatttagaacgtagtcatgtacctcgaaagcgaacactcccaacatagcgtggaacaccccacacccccggcgactttgctccgccttggtcccggtcgcagacaccgcagaaaggccatcgttctagacatacgagaactccccgtgcagccaaacgctgtagtcccagcggcggaactcgggggggggaggggggggagtgcccaaccagccagtcagcagtgacgtcccgcctttcctccgtttccattggtccagccatgcggaggtcgctcccatgggacgccgagcttccggctgcagggcttggcgcccgggcgctttcggattgggagggcttcctccatggaacgcgagcctcgagacgtctgacgttaggcaccgttcgcagcgcctcgggctcgcacggcaggatcgaaagcgtgattggctggcggcgtctgtggtctcgggcaccgcccagtcgcgggacgctgcctctgcggaactgggggtggggcgtgttgacccccttaaaggcgccagagcccgcggtcacggctcaggttcccggtgcttcgcgcgtctgccgttgtcacaggccagggaggtggcaccaccaggcgaagcttggcgagattgtgtcgtcaagcgcgtacgggcgccaattggccgggcgatgtggcgtggactggcgctggcgcgagcgattggctgcgcggcccgggggcggggccagtgggcggtgcgcgccgcagactgtgctcaaagcgggcgccatccgggaccggcggttgtctgtggccggaggctgatcagtgttctagaacagatcagacattttgtaatgatgcctgaaataaacactaaccacctcgacaagcaacaggttcaactcctggcagagatgtgtatccttattgatgaaaatgacaataaaattggagctgagaccaagaagaattgtcacctgaacgagaacattgagaaaggattattgcatcgagcttttagtgtcttcttattcaacaccggttgttttacgaatacgtgttgtagtcatccattaagcaatccagccgagcttgaggaaagtgacgcccttggagtgaggcgagcagcacagagacggctgaaagctgagctaggaattcccttggaagaggttcctccagaagaaattaattatttaacacgaattcactacaaagctcagtctgatggtatctggggtgaacatgaaattgattacattttgttggtgaggaagaatgtaactttgaatccagatcccaatgagattaaaagctattgttatgtgtcaaaggaagaactaaaagaacttctgaaaaaagcagccagtggtgaaattaagataacgccatggtttaaaattattgcagcgacttttctctttaaatggtgggataacttaaatcatttgaatcagtttgttgaccatgagaaaatatacagaatgtgaatatgtaggtaaatgattacagaaaaatttatctgcttaacaaacttagaatgactttttccttttaaatttagttctatcattaatttatcattaaatttagttctatcatttggtactatcattaatgtattatatacactgatactttaaaacttgtgtggaaaaaactaacttataattttgtatcacacaccctggatatgtgttctgtttctaagcgacatttgtgagagattattgtaaaatgagagcgagcaaataaaacttaatttaatctttgcagatacatacttatgggaaatttgaacaaatgagtgaaactctgtgtttttagtaggctgtgataaacatttccggagcacttgcagaggacttgctatttgccaggtgctttatgtatcattaaatttttctcatagttcagaaaaatgtgcaaaggaaactattgtctcgctccttcaaaacagtcttaattaactttcatattagcagattaaactagcagagcaggttcaagggaaattaaatgatatggaccctaatttgtatcattctgagttgattgtgtggtttattcattctggaaacatgttgatacttacagtcagccactgcttttgataagtgatattgattaggttgaatcttcttgtaaatagtatttaccagttagcaaagtctgtgttttcagaattacagtgagcacagaggtgttcataaaatgggaattgagtcccactcggtaagagttgcttaaacttgacactgttgacatttgggctggataaaacccctgtggtggggtctgtgctgtgcattgcaggatggtgagcagcgtccctctcatgtgacacccacagttatgccggatgttgccagatgcccctaggggacagagtcaacccccaactgaggaccactgtcctacagagtcaggaaatattgtagggagaaaaaaataacaacaacaaaggcctgtgttaatgttaaatagatgagattatggaatgtgtatattaatgttaaaaattgtaccttgatcaatgtactttttataaacttgccatagatatctcagatttgaaacctcaagacagatttattattcttaaatgctgtatgataatgaagaaaaataaaaatttatttcttgcaaagtta

SEQ ID NO: 287044 - DNA, 2459 bp, Homo sapiens
ctggataagactcgtggccggaggctgatcagtgttctagaacagatcagacattttgtaatgatgcctgaaataaacactaaccacctcgacaagcaacaggttcaactcctggcagagatgtgtatccttattgatgaaaatgacggtgctgctttgaaacagtctttcttgtaaagcgatttgtgtaggcatttccgatttgctgagaagagcactctgttcaaggaagtgcagtcttcagtaataccgtattttctcgttggttccagttcgttaaatagtgtggtcattagcatctgctttgctgtcttcctgttacagcgatttctcttcacttcatgcctgttactcggcttcttcagagttattctggattcatagaagagggactagccctgacatacagcagcagcctagcctctaatatttctagagagtggagagaggcgggcaccatgcagggaagcgtgtgccttcaccactttccgagaactgaatgtccttgatagggaacttgactgccggaaaggggccaccagcatcaccatttccttcactcgacggccaacttccttgcccagtgcagagctcttcctcaccatagccatgcagagactatgcatgtggataaaccatgggaaaaagcaaaagcagcagcaagttactaatgttattctgaactgcagggagagaatttggcaaataactggtacttaaggctaaaataattgttatttcttttgctttcaggattattgcatcgagcttttagtgtcttcttattcaacaccgaaaataagcttctgctacagcaaagatcagatgctaagattacctttccaggttgttttacgaatacgtgttgtagtcatccattaagcaatccagccgagcttgaggaaagtgacgcccttggagtgaggcgagcagcacagagacggctgaaagctgagctaggaattcccttggaagaggttcctccagaagaaattaattatttaacacgaattcactacaaagctcagtctgatggtatctggggtgaacatgaaattgattacattttgttggtgaggaagaatgtaactttgaatccagatcccaatgagattaaaagctattgttatgtgtcaaaggaagaactaaaagaacttctgaaaaaagcagccagtggtgaaattaagataacgccatggtttaaaattattgcagcgacttttctctttaaatggtgggataacttaaatcatttgaatcagtttgttgaccatgagaaaatatacagaatgtgaatatgtaggtaaatgattacagaaaaatttatctgcttaacaaacttagaatgactttttccttttaaatttagttctatcattaatttatcattaaatttagttctatcatttggtactatcattaatgtattatatacactgatactttaaaacttgtgtggaaaaaactaacttataattttgtatcacacaccctggatatgtgttctgtttctaagcgacatttgtgagagattattgtaaaatgagagcgagcaaataaaacttaatttaatctttgcagatacatacttatgggaaatttgaacaaatgagtgaaactctgtgtttttagtaggctgtgataaacatttccggagcacttgcagaggacttgctatttgccaggtgctttatgtatcattaaatttttctcatagttcagaaaaatgtgcaaaggaaactattgtctcgctccttcaaaacagtcttaattaactttcatattagcagattaaactagcagagcaggttcaagggaaattaaatgatatggaccctaatttgtatcattctgagttgattgtgtggtttattcattctggaaacatgttgatacttacagtcagccactgcttttgataagtgatattgattaggttgaatcttcttgtaaatagtatttaccagttagcaaagtctgtgttttcagaattacagtgagcacagaggtgttcataaaatgggaattgagtcccactcggtaagagttgcttaaacttgacactgttgacatttgggctggataaaacccctgtggtggggtctgtgctgtgcattgcaggatggtgagcagcgtccctctcatgtgacacccacagttatgccggatgttgccagatgcccctaggggacagagtcaacccccaactgaggaccactgtcctacagagtcaggaaatattgtagggagaaaaaaataacaacaacaaaggcctgtgttaatgttaaatagatgagattatggaatgtgtatattaatgttaaaaattgtaccttgatcaatgtactttttataaacttgccatagatatctcagatttgaaacctcaagacagatttattattcttaaatgctgtatgataatgaagaaaaataaaaatttatttcttgcaaagtta

SEQ ID NO: 287045 - DNA, 5541 bp, Homo sapiens
acgcccggcttccgccccgcagccccgaggggtctgggcgcgctgaagaccccttcggctgctgggccaacgcccccacccttggtcacctactcctgccgccgagcggttcgcgggaggtggcctcgggggtcgtagctactcaccggcggggcgctccgagtccatctgccccgtagcccggcagccggggcgggagggctgcgagcccggggcgcggtccgcctgaggcctgagacccggggccgcctgcgctcagggccgcggtgccggccgcgcgggagcctggcggggacggcgcggtcagtgttcggctcctccgcagtgactcaccagcgtcctgaagcttttgatcaccattggctgggaaggaaaaacagaatcagctgttccctgcgaaaggtgggacttgggccgcttttttcttagaatctaggttggaaacgtcgcatgatggtctttacgtaaacagccgtctcaacgctctacagaaagcgctaaccgcgcatttgaagcccacctagagtaaatcaagagcgtgaaagcattttttttttctgtgtaggttaacattcctgctccttcctttaaaaaggaagctcaaggccaggcgcggtggctcacgcctgtaatcccaacactttgggaggccgaggccgacgtatcacgagattaggaggtcgagaccagcctggccaacatggtgaaaccctgtctttactaaaaatacaaaaactagccgggcgtggcggcgcgcgcctgtaacccatgctactcggaaggctgaggcaggagaatcgcttgaacccgggaggcggaggttgcagtgagccgagatcgcgcctctgcactccagcctgggacagagcgagcctccgtctccaaaaaaaaataaggaagctcaagatgaagagtcagaagtggtaacttgtttgttgcacaagaaacaaatttagcattctatttaggggatccagattaccaaaaaaaaaaaagaagtgaagttatttctgcattaagtatattaataaaactttatcactaaaaacaattctgtaagaggaacgccaaggaaaaaaatatttgagtttttagagaagtcattttttaaacttttagaggttgtgacatttaagtaacataattttatttagtacctagtatgcaaagacattgtactgggcatggcagcaaatagaaagctttgtaaatcgcagtgtcccatctaattaacccgcattctaacaggtggttttattttgctggaccgcaccacagtcaggtaacaccaagaatatcgctaatgtaattttttaagttgatatatttaggattccataaaagtcactgaaaataactgagagcatgacatgtcacaaaacaagggaaagaaatcattttgaggatcagtcgctttacatcttttgtaactaatttaatccccaaaggaatccaataaagtaaaagttattctaaattgaattttaagcatgagaatgtggaaattactcgtcaaaagtcaaaaataatcgtgcagcagggcaaagactaaaggctggcatcagaatccatattcttttcactgttgatgtgctagggctgcaggaacaaaatactgcaaactaggcagcttaaacaaatttattgtcagaggtctgactggaagtcccaaatcaaggtattggcagggttgattccttctgagagctgtgatgggagcctgttaatgcatctcagcgtctaggcattccttggcttgtggcagcatgcccccgccagtcttcacatgacgttttccatgtccgtgtctgtctgcacacttagcgttctttttatgaggacatcagtcatattggagtacagtagacgctactttaatatgacctcatgttaactaatcatatccacaacaaccctgtttccaaataaggtcacattataaaatactggaagtgaggtctttaacacatgaatttgaaagggggacacaatttaacccataacacactgtatcctgaaataactatccaatgtaatttttttaaaagacacaaaactagccgaaattataaaaggttatgattgcaatcctggtatccagttacattctccctcctgcagaagctgtggagaatcctgtctcagaaaaccaatttctattttgtcacatgtccatctatgcaaaatacatgtactttgtccctgacatagggcaacaatgctgaatttactaagactcatttttgcgcatggtttgatagggaattaagatttactaggtattctgtcattgtcctcattactgattattttaactgtgtctcaaacacttggatagtacactatagtgttataagctgtttgacatgtcgcttcctaaattctcaagttatatatatgtgtgtatatatgtcatgtaacaggcacaactgttttcatgtgtatcactttattgcacttcacaggtatcatatgtttcttacaaagtggaggtttgtggcagccctgcatggagcaagtctgtcagcaccatctttctaacaaaactgcaacagccaccccaactttcaagcactgtctttgtggtgtttacgtgttctcgccacacctgcataggttttctctgggtgctgcagttcttgccacatcccagaggtgtgcacgtgaggtgaactggtgtgtcttcactgtcccagtctgagtgtgggtgtgtgagtggccctgtgatggaatggcgtcctgtccagggctggttccctctttgtgccctgagctactgaaacaggcttcagctacacatgacccagaactggaataattaagtaataattatctttttattcatctttcttaaatgtatgtatagctcacatttatttcaatgtttaatattagaatactttggcctttagaagcttagtgattttttttttccttggccagaagtatgctttaggaacttaatccttattttttagcctctggtaaaattggttttgctatacgttgtttcacttaaaagtcctgattcccaagaacgcactgacagcagtgaggacttgctgcgcatgcgggaggccagattttcttatctgtgtgaagccagacatgaaagagatctgtcaacacataaaacaaaatcaaagtctgttttttgtctggaaaagatttttaataaaaatataacttatgttagtgtcgtgtgttttttaagtgaatattttaatatgtttaatttctatgttagtaaatagcagtagtaaacaacagtgagcaaaagcttttaggtgtcctcagtacattttaagagagtgcaagcgtcctgtgaccaagaagtttgagaactggtgcccaccaggttcatctcacaagttcagtattttaaattccacacaaaaggtagaggaaatagctgaattcgcttcagctgcgcatacatttcacgattatttaaaagtttagagggctaggcgcggtggctcacacccggaatctcagcacttcggtaagctgagccaggtggatcacttgaggtcaggagttccagaccagcctgaccaacatgcggaaacccgtctctactaaaaatacgaaataagcccgggcgtggtggcgcatgcctgtaattccagctacttgggaggctgagacgggaccattgcctgaacccggtcggcggaggtttctgtgagtggagactgcaccattgcactcaagcctgggcaacacagaatgaaactgtctccaaaataaaaatttagaacgtagtcatgtacctcgaaagcgaacactcccaacatagcgtggaacaccccacacccccggcgactttgctccgccttggtcccggtcgcagacaccgcagaaaggccatcgttctagacatacgagaactccccgtgcagccaaacgctgtagtcccagcggcggaactcgggggggggaggggggggagtgcccaaccagccagtcagcagtgacgtcccgcctttcctccgtttccattggtccagccatgcggaggtcgctcccatgggacgccgagcttccggctgcagggcttggcgcccgggcgctttcggattgggagggcttcctccatggaacgcgagcctcgagacgtctgacgttaggcaccgttcgcagcgcctcgggctcgcacggcaggatcgaaagcgtgattggctggcggcgtctgtggtctcgggcaccgcccagtcgcgggacgctgcctctgcggaactgggggtggggcgtgttgacccccttaaaggcgccagagcccgcggtcacggctcaggttcccggtgcttcgcgcgtctgccgttgtcacaggccagggaggtggcaccaccaggcgaagcttggcgagattgtgtcgtcaagcgcgtacgggcgccaattggccgggcgatgtggcgtggactggcgctggcgcgagcgattggctgcgcggcccgggggcggggccagtgggcggtgcgcgccgcagactgtgctcaaagcgggcgccatccgggaccggcggttgtctgtggccggaggctgatcagtgttctagaacagatcagacattttgtaatgatgcctgaaataaacactaaccacctcgacaagcaacaggttcaactcctggcagagatgtgtatccttattgatgaaaatgacaataaaattggagctgagaccaagaagaattgtcacctgaacgagaacattgagaaaggattattgcatcgagcttttagtgtcttcttattcaacaccgaaaataagcttctgctacagcaaagatcagatgctaagattacctttccaggttgttttacgaatacgtgttgtagtcatccattaagcaatccagccgagcttgaggaaagtgacgcccttggagtgaggcgagcagcacagagacggctgaaagctgagctaggaattcccttggaagaggttcctccagaagaaattaattatttaacacgaattcactacaaagctcagtctgatggtatctggggtgaacatgaaattgattacattttgttggtgaggaagaatgtaactttgaatccagatcccaatgagattaaaagctattgttatgtgtcaaaggaagaactaaaagaacttctgaaaaaagcagccagtggtgaaattaagataacgccatggtttaaaattattgcagcgacttttctctttaaatggtgggataacttaaatcatttgaatcagtttgttgaccatgagaaaatatacagaatgtgaatatgtaggtaaatgattacagaaaaatttatctgcttaacaaacttagaatgactttttccttttaaatttagttctatcattaatttatcattaaatttagttctatcatttggtactatcattaatgtattatatacactgatactttaaaacttgtgtggaaaaaactaacttataattttgtatcacacaccctggatatgtgttctgtttctaagcgacatttgtgagagctcttgtcagggggggcatactattaccttgcgaacc

SEQ ID NO: 287046 - DNA, 1863 bp, Homo sapiens
atggaactgccggaattcgttacgaggctgatcagtgttctagaacagatcagacattttgtaatgatgcctgaaataaacactaaccacctcgacaagcaacaggttcaactcctggcagagatgtgtatccttattgatgaaaatgacaataaaattggagctgagaccaagaagaattgtcacctgaacgagaacattgagaaaggattattgcatcgagcttttagtgtcttcttattcaacaccggttgttttacgaatacgtgttgtagtcatccattaagcaatccagccgagcttgaggaaagtgacgcccttggagtgaggcgagcagcacagagacggctgaaagctgagctaggaattcccttggaagaggttcctccagaagaaattaattatttaacacgaattcactacaaagctcagtctgatggtatctggggtgaacatgaaattgattacattttgttggtgaggaagaatgtaactttgaatccagatcccaatgagattaaaagctattgttatgtgtcaaaggaagaactaaaagaacttctgaaaaaagcagccagtggtgaaattaagataacgccatggtttaaaattattgcagcgacttttctctttaaatggtgggataacttaaatcatttgaatcagtttgttgaccatgagaaaatatacagaatgtgaatatgtaggtaaatgattacagaaaaatttatctgcttaacaaacttagaatgactttttccttttaaatttagttctatcattaatttatcattaaatttagttctatcatttggtactatcattaatgtattatatacactgatactttaaaacttgtgtggaaaaaactaacttataattttgtatcacacaccctggatatgtgttctgtttctaagcgacatttgtgagagattattgtaaaatgagagcgagcaaataaaacttaatttaatctttgcagatacatacttatgggaaatttgaacaaatgagtgaaactctgtgtttttagtaggctgtgataaacatttccggagcacttgcagaggacttgctatttgccaggtgctttatgtatcattaaatttttctcatagttcagaaaaatgtgcaaaggaaactattgtctcgctccttcaaaacagtcttaattaactttcatattagcagattaaactagcagagcaggttcaagggaaattaaatgatatggaccctaatttgtatcattctgagttgattgtgtggtttattcattctggaaacatgttgatacttacagtcagccactgcttttgataagtgatattgattaggttgaatcttcttgtaaatagtatttaccagttagcaaagtctgtgttttcagaattacagtgagcacagaggtgttcataaaatgggaattgagtcccactcggtaagagttgcttaaacttgacactgttgacatttgggctggataaaacccctgtggtggggtctgtgctgtgcattgcaggatggtgagcagcgtccctctcatgtgacacccacagttatgccggatgttgccagatgcccctaggggacagagtcaacccccaactgaggaccactgtcctacagagtcaggaaatattgtagggagaaaaaaataacaacaacaaaggcctgtgttaatgttaaatagatgagattatggaatgtgtatattaatgttaaaaattgtaccttgatcaatgtactttttataaacttgccatagatatctcagatttgaaacctcaagacagatttattattcttaaatgctgtatgataatgaagaaaaataaaaatttatttcttgcaaagtta

SEQ ID NO: 287047 - DNA, 2096 bp, Homo sapiens
cattctgaattcttggagccaaggtcacaaagggaaatcctgtgaatggcataattttatattctgcataaagtgagtttacacaatgagtgcaacctaatacaacagcaagaaaaaataagaactagtaagcaattgggcaatatgtataatttacatatttatctttaatctgtattatctacactttgatcttttttggttaaagaagtattaataaggaacctacctacaaatgtagtctgtttcacaacataattactgatagcccattataaccaattttaaaatccttaaaataattactgatagcccattataaccaattttaaaatccttaaaataattactgatagcccattataactgattttaaaatccttaaaaatcatttcatttttcagttacttataaaactttttcttgatctttcagacctactttgaagaaaagttgatctgtctctgtattaccattttccaggttgttttacgaatacgtgttgtagtcatccattaagcaatccagccgagcttgaggaaagtgacgcccttggagtgaggcgagcagcacagagacggctgaaagctgagctaggaattcccttggaagaggttcctccagaagaaattaattatttaacacgaattcactacaaagctcagtctgatggtatctggggtgaacatgaaattgattacattttgttggtgaggaagaatgtaactttgaatccagatcccaatgagattaaaagctattgttatgtgtcaaaggaagaactaaaagaacttctgaaaaaagcagccagtggtgaaattaagataacgccatggtttaaaattattgcagcgacttttctctttaaatggtgggataacttaaatcatttgaatcagtttgttgaccatgagaaaatatacagaatgtgaatatgtaggtaaatgattacagaaaaatttatctgcttaacaaacttagaatgactttttccttttaaatttagttctatcattaatttatcattaaatttagttctatcatttggtactatcattaatgtattatatacactgatactttaaaacttgtgtggaaaaaactaacttataattttgtatcacacaccctggatatgtgttctgtttctaagcgacatttgtgagagattattgtaaaatgagagcgagcaaataaaacttaatttaatctttgcagatacatacttatgggaaatttgaacaaatgagtgaaactctgtgtttttagtaggctgtgataaacatttccggagcacttgcagaggacttgctatttgccaggtgctttatgtatcattaaatttttctcatagttcagaaaaatgtgcaaaggaaactattgtctcgctccttcaaaacagtcttaattaactttcatattagcagattaaactagcagagcaggttcaagggaaattaaatgatatggaccctaatttgtatcattctgagttgattgtgtggtttattcattctggaaacatgttgatacttacagtcagccactgcttttgataagtgatattgattaggttgaatcttcttgtaaatagtatttaccagttagcaaagtctgtgttttcagaattacagtgagcacagaggtgttcataaaatgggaattgagtcccactcggtaagagttgcttaaacttgacactgttgacatttgggctggataaaacccctgtggtggggtctgtgctgtgcattgcaggatggtgagcagcgtccctctcatgtgacacccacagttatgccggatgttgccagatgcccctaggggacagagtcaacccccaactgaggaccactgtcctacagagtcaggaaatattgtagggagaaaaaaataacaacaacaaaggcctgtgttaatgttaaatagatgagattatggaatgtgtatattaatgttaaaaattgtaccttgatcaatgtactttttataaacttgccatagatatctcagatttgaaacctcaagacagatttattattcttaaatgctgtatgataatgaagaaaaataaaaatttatttcttgcaaagtta
